United States Patent Application Publication US 2011/0183924 A1 - sequence listing, part 159

SEQ ID NO: 414134 - DNA, 786 bp, Homo sapiens
tccagtttgccaactgagctaagaaatgctggataaaagtaaaagctctactgagatgaagaaagaaaaagaatacctgctcagctccagagacacgtaaagggacagagattgggggacagaaggaagtgcattaattccttccacgacccctgaagagcagcggtgggtctgagcatcctatctccaggaagcaggccagcaggcaagccagctgccacctcgtcctgtgcaaagcacaggcaccgtccccaaaagatttccaaagatgatgttaaacccagccacggttctgatctccaggaaagcaattgctgtggtacaaaaggacaagggttaaaagagaacagtgggagctctctttcccaactaactcacgcagtgtgacgcagaggctttcagcacagcccagggtgcccgggactgaaaactccttcaccagccccctccacaggatatagaagacttagatcactacgagatgaaagcagagcccattagtgggaaaaagttggaggatgaaggaattgaaaaagaaaatttggcaatattagagaaattaggaagactgaaagacaagagcatttaactgcaaactgttgtcgttgtcaactgggttgtcttcctgaagtatgaatccggtatgtattgtgtggaggagcattacgtactgaacttctcacaaaacagggctgaagcagtgcctactcgacagaaccggtcatcgtacaaagaaatgccacgtgactcaaaggcaaagccagagtgcagcttggagccaagaag

SEQ ID NO: 414135 - DNA, 858 bp, Homo sapiens
tagcagtcgcggtgtgccgctacgtgcgggctctcaaggagctcagcctcccggacggagccggcggctgcggggcgaggacggcggcggaccggggcagccccgcgccctggccagctctactgagatgaagaaagaaaaagaatacctgctcagctccagagacacgtaaagggacagagattgggggacagaaggaagtgcattaattccttccacgacccctgaagagcagcggtgggtctgagcatcctatctccaggaagcaggccagcaggcaagccagctgccacctcgtcctgtgcaaagcacaggcaccgtccccaaaagatttccaaagatgatgttaaacccagccacggttctgatctccaggaaagcaattgctgtggtacaaaaggacaagggttaaaagagaacagtgggagctctctttcccaactaactcacgcagtgtgacgcagaggctttcagcacagcccagggtgcccgggactgaaaactccttcaccagccccctccacaggatatagaagacttagatcactacgagatgaaagcagagcccattagtgggaaaaagttggaggatgaaggaattgaaaaagaaaatttggcaatattagagaaattaggaagactgaaagacaagagcatttaactgcaaactgttgtcgttgtcaactgggttgtcttcctgaagtatgaatccggtatgtattgtgtggaggagcattacgtactgaacttctcacaaaacagggctgaagcagtgcctactcgacagaaccggtcatcgtacaaagaaatgccacgtgactcaaaggcaaagccagagtgcagcttggagccaagaag

SEQ ID NO: 414136 - DNA, 691 bp, Homo sapiens
aggcgaggcactgcctggcaaggctgctggagggagatctggccgcagatggtgaaggagaacatcgaggcccccagtccccaagcagggctccatgggtcgggcggcgggcattgctctactgagatgaagaaagaaaaagaatacctgctcagctccagagacacgtaaagggacagagattgggggacagaaggaagtgcattaattccttccacgacccctgaagagcagcggtgggtctgagcatcctatctccaggaagcaggccagcaggcaagccagctgccacctcgtcctgtgcaaagcacaggcaccgtccccaaaagatttccaaagatgatgttaaacccagccacggttctgatctccaggaaagcaattgctgtggtacaaaaggacaagggttaaaagagaacagtgggagctctctttcccaactaactcacgcagtgtgacgcagaggctttcagcacagcccagggtgcccgggactgaaaactccttcaccagccccctccacaggatatagaagacttagatcactacgagatgaaagcagagcccattagtgggaaaaagttggaggatgaaggaattgaaaaagaaaatttggcaatattagagaaattaggaagactgaaagacaagagcatttaactgcaaactgttgtcgttgtccggggttgtt

SEQ ID NO: 414137 - DNA, 679 bp, Homo sapiens
gacccagactccgtgaatagagggaaaggcggccagcagaacccaaactgttctgccacaggctcctccccacagagcacagctcagtgcaacagagtccccaaatccaagatgcagaatccacaaagagaaaaccttctgctccagaaggatttccaaagatgatgttaaacccagccacggttctgatctccaggaaagcaattgctgtggtacaaaaggacaagggttaaaagagaacagtgggagctctctttcccaactaactcacgcagtgtgacgcagaggctttcagcacagcccagggtgcccgggactgaaaactccttcaccagccccctccacaggatatagaagacttagatcactacgagatgaaagcagagcccattagtgggaaaaagttggaggatgaaggaattgaaaaagaaaatttggcaatattagagaaattaggaagactgaaagacaagagcatttaactgcaaactgttgtcgttgtcaactgggttgtcttcctgaagtatgaatccggtatgtattgtgtggaggagcattacgtactgaacttctcacaaaacagggctgaagcagtgcctactcgacagaaccggtcatcgtacaaagaaatgccacgtgactcaaaggcaaagccagagtgcagcttggagccaagaag

SEQ ID NO: 414138 - DNA, 494 bp, Homo sapiens
aggcgaggcactgcctggcaaggctgctggagggagatctggccgcagatggtgaaggagaacatcgaggcccccagtccccaagcagggctccatgggtcgggcggcgggcattgctctactgagatgaagaaagaaaaagaatacctgctcagctccagagacacgtaaagggacagagattgggggacagaaggaagtgcattaattccttccacgacccctgaagagcagcggtgggtctgagcatcctatctccaggaagcaggccagcaggcaagccagctgccacctcgtcctgtgcaaagcacaggcaccgtccccaaaagatatagaagacttagatcactacgagatgaaagcagagcccattagtgggaaaaagttggaggatgaaggaattgaaaaagaaaatttggcaatattagagaaattaggaagactgaaagacaagagcatttaactgcaaactgttgtcgttgtccggggttgtt

SEQ ID NO: 414139 - DNA, 540 bp, Homo sapiens
cttgagccactatgcccaaccaccattaagattttggcaggaatcattgtgctagacaccactatcccaccaatcactgagcacttttcatttcctgccgctggtgctgttggataccttacggcaagctgccgtccctgcccacccacctgaggacaggaacctccaactctgccttgccagaactgaccagtgtgtctgacagatggatatagaagacttagatcactacgagatgaaagcagagcccattagtgggaaaaagttggaggatgaaggaattgaaaaagaaaatttggcaatattagagaaattaggaagactgaaagacaagagcatttaactgcaaactgttgtcgttgtcaactgggttgtcttcctgaagtatgaatccggtatgtattgtgtggaggagcattacgtactgaacttctcacaaaacagggctgaagcagtgcctactcgacagaaccggtcatcgtacaaagaaatgccacgtgactcaaaggcaaagccagagtgcagcttggagccaagaag

SEQ ID NO: 414140 - DNA, 857 bp, Homo sapiens
aggcgaggcactgcctggcaaggctgctggagggagatctggccgcagatggtgaaggagaacatcgaggcccccagtccccaagcagggctccatgggtcgggcggcgggcattgctctactgagatgaagaaagaaaaagaatacctgctcagctccagagacacgtaaagggacagagattgggggacagaaggaagtgcattaattccttccacgacccctgaagagcagcggtgggtctgagcatcctatctccaggaagcaggccagcaggcaagccagctgccacctcgtcctgtgcaaagcacaggcaccgtccccaaaagatttccaaagatgatgttaaacccagccacggttctgatctccaggaaagcaattgctgtggtacaaaaggacaagggttaaaagagaacagtgggagctctctttcccaactaactcacgcagtgtgacgcagaggctttcagcacagcccagggtgcccgggactgaaaactccttcaccagccccctccacaggatatagaagacttagatcactacgagatgaaagcagagcccattagtgggaaaaagttggaggatgaaggaattgaaaaagaaaatttggcaatattagagaaattaggaagactgaaagacaagagcatttaactgcaaactgttgtcgttgtcaactgggttgtcttcctgaagtatgaatccggtatgtattgtgtggaggagcattacgtactgaacttctcacaaaacagggctgaagcagtgcctactcgacagaaccggtcatcgtacaaagaaatgccacgtgactcaaaggcaaagccagagtgcagcttggagccaagaag

SEQ ID NO: 414141 - DNA, 481 bp, Homo sapiens
ctcccccatcaccccaacctacagaggaggatcctgagcacagagtccgggtccgggtcaccaagctccgtctcggaggccctaatcaggatctgactgtcctcgagatcaaacgggaaaacccacagctgaaacagccccctccacaggatatagaagacttagatcactacgagatgaaagcagagcccattagtgggaaaaagttggaggatgaaggaattgaaaaagaaaatttggcaatattagagaaattaggaagactgaaagacaagagcatttaactgcaaactgttgtcgttgtcaactgggttgtcttcctgaagtatgaatccggtatgtattgtgtggaggagcattacgtactgaacttctcacaaaacagggctgaagcagtgcctactcgacagaaccggtcatcgtacaaagaaatgccacgtgactcaaaggcaaagccagagtgcagcttggagccaagaag

SEQ ID NO: 414142 - DNA, 510 bp, Homo sapiens
  misc_feature (20)..(20): n is a, c, g, or t
  misc_feature (104)..(104): n is a, c, g, or t
  misc_feature (272)..(272): n is a, c, g, or t
atcatgaactcgaggcggtnccggggcagggcagagctggcaagcacgtggtggggcccctgaggtgtgcagagggtcgcgcacctagaagcctgtcgctggcncggtctgggcgggaggttctgcggcgggaggcagcctgttggttgcagggctgaaaaagcagttctacaaggcaagccagctggtcagtgagaaggtcggagggtctgaggggaccaagctggacaatgacttcaaagagatggagatgtcatcagcaaggcggtganggaaatgctggcaaggaccatcaagtacctggagcccaacccagcctcacaggctaagctgaccatgctcaacacagtgtgaaagatccagggccaggtgaagaaccccggctacccgcagtcggaggggctcctgagcgagtgcctgatccgccaccagaaggagctgggcaacgagtccaacttcagtgatgcactgctggatgccggcgagtccatgaagcacctggcagaggtg

SEQ ID NO: 414143 - DNA, 678 bp, Homo sapiens
aaggtaaaatttatatacaatgaaatatacaaatcttaagtgcgccatttaatgagttttgacaaatgtatgtgtctacgtaattcaaactgctatcaagaaatggaacatttccatcacctcagaaatttttctcacagccattcccagtcaaaatgtggcaccacccactcctgaggcaaccctgttctggttttccaccacagatttttgccataaaaaattagtacacaggatatgattccattgttcattaaatgggattatatactatgtactactttatgggaagatttttgaaaaatattcagcataatgttttcgagattcatcccacgttgttgcataaaatagcagttcattcctttttatcgctgaggattccatcacatgaatatacgagttcatttatttattctcttattgatggatacatttgggatatttgagtttttgcctatcacgaacaaagttattagccagacatggtggttcatgtctgtcatcccagcactttgggaggctgacgcaggaggatcacttgaagtcaggagtctgagaccagcctgggcaaaatagcaagacacagtctctaccaaaaaaataaaatagttagccagacatggcacctgtagtcctactctggaggctgaggtgggaggatcggttgagtccaga

SEQ ID NO: 414144 - DNA, 1669 bp, Homo sapiens
cgcccgaatgagagcgcggggcggtgccgttgggaccacggcggccagagcggcaggatggcttccggcttcaagaagcccagcgctgcctccaccggccaaaagagaaaggtggcacctaagcccgagctcactgaggatcagaagcaagaagttcgggaagcatttgacctcttcgacgtggacggaagtgggaccatcgacgcgaaggagctgaaggtggccatgagagcgctgggcttcgaacccaggaaggaagagatgaagaaaatgatctccgaggtggacagggaaggcacggggaagatcagcttcaatgacttcctggccgtgatgacgcagaagatgtccgagaaggacaccaaagaagaaatcctgaaggccttcaggctctttgatgacgatgagaccgggaagatctcgttcaaaaacctgaagcgtgtggccaacgagctgggggagaacctcacggatgaggagctgcaggagatgatcgacgaagctgatcgggatggggacggcgaagtgaacgaggaggagttccttcggatcatgaagaagaccagcctttactgaagtcggttcagaagctaaagtgactctctgggttgcctgcttccattttgtgaaaccttagaggacagcggctgcctgtcccttcttcaccccctcacccccataatttgtctagatctatttccatatctctagttcaataatagaatttgaaagatgcttgtaatgtgagttttgggttttaattctcaagagccaacctggagcacatgaggttaaacaaagggccctgaagtttgagtgcgccctccatttgccctgtgctgaacttgctgttcatctgttgatctggaggcaggacagcttctgggacacacaaaaatgtggttccctttgtcacttctttggtggtcttaaattatcttgcttcatatatcattccttaaattccagtcattgttccagcataatgagatggaatctgccagtagatttgcctagcctgtccacttagctgaataccagtttgaaggaaaacagggtggccacttacaaacttacggagctcaggacagatattcttataaagaatagacttgcttgggtggtagtacgttgtgcaattttgactattcactggctttatacctgcaaatgattcttcgttcatgtgtaaattgtccaccatgggtttatctagggctagtatgtatacctgggctacagaataaaaataaaatctaatactggcccaagcaaagtataatttgcttaagaggttacgctaacaaacgattttgagtaaatatttacaaatgtaggatcttagtttaggaaattataacaaataccttaatataacattttaagctacttatagtccttggaaatagcaacaaatatcttagttattggactattataaccttagtcatcttattactgcttgattatgagacactctccctgctaatccttagaacatcttggttcttggtacttgacttttagcccctctgacatatagttgatgtcagagtgtctggcatttcagtagtgctctattttacaaatcccagtaaactgctccactgtggcttgtttatgtgttaatactgcttgttttctgttataaattattttttgctttgga

SEQ ID NO: 414145 - DNA, 345 bp, Homo sapiens
tttaaagaacaatgattaagtgaaaattctctcagttttttttaattggttcagcaattgattaattactgaatcttgaccctaaactttttagtctagaaatgtgcttgaggaatacaggctggagatcagctttttgacattgcattcccctcctggatcacatccatgttggaatcaatttataaactgccttcctaaggcttaaaatgatggtgatctacagacaagtgccttcctaggcacagggttgctggagactgatgccaggcccatggctcttaaagggaacactgaactcatggcagaaatggtggaaagtagagaaatgaatagagggggaaa

SEQ ID NO: 414146 - DNA, 1007 bp, Homo sapiens
aacgcagaggatgagtccatcccttcttcccaggaggagggaaaaggggtacaaatggggctcccactggcacaggaaccaggagcagtttgttgcctgcctgccttcccttctctccttgtgaattgcctgggtgccccaccgtgggcacaagaatggaagtcgtggcccagagcttccctcgcgaaaaatgagcaaggcgggtgccgggagggggcctttacaggaggctcaaagtcagaaaatgagatacaagacatccttggtgatgaggaaacgattacggctttaccgaaacactcttaaagagtcaagtagcagctctggacaccatggcccccagctcaccgccgcctccagcccctcggtgttcccgggcctccacgaggagcctccccaggcctcccccagccgtcctttgaatggactcctgcgtctggggctccctggagacatgtacgcgcggccggagcccttcccgccagggcctgcggcccgcagcgacgccctggcagctgccgcagccctgcatggctacgggggcatgaacctgacggtgaacctcgctgcgccccacggtcctggcgctttcttccgctacatgcgccagcccatcaaacaggagctcatctgcaagtggctggcggccgacggcaccgcgaccccgagcctctgctccaaaactttcagcaccatgcacgagctggtcacgcacgtcaccgtggagcacgtcggcggcccggaacaggccaaccacatttgcttctgggaggagtgtccgcgccagggaaagcccttcaaagccaaatacaaacttgtaaatcacatccgcgtgcacacgggcgagaagcccttcccttgtcctttcccggggtgtgggaaggtctttgctagatcagaaaatctcaaaatacacaaacgaactcacacaggcgagaagcccttcagatgcgagttcgagggctgcgagcggcgcttcgccaacagcagcgaccgtaagaagcatt

SEQ ID NO: 414147 - DNA, 343 bp, Homo sapiens
tataatttttcaatgtttttatcaccaaagatatatcattttgcaatatgggctgttcccggcaaaatccttttctttagcttcaaaatttgaaaatggtcaaagaaagaccgaaagatcttcagatcaactccttctttcattcatacattcaaaccacaggatgttgccacacagacgtgtaaaattgtttaactagtgactgtcactcttttcttcccaaacaggctcaaagtcagaaaatgagatacaagacatccttggtgatgaggaaacgattacggctttaccgaaacactcttaaagagtcaagtaagttaaaatcctcctttgaatattggtt

SEQ ID NO: 414148 - DNA, 2473 bp, Homo sapiens
gtttgggggagaggtgtgtgagggggtggcggttggagcagggaagtgtgagagagagagagagaccgaccgcgtgcggcaggacctgtcatcactgacgtcggacccggccgcgggcctatgggctacccaggcgattgttcctctctgtgggtccaggccacggccctgaatctctattgacttcctaacgcgccctgctgctacttctgtagtgcgcaggatttcgcgtgggcattaatagccaagggggtgggcgcgcccaaatccaaaccttgggaagaagaagagaaagaaagaaagaaaaaaaaaaaaactttacagaagtttttttgtgtggttttcctttcccctccccactgtcaggtggcagtggtgttagcggcccggtacagggagctccggggagcgtgggtcggcaagcagccggccgccctcccctagccaagcggggcactgaaaatatatatggctggggcgcttcagaaccaccaccacctccaacatcatcatttctgtcacctccactccccgcagggcatcgtgccccggagagccccggggtgttagccgccaaagtgcgcttggggctcagctcctacccctctggagcagaacccccagcaacccacagactcagccctgcgccttccattaccccttacatctactctgccgctaccatccctctctagctcaaggcgcggcgggggacttggcccaacagcaattcggcccaatggcggcggaggtgtttggccttgctctgtccaccgggttcactgctggcgctgtctggctctgagttccacggctgactgcagaggccgtagtgcggcagggctgggcctgccccccggggcccagggaagagcgcgcagcccacgccacccgttctcatgcgcgctatttgtttcgacaacaggtagcagctctggacaccatggcccccagctcaccgccgcctccagcccctcggtgttcccgggcctccacgaggagcctccccaggcctcccccagccgtcctttgaatggactcctgcgtctggggctccctggagacatgtacgcgcggccggagcccttcccgccagggcctgcggcccgcagcgacgccctggcagctgccgcagccctgcatggctacgggggcatgaacctgacggtgaacctcgctgcgccccacggtcctggcgctttcttccgctacatgcgccagcccatcaaacaggagctcatctgcaagtggctggcggccgacggcaccgcgaccccgagcctctgctccaaaactttcagcaccatgcacgagctggtcacgcacgtcaccgtggagcacgtcggcggcccggaacaggccaaccacatttgcttctgggaggagtgtccgcgccagggaaagcccttcaaagccaaatacaaacttgtaaatcacatccgcgtgcacacgggcgagaagcccttcccttgtcctttcccggggtgtgggaaggtctttgctagatcagaaaatctcaaaatacacaaacgaactcacacaggtcagtattcggcgctgtctgtcgcgtgcggaccctctggggaagcaggccctcgggtctggatttcctcaagtcccaactgaggggagggggaaatattttggggttgtttccatgagccaaggccataaaatattaattatgcgcttctattcttagaatcacagaagtttccggaggctgtgtgtagggaggatagtgcgggatttctgttctgggggggacaagggtgaacgtgcctaagaccctgtgtgtgcaaacatgtgctctctgcttaagagtttgattttaagatattttaaaacagcattgttccccaaagtcgtaaagacataagaacagctgtctaacttttttccttgtccctttggaattgcgcagcaaaactcttccacctgtagtcctgataacctggcccacctggactgagaggttaccaggccctggagccttctttaggagttgggggtcgaatgggctaactttgtacgtatttttgagccttggggccggacactagggatgtttggtggaccctcactttcgctttagcacagacctatccaccttaaatatcatttaccaagctgctaagggaaatggggacatgtgtcaactacatctgctacttctagttaacagaaaaaaaggagtatcgttcaagagcctgcaaaattgaactcctctggccagagcatctctaattaatacaactgcaaggagaaagttttcacacttccagaacagcctgtgaagttacattaattagtttagcagccattgtttgtactctccttagttagggttttctcgctcctcctccctggaagtttaagaaatcaacatcttctcccctcccccattttgggggcgggagaaggggactggtggggacaggagaaaataaaatgaattccagcttggtgcccc

SEQ ID NO: 414149 - DNA, 810 bp, Homo sapiens
tgctggaggtgaaagtctggcctggcagccttccccaggtgagcagcaacaaggccacgtgctgctgggtctcagtcctccacttcccgtgtcctctggaagttgtcaggagcaatgttgcgcttgtacgtgttggtaatgggagtttctgccttcacccttcagcctgcggcacacacaggggctgccagaagctgccggtttcgtgggaggcattacaagcgggagttcaggctggaaggggagcctgtagccctgaggtgcccccaggtgccctactggttgtgggcctctgtcagcccccgcatcaacctgacatggcataaaaatgactctgctaggacggtcccaggagaagaagagacacggatgtgggcccaggacggtgctctgtggcttctgccagccttgcaggaggactctggcacctacgtctgcactactaggtaagtctccctgtgcggggctggggaggggatcctggcaggatggaggcttgtgagggtcttcagtcatgatccggatctcagaatccagtgtacaaaatacaaatccagtgaatccacattgcatcccgtttgctgttcctgacaccccccccaaccctacagtctcattctgtctccatttagtctttgctcaaatgccacctctttggagacaacgtccctagccattttagctgacaccgccctctgtcactctctccttaccctgctgtagtttccttgcgataagattttcccatctgacacatttgtgtgcgctactgtatttaatgtttgtctacccattagaatgtaaactctg

SEQ ID NO: 414150 - DNA, 1348 bp, Homo sapiens
tgctggaggtgaaagtctggcctggcagccttccccaggtgagcagcaacaaggccacgtgctgctgggtctcagtcctccacttcccgtgtcctctggaagttgtcaggagcaatgttgcgcttgtacgtgttggtaatgggagtttctgccttcacccttcagcctgcggcacacacaggggctgccagaagctgccggtttcgtgggaggcattacaagcgggagttcaggctggaaggggagcctgtagccctgaggtgcccccaggtgccctactggttgtgggcctctgtcagcccccgcatcaacctgacatggcataaaaatgactctgctaggacggtcccaggagaagaagagacacggatgtgggcccaggacggtgctctgtggcttctgccagccttgcaggaggactctggcacctacgtctgcactactagaaatgcttcttactgtgacaaaatgtccattgagctcagagtttttgagaatacagatgctttcctgccgttcatctcatacccgcaaattttaaccttgtcaacctctggggtattagtatgccctgacctgagtgaattcacccgtgacaaaactgacgtgaagattcaatggtacaaggattctcttcttttggataaagacaatgagaaatttctaagtgtgagggggaccactcacttactcgtacacgatgtggccctggaagatgctggctattaccgctgtgtcctgacatttgcccatgaaggccagcaatacaacatcactaggagtattgagctacgcatcaagaaaaaaaaagaagagaccattcctgtgatcatttcccccctcaagaccatatcagcttctctggggtcaagactgacaatcccgtgtaaggtgtttctgggaaccggcacacccttaaccaccatgctgtggtggacggccaatgacacccacatagagagcgcctacccgggaggccgcgtgaccgaggggccacgccaggaatattcagaaaataatgagaactacattgaagtgccattgatttttgatcctgtcacaagagaggatttgcacatggattttaaatgtgttgtccataataccctgagttttcagacactacgcaccacagtcaaggaagcctcctccacgttctcctggggcattgtgctggccccactttcactggccttcttggttttggggggaatatggatgcacagacggtgcaaacacagaactggaaaagcagatggtctgactgtgctatggcctcatcatcaagactttcaatcctatcccaagtgaaataaatggaatgaaataattcaaacacaaaaccgta

SEQ ID NO: 414151 - DNA, 1181 bp, Homo sapiens
  misc_feature (1181)..(1181): n is a, c, g, or t
cagtcacattctagaagaccatgtgggatgggagatactgttgtggtcacctctggaaaatacattctgctactcttaaaaactagtgacgctcatacaaatcaacagaaagagcttctgaaggaagactttaaagctgcttctgccacgtgctgctgggtctcagtcctccacttcccgtgtcctctggaagttgtcaggagcaatgttgcgcttgtacgtgttggtaatgggagtttctgccttcacccttcagcctgcggcacacacaggggctgccagaagctgccggtttcgtgggaggcattacaagcgggagttcaggctggaaggggagcctgtagccctgaggtgcccccaggtgccctactggttgtgggcctctgtcagcccccgcatcaacctgacatggcataaaaatgactctgctaggacggtcccaggagaagaagagacacggatgtgggcccaggacggtgctctgtggcttctgccagccttgcaggaggactctggcacctacgtctgcactactagaaatgcttcttactgtgacaaaatgtccattgagctcagagtttttgagaatacagatgctttcctgccgttcatctcatacccgcaaattttaaccttgtcaacctctggggtattagtatgccctgacctgagtgaattcacccgtgacaaaactgacgtgaagattcaatggtacaaggattctcttcttttggataaagacaatgagaaatttctaagtgtgagggggaccactcacttactcgtacacgatgtggccctggaagatgctggctattaccgctgtgtcctgacatttgcccatgaaggccagcaatacaacatcactaggagtattgagctacgcatcaagaaaaaaaaagaagagaccattcctgtgatcatttcccccctcaagaccatatcagcttctctggggtcaagactgacaatcccgtgtaaggtgtttctgggaaccggcacacccttaaccaccatgctgtggtggacggccaatgacacccacatagagagcgcctacccgggaggccgcgtgaccgaggggccacgccagtaagtgggccagggtcttctgttgagaactctgtgggtttcgctcttccttttggagacagttatcactatgacccacataccacatn

SEQ ID NO: 414152 - DNA, 386 bp, Homo sapiens
caggtggaggctgcatggatttttctgatctagctcaagagttcacacagcatcacttctgctgcattgtattggttacaccaagttacaggccagcccacattcaagggaggtgagttagactccacctcttggtggcagagtggcacagtcacattctagaagaccatgtgggatgggagatactgttgtggtcacctctggaaaatacattctgctactcttaaaaactagtgacgctcatacaaatcaacagaaagagcttctgaaggaagactttaaagctgcttctgtgagtgaaatatgctacatgcctttgtaccaggatctgattggctgtctttcccctactcagatcttcctgtccttgtttcttctgtctttgt

SEQ ID NO: 414153 - DNA, 463 bp, Homo sapiens
acaaagttaaaccctcagcacttgcccacttaccctacgatgtttctaacagattttgccctatcacgctcgtttctctaatgccacagacatcactctcaaatatcctccatgttggtgtgagggatgtgctttctgaaaatcaatgcacatttatcaagaaaaacaaactccaatttctttcttatcttgtacacctgcattgccctgtcctcttgtacagtgagagactgttcagctcctgatgtgactctgttcttcccacagcctcctccacgttctcctggggcattgtgctggccccactttcactggccttcttggttttggggggaatatggatgcacagacggtgcaaacacagaactggaaaagcagatggtctgactgtgctatggcctcatcatcaagactttcaatcctatcccaagtgaaataaatggaatgaaataattcaaacaca

SEQ ID NO: 414154 - DNA, 1439 bp, Homo sapiens
cagtcacattctagaagaccatgtgggatgggagatactgttgtggtcacctctggaaaatacattctgctactcttaaaaactagtgacgctcatacaaatcaacagaaagagcttctgaaggaagactttaaagctgcttctgccacgtgctgctgggtctcagtcctccacttcccgtgtcctctggaagttgtcaggagcaatgttgcgcttgtacgtgttggtaatgggagtttctgccttcacccttcagcctgcggcacacacaggggctgccagaagctgccggtttcgtgggaggcattacaagcgggagttcaggctggaaggggagcctgtagccctgaggtgcccccaggtgccctactggttgtgggcctctgtcagcccccgcatcaacctgacatggcataaaaatgactctgctaggacggtcccaggagaagaagagacacggatgtgggcccaggacggtgctctgtggcttctgccagccttgcaggaggactctggcacctacgtctgcactactagaaatgcttcttactgtgacaaaatgtccattgagctcagagtttttgagaatacagatgctttcctgccgttcatctcatacccgcaaattttaaccttgtcaacctctggggtattagtatgccctgacctgagtgaattcacccgtgacaaaactgacgtgaagattcaatggtacaaggattctcttcttttggataaagacaatgagaaatttctaagtgtgagggggaccactcacttactcgtacacgatgtggccctggaagatgctggctattaccgctgtgtcctgacatttgcccatgaaggccagcaatacaacatcactaggagtattgagctacgcatcaagaaaaaaaaagaagagaccattcctgtgatcatttcccccctcaagaccatatcagcttctctggggtcaagactgacaatcccgtgtaaggtgtttctgggaaccggcacacccttaaccaccatgctgtggtggacggccaatgacacccacatagagagcgcctacccgggaggccgcgtgaccgaggggccacgccaggaatattcagaaaataatgagaactacattgaagtgccattgatttttgatcctgtcacaagagaggatttgcacatggattttaaatgtgttgtccataataccctgagttttcagacactacgcaccacagtcaaggaagcctcctccacgttctcctggggcattgtgctggccccactttcactggccttcttggttttggggggaatatggatgcacagacggtgcaaacacagaactggaaaagcagatggtctgactgtgctatggcctcatcatcaagactttcaatcctatcccaagtgaaataaatggaatgaaataattcaaacacaaaaccgta

SEQ ID NO: 414155 - DNA, 348 bp, Homo sapiens
gtgggttgaccgtggcttgtgggttgaccgtggcttgtgggttgaccgtggcttgtgggttgaccgtggcttgtgggttgaccgatggcttcacttacatggctggtgcctttgcagggttcctgggaggctgagcatagctaggattgtcaaccaatgccctacatgtggcctccctagcaaggtggtctcagggcagttggactgtcttcgtggtggctgactttccaaggaagccaggcagaagcaagcaccccttggaaaccaggtggaggctgcatggatttttctgatctagctcaagagttcacacagcatcacttctgctgcattgtattggttacacca

SEQ ID NO: 414156 - DNA, 1292 bp, Homo sapiens
tgctggaggtgaaagtctggcctggcagccttccccaggtgagcagcaacaaggccacgtgctgctgggtctcagtcctccacttcccgtgtcctctggaagttgtcaggagcaatgttgcgcttgggctgccagaagctgccggtttcgtgggaggcattacaagcgggagttcaggctggaaggggagcctgtagccctgaggtgcccccaggtgccctactggttgtgggcctctgtcagcccccgcatcaacctgacatggcataaaaatgactctgctaggacggtcccaggagaagaagagacacggatgtgggcccaggacggtgctctgtggcttctgccagccttgcaggaggactctggcacctacgtctgcactactagaaatgcttcttactgtgacaaaatgtccattgagctcagagtttttgagaatacagatgctttcctgccgttcatctcatacccgcaaattttaaccttgtcaacctctggggtattagtatgccctgacctgagtgaattcacccgtgacaaaactgacgtgaagattcaatggtacaaggattctcttcttttggataaagacaatgagaaatttctaagtgtgagggggaccactcacttactcgtacacgatgtggccctggaagatgctggctattaccgctgtgtcctgacatttgcccatgaaggccagcaatacaacatcactaggagtattgagctacgcatcaagaaaaaaaaagaagagaccattcctgtgatcatttcccccctcaagaccatatcagcttctctggggtcaagactgacaatcccgtgtaaggtgtttctgggaaccggcacacccttaaccaccatgctgtggtggacggccaatgacacccacatagagagcgcctacccgggaggccgcgtgaccgaggggccacgccaggaatattcagaaaataatgagaactacattgaagtgccattgatttttgatcctgtcacaagagaggatttgcacatggattttaaatgtgttgtccataataccctgagttttcagacactacgcaccacagtcaaggaagcctcctccacgttctcctggggcattgtgctggccccactttcactggccttcttggttttggggggaatatggatgcacagacggtgcaaacacagaactggaaaagcagatggtctgactgtgctatggcctcatcatcaagactttcaatcctatcccaagtgaaataaatggaatgaaataattcaaacacaaaaccgta

SEQ ID NO: 414157 - DNA, 1039 bp, Homo sapiens
gcaggaaactcagcattatgtgacatactgatcctatcctgatatgttggaagatgaattacacagaaatattaagaaatattcttgtaaaaaaaattaaaagttgtacctgaatctaatcatgcctttagagctaattgatagtttacaagaaacataggtgatggtggagtaaattaaattaaaccatttactatggtttaattaaactatgtaaaaaaaccacatacctttaaaatgtagaacattatagaaacaatctgactcagtttcttaattaaggcaattatagccaaagaaggtggatgggaaaagagggttataattttaaaaacttgatacataacaaccaatggcaatgtgcagatatcgtttatgtcctgattcaaacaaagcagcagaaaaaaaatggcactttggagaaaatcagagaaattttaaaatagtctgattgttagattatatgaaggaattatccttactttctttaggtgtgcaaatggccaagtgattatgtaaataaaagcccacgtacttcaaaattacatactgaagtttataatacgatgtctgaaactcgttttaaaatacattatttcaaacgaagtaataaaatacatgatataacagtgcccaaattttaatatttatctaacatgggaagatggatgctatgggctgaattgtgtcccctccccaaattcagatatgttgaagctctaagcctcaaggtgtctgtattcagagacaggacttttagaaggcagttaagattgtatgaggtcgtaagagtagggtccttatctgaaactattgctggccttataagaagaggaagaaacagagagaaaactccttctctccatgtgcatgtaatgagcaaaggctatgtgaggacacaggaagaagatgcccgtctgcaagccaggaggagagccctcatcagatatggaatcagctttcgtcttgatcttggatttcccagcctccagaactgtgagaaataaatttctgttgtttaagctaaccaagcctatgg

SEQ ID NO: 414158 - DNA, 341 bp, Homo sapiens
cttttgtactatttcaataatctccttggatatactgattgagaaactgttataaggcttactgcgaaattgacgaagtccaaatttgatgactgtcccaaatagttttgtgcctttgatagattttacatgtgtttttttctataaatctgcctttaaaaatttattgttgtcttcagatgttttcatgatatgttcacttagtagtttatgccacatgtctttaatgcagttctagaaacccattgctgagaaagtgaagttctctttcaatatccataatgaaagtcagtttactggcgagcacacctgggtttggcttcctagttattcctccagta

SEQ ID NO: 414159 - DNA, 1142 bp, Homo sapiens
  misc_feature (205)..(205): n is a, c, g, or t
  misc_feature (1090)..(1090): n is a, c, g, or t
gagaacctggagcctaaaccttaggctcacccatttcaaccagtctagcagcatctgcaacatctacaatggccttgacctttgctttactggtggccctcctggtgctcagctgcaagtcaagctgctctgtgggctgtgatctgcctcaaacccacagcctgggtagcaggaggaccttgatgctcctggcacagatgagganaatctctcttttctcctgcttgaaggacagacatgactttggatttccccaggaggagtttggcaaccagttccaaaaggctgaaaccatccctgtcctccatgagatgatccagcagatcttcaatctcttcagcacaaaggactcatctgctgcttgggatgagaccctcctagacaaattctacactgaactctaccagcagctgaatgacctggaagcctgtgtgatacagggggtgggggtgacagagactcccctgatgaaggaggactccattctggctgtgaggaaatacttccaaagaatcactctctatctgaaagagaagaaatacagcccttgtgcctgggaggttgtcagagcagaaatcatgagatctttttctttgtcaacaaacttgcaagaaagtttaagaagtaaggaatgaaaactggttcaacatggaaatgattttcattgattcgtatgccagctcacctttttatgatctgccatttcaaagactcatgtttctgctatgaccatgacacgatttaaatcttttcaaatgtttttaggagtattaatcaacattgtattcagctcttaaggcactagtcccttacagaggaccatgctgactgatccattatctatttaaatatttttaaaatattatttatttaactatttataaaacaacttatttttgttcatattacgtcatgtgcacctttgcacagtggttaatgtaataaaatatgttctttgtatttggtaaatttattttgtgttgttcattgaacttttgctatggaacttttgtacttgtttattctttaaaatgaaattccaagcctaattgtgcaacctgattacagaataactggtacacttcatttntccatcaatattatattcaagatataagtaaaaataaactttctgtaaacca

SEQ ID NO: 414160 - DNA, 618 bp, Homo sapiens
tgcatcgttagcttctcctgataaactaattgcctcacattgtcactgcaaatcgacacctattaatgggtctcacctcccaactgcttccccctctgttcttcctgctagcatgtgccggcaactttgtccacggacacaagtgcgatatcaccttacaggagatcatcaaaactttgaacagcctcacagagcagaagactctgtgcaccgagttgaccgtaacagacatctttgctgcctccaagaacacaactgagaaggaaaccttctgcagggctgcgactgtgctccggcagttctacagccaccatgagaaggacactcgctgcctgggtgcgactgcacagcagttccacaggcacaagcagctgatccgattcctgaaacggctcgacaggaacctctggggcctggcgggcttgaattcctgtcctgtgaaggaagccaaccagagtacgttggaaaacttcttggaaaggctaaagacgatcatgagagagaaatattcaaagtgttcgagctgaatattttaatttatgagtttttgatagctttattttttaagtatttatatatttataactcatcataaaataaagtatatatagaatctaa

SEQ ID NO: 414161 - DNA, 570 bp, Homo sapiens
tgcatcgttagcttctcctgataaactaattgcctcacattgtcactgcaaatcgacacctattaatgggtctcacctcccaactgcttccccctctgttcttcctgctagcatgtgccggcaactttgtccacggacacaagtgcgatatcaccttacaggagatcatcaaaactttgaacagcctcacagagcagaagaacacaactgagaaggaaaccttctgcagggctgcgactgtgctccggcagttctacagccaccatgagaaggacactcgctgcctgggtgcgactgcacagcagttccacaggcacaagcagctgatccgattcctgaaacggctcgacaggaacctctggggcctggcgggcttgaattcctgtcctgtgaaggaagccaaccagagtacgttggaaaacttcttggaaaggctaaagacgatcatgagagagaaatattcaaagtgttcgagctgaatattttaatttatgagtttttgatagctttattttttaagtatttatatatttataactcatcataaaataaagtatatatagaatctaa

SEQ ID NO: 414162 - DNA, 354 bp, Homo sapiens
ggaggctgaggtgggaggatcacttgagcctgggaggttgaggctgcagtgagctgtgactgcaccactatactacagcctgggagacagagtgagaccctgtctcatatatatatatatatatatatatatatatatatatatatatatatatgtatatatatctctaatatattaatatatatctaataaatgtatcttatatataataaatatatctaatatataatatatatatttccaagagagggagaggctcttaggaaattatcttcttgcatattatgttatattatgctatatttggctatttcctaagagctctatcgtattattttcatttatttgtgagaa

SEQ ID NO: 414163 - DNA, 283 bp, Homo sapiens
tcttagttgattaaaacaaataattgaaataaaaaattatgtttattcttacatgtatgccatgtagcactttaaggagatgagtttatgaaattcatgaatgagaggatgatgtaagtttaaaaatcattattttagttgctttattcttctattttaaattcataaataacacaggtggcctgtattttgaaaagagccctttcctccatttgaactttataaacactgaggcagtaggtgtaaatattatctccattttatattgaaggaaatggggcca

SEQ ID NO: 414164 - DNA, 102 bp, Homo sapiens
ttaactactccctgcagtgccatatatgactggacccctacctccttctttgacttcgtctcctaccatttctcttccatccatgctcacttttagccttgc

SEQ ID NO: 414165 - DNA, 874 bp, Homo sapiens
tgatgcattggaaacaaagtaacttctttattatgtaaacaacttgcaaagctcaaaaggtaacagcacagagccataaatttgataaggcactttaaagatagcaatcaaacatataaaaatgtcaaccacaaaaaaactgtaaaaataataaccataaaaaataggggggaatacatgcattctttctagatagtctttcattttccaaaggaaagccttctataaaaatatagaagtacaaatatatatatatatatatatatttagaagccatcatcaaagttcaaatctctgtaaagagaatgtttttcctcaagttagtaaagtttggattcatacattttctagagaagcaattacaatcttcatgctatatataggaagaaaaatagcttttaattatgtttgtcgactcttttattcaataaacatttagtgactattgtgtgacactgttttaggtgctagggatatagaaataaatcagaaacaatcattagccctagagaactaaacctaatggaactggatctatcactggcaaccttaaaattacctccgtttgtacttaagctgaagctcaacttcaaactctgacatgcttggcatcttgttgaaaataaataacgatctacctagtttgccactggtagcactttggcactattaatattaactatatactgatgaaattaactttcataaagggttatacaaaagtttagaggggcagaaaatattaatgggataaacaagtactggtcagccaacaaaaataggcgtcagccttctgctttcacaaaggccaagaaaaccaagaaaaatttcattctgagtatatacagaactgctgggaagagatcattctata

SEQ ID NO: 414166 - DNA, 1435 bp, Homo sapiens
tattgtgggggaaaggggactggtaaggtatcagtcttcctggtagcattgattttcatttgtttgcccccacactatttttaaaaattcaaataaaagtgcagtttcagactttttaaaaaaatactgttgacctgtcttagttgtacattcagaaaatgtagcctcgggtgtttgtatgtaacactgcatattttttctaatcagattaatatgagttttaatgtttagcatgaactacagctaaggataaaaattttaaagtagctttcatagtctagattcctggtttcatcatgctttatgtagtacattttcgtttgttttgttttgtggagacttgtgtgtatttttgtttgtttgtttgtttattggtaggtagtaactatttggaatgtcacagaatacttaaagccagaaatatgggtcagttgatttggtttacaaaatgaaaaaaaattcccagagactgtattagataattattatatatgacacattagctttcttcaaaagaagatgataaatttatagtttcaaaaaattattctataaaaatttctcttattttaaaatattacctaaaattggctcttgtgttttttttcttctgtctaatgaagcttaaaaattcacatattaatttctttttaacccctttttagaagacacagattttaggtctgattataactagaaaacacatcttagaaaaaattgtcatatatatagtttcgtgggggtttttggttttgttttgtttttaattcagcaaactttgaaacattgtatgccaggcaactaattttggcacataattagagctcaactatgacttgctgaaattttgtagccccaaatctcataacaccaaaggaaatcagtaataaaataccactttatttcaaataagcattgaaaatgagattaagcatttaatttttggaagtgacagtattagaactttaatgtcatgattgtcttaagagtaacaggatagatttttagaatatcacattactattatatgtttatttatctcgtagatcatataaatattactttctggtggggaactgaatgttttttatttttttgcctcggttggttttttgtttttattttttgatctgtattagagatgctttaaaggatcttccttttagaaagacaagttttaaatattgaaattgatattaaatatatatttgaatattattaatatttcttatcaaattataagaagtttactatacctttggttaatcctgccttatttcagtaaagaaaatttgtactggaataacttgtagtggtttctaagaataaatagtaagctctattttgtaatagattttagatttgagttttactatttgaaggttttttaatattgccttttttatcatacacattggtttattattttatttat

SEQ ID NO: 414167 - DNA, 1381 bp, Homo sapiens
tattgtgggggaaaggggactggtaaggtatcagtcttcctggtagcattgattttcatttgtttgcccccacactatttttaaaaattcaaataaaagtgcagtttcagactttttaaaaaaatactgttgacctgtcttagttgtacattcagaaaatgtagcctcgggtgtttgtatgtaacactgcatattttttctaatcagattaatatgagttttaatgtttagcatgaactacagctaaggataaaaattttaaagtagctttcatagtctagattcctggtttcatcatgctttatgtagtacattttcgtttgttttgttttgtggagacttgtgtgtatttttgtttgtttgtttgtttattggtaggtagtaactatttggaatgtcacagaatacttaaagccagaaatatgggtcagttgatttggtttacaaaatgaaaaaaaattcccagagactgtattagataattattatatatgacacattagctttcttcaaaagaagatgataaatttatagtttcaaaaaattattctataaaaatttctcttattttaaaatattacctaaaattggctcttgtgttttttttcttctgtctaatgaagcttaaaaattcacatattaatttctttttaacccctttttagaagacacagattttaggtctgattataactagaaaacacatcttagaattcagcaaactttgaaacattgtatgccaggcaactaattttggcacataattagagctcaactatgacttgctgaaattttgtagccccaaatctcataacaccaaaggaaatcagtaataaaataccactttatttcaaataagcattgaaaatgagattaagcatttaatttttggaagtgacagtattagaactttaatgtcatgattgtcttaagagtaacaggatagatttttagaatatcacattactattatatgtttatttatctcgtagatcatataaatattactttctggtggggaactgaatgttttttatttttttgcctcggttggttttttgtttttattttttgatctgtattagagatgctttaaaggatcttccttttagaaagacaagttttaaatattgaaattgatattaaatatatatttgaatattattaatatttcttatcaaattataagaagtttactatacctttggttaatcctgccttatttcagtaaagaaaatttgtactggaataacttgtagtggtttctaagaataaatagtaagctctattttgtaatagattttagatttgagttttactatttgaaggttttttaatattgccttttttatcatacacattggtttattattttatttat

SEQ ID NO: 414168 - DNA, 549 bp, Homo sapiens
aaataacaaaaaaattagctgggcgtgctggtgggcgctggtagtcccagtgacttgggaggctgaggcaggagaattgaacctgggaggtggaggttgcggtgagctgaaaagtgcgccactgcactccagcctgggcgacagagcgagactccatctcaaaaaataaatgaattaattaaaagtatggctgttgagctaacagatgattttataacatgacccaatgctatcttgatccaacttaagcctaagaatcgttgctccccaccccgttcatcaaaaacatcagcagagactttttgggcatgcaaggaaatgttttttatttcataattattttgagatttattttggtgatgtgtttctgactgactgccatattctttgttctcataatttctctactagtattttcactcccaacccccgtgccattcccacttgatttttatgtctgctggcagtgagaggctaaaatggccaacttaagccaaagctgtaaacaacagttgaagtaagtctttcaataaagactagactatatga

SEQ ID NO: 414169 - DNA, 1746 bp, Homo sapiens
tttttttgctttacattacttggtatgtaaataccttgattaaaaccttgtaaaccaatttcaaggttactataagttgtatagtacaagtgttttttaaaaatcttggggtgtttttaaaaattaagatatattttgcccaagaatttttttaacaagattgctaaaaacatcttatttagacacttcaatgtaccaatttataattggatattcagtttaaatagtacacagagttgtggcttttattttcaattaatttttttccttgtgggcagtgtgcatggtataataagcctgagcagaggcttaagttgtatgtgtgcagagtttgtaaaggaatcaattggaagatgcagaagaccgaggtttgctttcaaggtatttttcaggctgtgtgggtaaaatttgcctcaaatttctatcaaacaggaatgtaaaatagataaaatcctatgtatttgaattgtcagagctagggagtgcaaatgttttggcaatgtattcaaaatgctggcctgggcaccaaagagaaaatagccttttacagttacatagtaagatgcgattagtacccacaaattactgttttctaaacatttgaagttttacgattagctttaaaataatgattttataaattggtggtcacaataattttggtattactttcctccttttcccacttagcaatatagccaaatgtattcaacataaaaattcatagggtctgaaattcatagctgggccaaattttttatggcaccttagttttaccataatggtcatctattacactcttctgttataaaatatacccttatttcttttgtttatagtatctttgaggaatgtttttggaaaagttaatttatattttatagggagaacactcaataaattatgttaactgtgcccccgagttaaaaattttatgagtatatgtgaaacttgaacaactgaagactttttttaattgataaaaatgcttagtatgcctgttttggtctgccagtaaattaagtagcttattgagataactaacagctaaatatagctgtagtgtttcctgactgtatattctatgatttaataaaattatccagactagttatattgccacagtaaacatgtgactgaagtgtccttcatcttaatctgaaagagggcaaaatttcatgatcagttaatggaagttatttcatattaagtggtttgtttttttttttttttagatggagtcttgctctgtcgccaggctgaggcaggagaattgaacctgggaggtggaggttgcggtgagctgaaaagtgcgccactgcactccagcctgggcgacagagcgagactccatctcaaaaaataaatgaattaattaaaagtatggctgttgagctaacagatgattttataacatgacccaatgctatcttgatccaacttaagcctaagaatcgttgctccccaccccgttcatcaaaaacatcagcagagactttttgggcatgcaaggaaatgttttttatttcataattattttgagatttattttggtgatgtgtttctgactgactgccatattctttgttctcataatttctctactagtattttcactcccaacccccgtgccattcccacttgatttttatgtctgctggcagtgagaggctaaaatggccaacttaagccaaagctgtaaacaacagttgaagtaagtctttcaataaagactagactatatga

SEQ ID NO: 414170 - DNA, 1506 bp, Homo sapiens
tttttttgctttacattacttggtatgtaaataccttgattaaaaccttgtaaaccaatttcaaggttactataagttgtatagtacaagtgttttttaaaaatcttggggtgtttttaaaaattaagatatattttgcccaagaatttttttaacaagattgctaaaaacatcttatttagacacttcaatgtaccaatttataattggatattcagtttaaatagtacacagagttgtggcttttattttcaattaatttttttccttgtgggcagtgtgcatggtataataagcctgagcagaggcttaagttgtatgtgtgcagagtttgtaaaggaatcaattggaagatgcagaagaccgaggtttgctttcaaggtatttttcaggctgtgtgggtaaaatttgcctcaaatttctatcaaacaggaatgtaaaatagataaaatcctatgtatttgaattgtcagagctagggagtgcaaatgttttggcaatgtattcaaaatgctggcctgggcaccaaagagaaaatagccttttacagttacatagtaagatgcgattagtacccacaaattactgttttctaaacatttgaagttttacgattagctttaaaataatgattttataaattggtggtcacaataattttggtattactttcctccttttcccacttagcaatatagccaaatgtattcaacataaaaattcatagggtctgaaattcatagctgggccaaattttttatggcaccttagttttaccataatggtcatctattacactcttctgttataaaatatacccttatttcttttgtttatagtatctttgaggaatgtttttggaaaagttaatttatattttatagggagaacactcaataaattatgttaactgtgcccccgagttaaaaattttatgagtatatgtgaaacttgaacaactgaagactttttttaattgataaaaatgcttagtatgcctgttttggtctgccagtaaattaagtagcttattgagataactaacagctaaatatagctgtagtgtttcctgactgtatattctatgatttaataaaattatccagaactccatctcaaaaaataaatgaattaattaaaagtatggctgttgagctaacagatgattttataacatgacccaatgctatcttgatccaacttaagcctaagaatcgttgctccccaccccgttcatcaaaaacatcagcagagactttttgggcatgcaaggaaatgttttttatttcataattattttgagatttattttggtgatgtgtttctgactgactgccatattctttgttctcataatttctctactagtattttcactcccaacccccgtgccattcccacttgatttttatgtctgctggcagtgagaggctaaaatggccaacttaagccaaagctgtaaacaacagttgaagtaagtctttcaataaagactagactatatga

SEQ ID NO: 414171 - DNA, 1692 bp, Homo sapiens
tttttttgctttacattacttggtatgtaaataccttgattaaaaccttgtaaaccaatttcaaggttactataagttgtatagtacaagtgttttttaaaaatcttggggtgtttttaaaaattaagatatattttgcccaagaatttttttaacaagattggtttaaatagtacacagagttgtggcttttattttcaattaatttttttccttgtgggcagtgtgcatggtataataagcctgagcagaggcttaagttgtatgtgtgcagagtttgtaaaggaatcaattggaagatgcagaagaccgaggtttgctttcaaggtatttttcaggctgtgtgggtaaaatttgcctcaaatttctatcaaacaggaatgtaaaatagataaaatcctatgtatttgaattgtcagagctagggagtgcaaatgttttggcaatgtattcaaaatgctggcctgggcaccaaagagaaaatagccttttacagttacatagtaagatgcgattagtacccacaaattactgttttctaaacatttgaagttttacgattagctttaaaataatgattttataaattggtggtcacaataattttggtattactttcctccttttcccacttagcaatatagccaaatgtattcaacataaaaattcatagggtctgaaattcatagctgggccaaattttttatggcaccttagttttaccataatggtcatctattacactcttctgttataaaatatacccttatttcttttgtttatagtatctttgaggaatgtttttggaaaagttaatttatattttatagggagaacactcaataaattatgttaactgtgcccccgagttaaaaattttatgagtatatgtgaaacttgaacaactgaagactttttttaattgataaaaatgcttagtatgcctgttttggtctgccagtaaattaagtagcttattgagataactaacagctaaatatagctgtagtgtttcctgactgtatattctatgatttaataaaattatccagactagttatattgccacagtaaacatgtgactgaagtgtccttcatcttaatctgaaagagggcaaaatttcatgatcagttaatggaagttatttcatattaagtggtttgtttttttttttttttagatggagtcttgctctgtcgccaggctgaggcaggagaattgaacctgggaggtggaggttgcggtgagctgaaaagtgcgccactgcactccagcctgggcgacagagcgagactccatctcaaaaaataaatgaattaattaaaagtatggctgttgagctaacagatgattttataacatgacccaatgctatcttgatccaacttaagcctaagaatcgttgctccccaccccgttcatcaaaaacatcagcagagactttttgggcatgcaaggaaatgttttttatttcataattattttgagatttattttggtgatgtgtttctgactgactgccatattctttgttctcataatttctctactagtattttcactcccaacccccgtgccattcccacttgatttttatgtctgctggcagtgagaggctaaaatggccaacttaagccaaagctgtaaacaacagttgaagtaagtctttcaataaagactagactatatga

SEQ ID NO: 414172 - DNA, 1677 bp, Homo sapiens
acccggcatactggatcttctcatagatttaatacatagtgtttttgatttgcatttctataatgaccagtgatgataagcttttttttcatatgtttgttgaccacataaatgtcttctttatgagaagtgtctgttcatatcctttgcccacttatttgttgaggttgtttttttcttgtacatttgtttaagttccttgtgggcagtgtgcatggtataataagcctgagcagaggcttaagttgtatgtgtgcagagtttgtaaaggaatcaattggaagatgcagaagaccgaggtttgctttcaaggtatttttcaggctgtgtgggtaaaatttgcctcaaatttctatcaaacaggaatgtaaaatagataaaatcctatgtatttgaattgtcagagctagggagtgcaaatgttttggcaatgtattcaaaatgctggcctgggcaccaaagagaaaatagccttttacagttacatagtaagatgcgattagtacccacaaattactgttttctaaacatttgaagttttacgattagctttaaaataatgattttataaattggtggtcacaataattttggtattactttcctccttttcccacttagcaatatagccaaatgtattcaacataaaaattcatagggtctgaaattcatagctgggccaaattttttatggcaccttagttttaccataatggtcatctattacactcttctgttataaaatatacccttatttcttttgtttatagtatctttgaggaatgtttttggaaaagttaatttatattttatagggagaacactcaataaattatgttaactgtgcccccgagttaaaaattttatgagtatatgtgaaacttgaacaactgaagactttttttaattgataaaaatgcttagtatgcctgttttggtctgccagtaaattaagtagcttattgagataactaacagctaaatatagctgtagtgtttcctgactgtatattctatgatttaataaaattatccagactagttatattgccacagtaaacatgtgactgaagtgtccttcatcttaatctgaaagagggcaaaatttcatgatcagttaatggaagttatttcatattaagtggtttgtttttttttttttttagatggagtcttgctctgtcgccaggctgaggcaggagaattgaacctgggaggtggaggttgcggtgagctgaaaagtgcgccactgcactccagcctgggcgacagagcgagactccatctcaaaaaataaatgaattaattaaaagtatggctgttgagctaacagatgattttataacatgacccaatgctatcttgatccaacttaagcctaagaatcgttgctccccaccccgttcatcaaaaacatcagcagagactttttgggcatgcaaggaaatgttttttatttcataattattttgagatttattttggtgatgtgtttctgactgactgccatattctttgttctcataatttctctactagtattttcactcccaacccccgtgccattcccacttgatttttatgtctgctggcagtgagaggctaaaatggccaacttaagccaaagctgtaaacaacagttgaagtaagtctttcaataaagactagactatatga

SEQ ID NO: 414173 - DNA, 1328 bp, Homo sapiens
tttttttgctttacattacttggtatgtaaataccttgattaaaaccttgtaaaccaatttcaaggttactataagttgtatagtacaagtgttttttaaaaatcttggggtgtttttaaaaattaagatatattttgcccaagaatttttttaacaagattgctaaaaacatcttatttagacacttcaatgtaccaatttataattggatattcagtttaaatagtacacagagttgtggcttttattttcaattaatttttttccttgtgggcagtgtgcatggtataataagcctgagcagaggcttaagttgtatgtgtgcagagtttgtaaaggaatcaattggaagatgcagaagaccgaggtttgctttcaaggtatttttcaggctgtgtgggtaaaatttgcctcaaatttctatcaaacaggaatgtaaaatagataaaatcctatgtatttgaattgtcagagctagggagtgcaaatgttttggcaatgtattcaaaatgctggcctgggcaccaaagagaaaatagccttttacagttacatagtaagatgcgattagtacccacaaattactgttttctaaacatttgaagttttacgattagctttaaaataatgattttataaattggtggtcacaataattttggtattactttcctccttttcccacttagcaatatagccaaatgtattcaacataaaaattcatagggtctgaaattcatagctgggccaaattttttatggcaccttagttttaccataatggtcatctattacactcttctgttataaaatatacccttatttcttttgtttatagtatctttgaggaatgtttttggaaaagttaatttatattttatagggagaacactcaataaattatgttaactgtgcccccgagttaaaaattttatgagtatatgtgaaacttgaacaactgaagactttttttaattgataaaaatgcttagtatgcctgttttggtctgccagtaaattaagtagcttattgagataactaacagctaaatatagctgtagtgtttcctgactgtatattctatgatttaataaaattatccagactagttatattgccacagtaaacatgtgactgaagtgtccttcatcttaatctgaaagagggcaaaatttcatgatcagttaatggaagttatttcatattaagtggtttgtttttttttttttttagatggagtcttgctctgtcgccaggcggaggttgccctgagccaagattgtgctattgcactccaccctgggaaatagagcaagactccgtctc

SEQ ID NO: 414174 - DNA, 1238 bp, Homo sapiens
cagtcatcttccccaggctcccagcattcctcctctctgcagcctgccacctgtcctgcatgtggttctctgccaagtagggcaaacagtccttgggcaggtgcactctgcaggtctccactggtgtgggactcaggaatacaggcggggtcaaagctccccacagccagggcccatctgaatataccagcaagacacagactccatgatcagggccttaaacacagaggaagagtcacattatcactgccccgctagcctggttgtggtgctgccagagaaacaaagcaggacatgagttctgtttgtagagcaaggacttaagatcaaggaggattttgcaaagcaaaaagagtgggatagaactttctgggtaaaatgaacagccttagcatggaaattatttcccagtactcattttcagtttgtggacaatcattcaatcctagacagttctactgtccttccttcctgaggtttaaagtaactaaaccctacacttttctgacaagattttagaatatctttcaattcataattactctttggtgcagagaagtaatgttttcctaaactctcttcagtttactcaaaaacataataaattaattgaggacttaatgtgccacgttggtgcttatcttgaaaatattgctgaaaatcagaaattcacattgccagtagggtctgggattttttctttttgtttttgtttaagtgatttaagaagtttatttcctcatagtaactttcttcccaagtgtgccagtgtttcattaattgttccttcctaggaggaagaaatagaatttctctacaatgagaacacggttagagaaagccccaacattacagaccggtggatcctgtccttcatgcagtctctcattggcttctttgagactgaaatggcaggtgagtctctcttggtctgtcctcccaggaataaggactattctctttgtaactgcccttttgatatttaatagtggaaatattgagagatacagaaaattaaataattgtttccttttacctctcatatagttttgttaaggcttgttaattgtcgtgatatctttgtttcaagaccctggggacttctggcctggtgtggtggctcacgcctgtaatccccagcattttgggagaccaaggcaggcaggtcaccttaggtcaggagttcgagaccagcctggccaacatggcgaaaccctgtctctactaaaaatatattt

SEQ ID NO: 414175 - DNA, 589 bp, Homo sapiens
  misc_feature (30)..(30): n is a, c, g, or t
gattgggccccccccagaggggaggggggnggcttagggaaaccaaattacagaagacatccccgtgaagactttgaatatgaagactgtgtatgtttctgtgttaccaacaacagcagacttctagcatgtacttatcaatgttgttcggtcagcccttccctaattacacctatcccctacacatacatgcacatagacacacacatgaacacactgaagatatttccttcaggtgtgtgtaaaatatgctgcttggattgaaattcaaatgggattgattagtcaagtaacttgagacctcacagtaatcttcacacttaaccttagacacctatgcagtcatgttgggagcaggttacaatgttacttcagcccacagtttatttctatacttgagttcttaagtacagaagatagaagtgatttaaatggcatagtatatatatcattttctggccttttaaaatttatttgagacctcttgatgaaatggacatattatatatttctgccacctggattttcctggataatttgatggaatattttaagtttcagtaaatcagaacaataaacaaactcagat

SEQ ID NO: 414176 - DNA, 822 bp, Homo sapiens
  misc_feature (770)..(770): n is a, c, g, or t
  misc_feature (772)..(772): n is a, c, g, or t
  misc_feature (811)..(811): n is a, c, g, or t
agcgcgttgcatcacctccgtgcgcccggttgcagcgtggacgccggatgagttgcttttaggcttgctggcccgcggggctgtccaggcacgcgaggcccctcagcaacaaaatgcttcaacaagttccagaaaacataaattttcctgctgaagaagagaaaatcttggagttttggactgaatttaattgttttcaggaatgcttaaagcaatcaaaacataaaccaaaatttaccttctatgatggtcctccttttgcaactggactgcctcactatggacatatacttgcgggtacaattaaagatatattacactgtctacagataaaaacaagtatggcattcggctaagggcagaaccagatcacatggtcctggggaagcgtctgaagggagcctttaaggcagtgatgacgtccatcaagcagttgagcagtgaggagctggagcagttccagaagactgggaccattgttgtggaaggccatgaattgcacgatgaagacatccgcctcatgtacacctttgatcaggccacaggtgggactgcgcaatttgaagcacactcagatgctcaggctttggtcctcttagatgtcactcctgaccagtcaatggtagatgaaggaatggctcgggaagtcatcaatcgcatacagaaacttcgcaaaaagtgcaatctggttccaactgatgaaatcacagtgtactataaagcaaagtctgaaggaggaagaaatagaatttctctacaatgagaacacngntagagaaagccccaacattacagacccggtggatcctgncctttatgcag

SEQ ID NO: 414177 - DNA, 983 bp, Homo sapiens
acagtgtaatacaatggaaagaagttgggcattgttgatgctgtcaaattgcacagctccgtgtaaatggcacttcctacagttgtgtagtgggcagtcttggactttgatccacacatactggagtttttggcttttctcactgaccaatgggaattcgcatgtggctcacatggtgatttttttgtgtgcacccctaaacactctgactgccatgtagcacatcctcaacaaacagtcattatgtgattgattcattttggttcttttctccttagtaagtggaggcacttggatggaaggagctgccccttctttgttgtatccaaccctctccccaccccagatgcctggtaacccacttgctgcctgattgacttgtcttacttttagcttataggctttatactgtggtgcctcgcctggtcaagtttgtagatattctgaccaattggtatgttagaatgaaccgcagaagattaaagggtgaaaatgggatggaggattgtgtcatggccctagaaaccttgtttagtgttctgctttctctttgcagacttatggctccctacacaccttttctcactgaattgatgtaccagaatctaaaggtgctgattgaccctgtttctgttcaggacaaggacacactcagcattcactacctcatgctgccccgtgttcgagaagaatgatgacagaaacagagaggtgcgtatctccaaagcagcggatgacgtggagcaggtccgagacggaaaattatcccataaggtatcctggaaagaaactgggtatcatcagaatcaaagcctaggaaattaggcggcaagtcaccgggggaccacgcaaaggccgcccggaaactcagtggtgaggagggcaacgatcaggccggggagtgagggacagggggagccaaaagagggagaggcccaaggcagtggggagaagaaccccagcgcggggaacaagcccacgag

SEQ ID NO: 414178 - DNA, 856 bp, Homo sapiens
acagtgtaatacaatggaaagaagttgggcattgttgatgctgtcaaattgcacagctccgtgtaaatggcacttcctacagttgtgtagtgggcagtcttggactttgatccacacatactggagtttttggcttttctcactgaccaatgggaattcgcatgtggctcacatggtgatttttttgtgtgcacccctaaacactctgactgccatgtagcacatcctcaacaaacagtcattatgtgattgattcattttggttcttttctccttagtaagtggaggcacttggatggaaggagctgccccttctttgttgtatccaaccctctccccaccccagatgcctggtaacccacttgctgcctgattgacttgtcttacttttagcttataggctttatactgtggtgcctcgcctggtcaagtttgtagatattctgaccaattggtatgttagaatgaaccgcagaagattaaaggtaagtgcagactgctgttgggaaaagcaaaaagtgtatgaagtttgaaagtagaagaaatatgagaatagccagaagggagaggaacattttcagttgctctccgtttttgaagctttgtttttcttttccttttacattgcattttaactatatttgtcatttgagggatagggatctataagttctaaaagtcattttgcattattttcacaacacaattatgtacatgtcatattggagggagaatgtcaaggcacaaacaggactacactgagcagacctcttaaaattcaaaataaaatcatgcaaatattttataaaaatactggtagatatggcattaatattgagaggggtacttccttcta

SEQ ID NO: 414179 - DNA, 4878 bp, Homo sapiens
agcgcgttgcatcacctccgtgcgcccggttgcagcgtggacgccggatgagttgcttttaggcttgctggcccgcggggctgtccaggcacgcgaggcccctcaggtacgccctctcttccctgcaggatccggccctcaaagacgagggtcacgcacgcgttacaaccccgaaacagtagcacaagatttaatttttaaaagagcgtgtttcttcggggcttgccgttcgttcgtttccagcctcaggaatttatggtcgcctttttgaatgagcaacaaaatgcttcaacaagttccagaaaacataaattttcctgctgaagaagagaaaatcttggagttttggactgaatttaattgttttcaggaatgcttaaagcaatcaaaacataaaccaaaatttaccttctatgatggtcctccttttgcaactggactgcctcactatggacatatacttgcgggtacaattaaagatatagttacaagatatgctcaccagagtgggtttcatgttgacagaagatttggatgggattgccatggcttacctgtggaatatgaaattgataagacactgggaatcagaggaccagaggatgtggccaaaatggggattacagagtataacaatcagtgccgagcaattgtgatgagatattctgctgagtggaagtctactgttagcagacttggccgatggattgactttgacaatgactataaaactctgtatccacaattcatggaatcagtctggtgggtcttcaaacaactctatgataaaggccttgtttatagaggtgtgaaagtcatgcccttctctacggcatgtaacactccactttccaacttcgagtcacaccagaattataaggatgttcaagatccttcagtatttgtaactttccctttggaagaagatgaaactgtatctttagttgcttggacaaccactccctggactctacctagtaaccttgctgtgtgtgttaatccagaaatgcaatatgtgaaaattaaagatgttgccagaggacgattactcattttaatggaagccagattgtcagccctctataaattggagagtgactatgagatccttgaaagatttcctggtgcctatcttaaaggcaagaagtacaggcccctgtttgactatttcctgaagtgtaaagagaatggcgctttcactgtgcttgttgacaactatgtgaaggaagaagaaggcacaggggttgtccaccaagctccttacttcggtgctgaggactatcgggtctgtatggactttaacattattcggaaagactcactccctgtttgccctgtggatgcttcaggctgcttcacaacggaggtgacagatttcgcaggacagtatgtgaaggatgctgacaaaagtatcatcaggactttgaaggaacaaggccgacttctggttgccaccaccttcactcacagctaccctttttgctggagatcagacactcctctaatttacaaagcagtgcccagctggtttgtgcgagtggagaacatggtggaccagctcctaaggaacaatgacctgtgctactgggtcccagagttggtacgagaaaaacgatttggaaattggctgaaagatgcacgtgactggacaatttccagaaacagatactggggcacccccatcccactgtgggtcagcgatgactttgaggaggtggtatgcattgggtcagtggcggaacttgaagaactgtcaggagcaaagatctcagatctccacagagagagtgttgaccacctgaccattccttcacgctgtgggaagggatccttgcaccgcatctctgaagtgtttgactgttggtttgagagtggcagcatgccctatgctcaggttcattacccgtttgaaaacaagagggagtttgaggatgcttttcctgcagatttcattgccgagggcatcgaccaaaccagaggatggttttataccctgctggtgctggccacggccctctttggacaaccgcctttcaagaacgtaattgtgaatgggcttgtcctggcaagtgatggccaaaaaatgagcaaacggaaaaagaattatccagatccagtttccatcatccagaagtatggtgctgatgccctcagattatatctgattaactcccctgtggtgagagcagaaaacctccgctttaaagaagagggtgtgcgggacgtccttaaggatgtactgctcccatggtacaatgcctatcgcttcttaatccagaacgttctgaggctccagaaggaggaagaaatagaatttctctacaatgagaacacggttagagaaagccccaacattacagaccggtggatcctgtccttcatgcagtctctcattggcttctttgagactgaaatggcagcttataggctttatactgtggtgcctcgcctggtcaagtttgtagatattctgaccaattggtatgttagaatgaaccgcagaagattaaagggtgaaaatgggatggaggattgtgtcatggccctagaaaccttgtttagtgttctgctttctctttgcagacttatggctccctacacaccttttctcactgaattgatgtaccagaatctaaaggtgctgattgaccctgtttctgttcaggacaaggacacactcagcattcactacctcatgctgccccgtgttcgagaagaattgattgacaagaaaacagagagtgcagtatctcagatgcagtctgtgattgaacttggaagagtgatcagagaccgaaaaactattcccataaagtatcctttgaaagaaattgtggttatccatcaagatccagaagctcttaaagatatcaagtctttggagaagtatatcattgaggaactcaatgttcgaaaagttacactgtctacagataaaaacaagtatggcattcggctaagggcagaaccagatcacatggtcctggggaagcgtctgaagggagcctttaaggcagtgatgacgtccatcaagcagttgagcagtgaggagctggagcagttccagaagactgggaccattgttgtggaaggccatgaattgcacgatgaagacatccgcctcatgtacacctttgatcaggccacaggtgggactgcgcaatttgaagcacactcagatgctcaggctttggtcctcttagatgtcactcctgaccagtcaatggtagatgaaggaatggctcgggaagtcatcaatcgcatacagaaacttcgcaaaaagtgcaatctggttccaactgatgaaatcacagtgtactataaagcaaagtctgaaggaacatatctgaatagtgttattgaaagccacacagagttcatatttaccaccataaaggctcccttgaaaccatatccagtttctccatcggataaagtccttattcaagaaaaaacacagttgaagggatctgaactggaaattacactcaccagaggatcttcccttcctggtcctgcttgtgcatatgtcaatcttaacatttgtgcaaatggcagtgaacaaggtggagtattgctcctggaaaatccaaaaggtgacaataggttggaccttttaaagctgaagagtgttgtcactagcatttttggtgtgaaaaatacagagctggctgtcttccatgatgaaacagaaatacaaaaccaaactgacttactgagtcttagtggaaaaacactttgtgtgactgcaggatcggctccctctctgatcaacagttctagtactcttctttgtcagtatatcaacctacagctcctgaatgcaaagccacaagagtgtttaatggggacagtgggcactctcctgcttgaaaacccacttgggcagaatggactcacccaccaaggtcttctgtatgaagcagccaaggtgtttggccttcggagcaggaagctaaagctgtttctgaatgagacccaaacgcaggaaattacagaagacatccccgtgaagactttgaatatgaagactgtgtatgtttctgtgttaccaacaacagcagacttctagcatgtacttatcaatgttgttcggtcagcccttccctaattacacctatcccctacacatacatgcacatagacacacacatgaacacactgaagatatttccttcaggtgtgtgtaaaatatgctgcttggattgaaattcaaatgggattgattagtcaagtaacttgagacctcacagtaatcttcacacttaaccttagacacctatgcagtcatgttgggagcaggttacaatgttacttcagcccacagtttatttctatacttgagttcttaagtacagaagatagaagtgatttaaatggcatagtatatatatcattttctggccttttaaaatttatttgagacctcttgatgaaatggacatattatatatttctgccacctggattttcctggataatttgatggaatattttaagtttcagtaaatcagaacaataaacaaactcagatataaatgtgttgaaagtaattcattctcccatagataaatgaaacttgaaatgtgtaaactttgaagaacataaaaacttcatggtggtttcttattaagacagtggactagacatctaataaaacttctttccaaaaaaagaaaaaaaatgggcctcgtggcctaagggtggagctctggggccgttcccttagggagggtaattatggagcctgctactagactcctgcgctgggcgttcgcgtggggaagcggatcaatttcctaaagggggatacggtatcccgaatcgggggaatcccggaaaacatggaggcaagggcccaaagggcgaacggtaagg

SEQ ID NO: 414180 - DNA, 4721 bp, Homo sapiens
agcgcgttgcatcacctccgtgcgcccggttgcagcgtggacgccggatgagttgcttttaggcttgctggcccgcggggctgtccaggcacgcgaggcccctcaggtacgccctctcttccctgcaggatccggccctcaaagacgagggtcacgcacgcgttacaaccccgaaacagtagcacaagatttaatttttaaaagagcgtgtttcttcggggcttgccgttcgttcgtttccagcctcaggaatttatggtcgcctttttgaatgagcaacaaaatgcttcaacaagttccagaaaacataaattttcctgctgaagaagagaaaatcttggagttttggactgaatttaattgttttcaggaatgcttaaagcaatcaaaacataaaccaaagaatatgaaattgataagacactgggaatcagaggaccagaggatgtggccaaaatggggattacagagtataacaatcagtgccgagcaattgtgatgagatattctgctgagtggaagtctactgttagcagacttggccgatggattgactttgacaatgactataaaactctgtatccacaattcatggaatcagtctggtgggtcttcaaacaactctatgataaaggccttgtttatagaggtgtgaaagtcatgcccttctctacggcatgtaacactccactttccaacttcgagtcacaccagaattataaggatgttcaagatccttcagtatttgtaactttccctttggaagaagatgaaactgtatctttagttgcttggacaaccactccctggactctacctagtaaccttgctgtgtgtgttaatccagaaatgcaatatgtgaaaattaaagatgttgccagaggacgattactcattttaatggaagccagattgtcagccctctataaattggagagtgactatgagatccttgaaagatttcctggtgcctatcttaaaggcaagaagtacaggcccctgtttgactatttcctgaagtgtaaagagaatggcgctttcactgtgcttgttgacaactatgtgaaggaagaagaaggcacaggggttgtccaccaagctccttacttcggtgctgaggactatcgggtctgtatggactttaacattattcggaaagactcactccctgtttgccctgtggatgcttcaggctgcttcacaacggaggtgacagatttcgcaggacagtatgtgaaggatgctgacaaaagtatcatcaggactttgaaggaacaaggccgacttctggttgccaccaccttcactcacagctaccctttttgctggagatcagacactcctctaatttacaaagcagtgcccagctggtttgtgcgagtggagaacatggtggaccagctcctaaggaacaatgacctgtgctactgggtcccagagttggtacgagaaaaacgatttggaaattggctgaaagatgcacgtgactggacaatttccagaaacagatactggggcacccccatcccactgtgggtcagcgatgactttgaggaggtggtatgcattgggtcagtggcggaacttgaagaactgtcaggagcaaagatctcagatctccacagagagagtgttgaccacctgaccattccttcacgctgtgggaagggatccttgcaccgcatctctgaagtgtttgactgttggtttgagagtggcagcatgccctatgctcaggttcattacccgtttgaaaacaagagggagtttgaggatgcttttcctgcagatttcattgccgagggcatcgaccaaaccagaggatggttttataccctgctggtgctggccacggccctctttggacaaccgcctttcaagaacgtaattgtgaatgggcttgtcctggcaagtgatggccaaaaaatgagcaaacggaaaaagaattatccagatccagtttccatcatccagaagtatggtgctgatgccctcagattatatctgattaactcccctgtggtgagagcagaaaacctccgctttaaagaagagggtgtgcgggacgtccttaaggatgtactgctcccatggtacaatgcctatcgcttcttaatccagaacgttctgaggctccagaaggaggaagaaatagaatttctctacaatgagaacacggttagagaaagccccaacattacagaccggtggatcctgtccttcatgcagtctctcattggcttctttgagactgaaatggcagcttataggctttatactgtggtgcctcgcctggtcaagtttgtagatattctgaccaattggtatgttagaatgaaccgcagaagattaaagggtgaaaatgggatggaggattgtgtcatggccctagaaaccttgtttagtgttctgctttctctttgcagacttatggctccctacacaccttttctcactgaattgatgtaccagaatctaaaggtgctgattgaccctgtttctgttcaggacaaggacacactcagcattcactacctcatgctgccccgtgttcgagaagaattgattgacaagaaaacagagagtgcagtatctcagatgcagtctgtgattgaacttggaagagtgatcagagaccgaaaaactattcccataaagtatcctttgaaagaaattgtggttatccatcaagatccagaagctcttaaagatatcaagtctttggagaagtatatcattgaggaactcaatgttcgaaaagttacactgtctacagataaaaacaagtatggcattcggctaagggcagaaccagatcacatggtcctggggaagcgtctgaagggagcctttaaggcagtgatgacgtccatcaagcagttgagcagtgaggagctggagcagttccagaagactgggaccattgttgtggaaggccatgaattgcacgatgaagacatccgcctcatgtacacctttgatcaggccacaggtgggactgcgcaatttgaagcacactcagatgctcaggctttggtcctcttagatgtcactcctgaccagtcaatggtagatgaaggaatggctcgggaagtcatcaatcgcatacagaaacttcgcaaaaagtgcaatctggttccaactgatgaaatcacagtgtactataaagcaaagtctgaaggaacatatctgaatagtgttattgaaagccacacagagttcatatttaccaccataaaggctcccttgaaaccatatccagtttctccatcggataaagtccttattcaagaaaaaacacagttgaagggatctgaactggaaattacactcaccagaggatcttcccttcctggtcctgcttgtgcatatgtcaatcttaacatttgtgcaaatggcagtgaacaaggtggagtattgctcctggaaaatccaaaaggtgacaataggttggaccttttaaagctgaagagtgttgtcactagcatttttggtgtgaaaaatacagagctggctgtcttccatgatgaaacagaaatacaaaaccaaactgacttactgagtcttagtggaaaaacactttgtgtgactgcaggatcggctccctctctgatcaacagttctagtactcttctttgtcagtatatcaacctacagctcctgaatgcaaagccacaagagtgtttaatggggacagtgggcactctcctgcttgaaaacccacttgggcagaatggactcacccaccaaggtcttctgtatgaagcagccaaggtgtttggccttcggagcaggaagctaaagctgtttctgaatgagacccaaacgcaggaaattacagaagacatccccgtgaagactttgaatatgaagactgtgtatgtttctgtgttaccaacaacagcagacttctagcatgtacttatcaatgttgttcggtcagcccttccctaattacacctatcccctacacatacatgcacatagacacacacatgaacacactgaagatatttccttcaggtgtgtgtaaaatatgctgcttggattgaaattcaaatgggattgattagtcaagtaacttgagacctcacagtaatcttcacacttaaccttagacacctatgcagtcatgttgggagcaggttacaatgttacttcagcccacagtttatttctatacttgagttcttaagtacagaagatagaagtgatttaaatggcatagtatatatatcattttctggccttttaaaatttatttgagacctcttgatgaaatggacatattatatatttctgccacctggattttcctggataatttgatggaatattttaagtttcagtaaatcagaacaataaacaaactcagatataaatgtgttgaaagtaattcattctcccatagataaatgaaacttgaaatgtgtaaactttgaagaacataaaaacttcatggtggtttcttattaagacagtggactagacatctaataaaacttctttccaaaaaaagaaaaaaaatgggcctcgtggcctaagggtggagctctggggccgttcccttagggagggtaattatggagcctgctactagactcctgcgctgggcgttcgcgtggggaagcggatcaatttcctaaagggggatacggtatcccgaatcgggggaatcccggaaaacatggaggcaagggcccaaagggcgaacggtaagg

SEQ ID NO: 414181 - DNA, 3373 bp, Homo sapiens
cagtcatcttccccaggctcccagcattcctcctctctgcagcctgccacctgtcctgcatgtggttctctgccaagtagggcaaacagtccttgggcaggtgcactctgcaggtctccactggtgtgggactcaggaatacaggcggggtcaaagctccccacagccagggcccatctgaatataccagcaagacacagactccatgatcagggccttaaacacagaggaagagtcacattatcactgccccgctagcctggttgtggtgctgccagagaaacaaagcaggacatgagttctgtttgtagagcaaggacttaagatcaaggaggattttgcaaagcaaaaagagtgggatagaactttctgggtaaaatgaacagccttagcatggaaattatttcccagtactcattttcagtttgtggacaatcattcaatcctagacagttctactgtccttccttcctgaggtttaaagtaactaaaccctacacttttctgacaagattttagaatatctttcaattcataattactctttggtgcagagaagtaatgttttcctaaactctcttcagtttactcaaaaacataataaattaattgaggacttaatgtgccacgttggtgcttatcttgaaaatattgctgaaaatcagaaattcacattgccagtagggtctgggattttttctttttgtttttgtttaagtgatttaagaagtttatttcctcatagtaactttcttcccaagtgtgccagtgtttcattaattgttccttcctaggaggaagaaatagaatttctctacaatgagaacacggttagagaaagccccaacattacagaccggtggatcctgtccttcatgcagtctctcattggcttctttgagactgaaatggcagcttataggctttatactgtggtgcctcgcctggtcaagtttgtagatattctgaccaattggtatgttagaatgaaccgcagaagattaaagggtgaaaatgggatggaggattgtgtcatggccctagaaaccttgtttagtgttctgctttctctttgcagacttatggctccctacacaccttttctcactgaattgatgtaccagaatctaaaggtgctgattgaccctgtttctgttcaggacaaggacacactcagcattcactacctcatgctgccccgtgttcgagaagaattgattgacaagaaaacagagagtgcagtatctcagatgcagtctgtgattgaacttggaagagtgatcagagaccgaaaaactattcccataaagtatcctttgaaagaaattgtggttatccatcaagatccagaagctcttaaagatatcaagtctttggagaagtatatcattgaggaactcaatgttcgaaaagttacactgtctacagataaaaacaagtatggcattcggctaagggcagaaccagatcacatggtcctggggaagcgtctgaagggagcctttaaggcagtgatgacgtccatcaagcagttgagcagtgaggagctggagcagttccagaagactgggaccattgttgtggaaggccatgaattgcacgatgaagacatccgcctcatgtacacctttgatcaggccacaggtgggactgcgcaatttgaagcacactcagatgctcaggctttggtcctcttagatgtcactcctgaccagtcaatggtagatgaaggaatggctcgggaagtcatcaatcgcatacagaaacttcgcaaaaagtgcaatctggttccaactgatgaaatcacagtgtactataaagcaaagtctgaaggaacatatctgaatagtgttattgaaagccacacagagttcatatttaccaccataaaggctcccttgaaaccatatccagtttctccatcggataaagtccttattcaagaaaaaacacagttgaagggatctgaactggaaattacactcaccagaggatcttcccttcctggtcctgcttgtgcatatgtcaatcttaacatttgtgcaaatggcagtgaacaaggtggagtattgctcctggaaaatccaaaaggtgacaataggttggaccttttaaagctgaagagtgttgtcactagcatttttggtgtgaaaaatacagagctggctgtcttccatgatgaaacagaaatacaaaaccaaactgacttactgagtcttagtggaaaaacactttgtgtgactgcaggatcggctccctctctgatcaacagttctagtactcttctttgtcagtatatcaacctacagctcctgaatgcaaagccacaagagtgtttaatggggacagtgggcactctcctgcttgaaaacccacttgggcagaatggactcacccaccaaggtcttctgtatgaagcagccaaggtgtttggccttcggagcaggaagctaaagctgtttctgaatgagacccaaacgcaggaaattacagaagacatccccgtgaagactttgaatatgaagactgtgtatgtttctgtgttaccaacaacagcagacttctagcatgtacttatcaatgttgttcggtcagcccttccctaattacacctatcccctacacatacatgcacatagacacacacatgaacacactgaagatatttccttcaggtgtgtgtaaaatatgctgcttggattgaaattcaaatgggattgattagtcaagtaacttgagacctcacagtaatcttcacacttaaccttagacacctatgcagtcatgttgggagcaggttacaatgttacttcagcccacagtttatttctatacttgagttcttaagtacagaagatagaagtgatttaaatggcatagtatatatatcattttctggccttttaaaatttatttgagacctcttgatgaaatggacatattatatatttctgccacctggattttcctggataatttgatggaatattttaagtttcagtaaatcagaacaataaacaaactcagatataaatgtgttgaaagtaattcattctcccatagataaatgaaacttgaaatgtgtaaactttgaagaacataaaaacttcatggtggtttcttattaagacagtggactagacatctaataaaacttctttccaaaaaaagaaaaaaaatgggcctcgtggcctaagggtggagctctggggccgttcccttagggagggtaattatggagcctgctactagactcctgcgctgggcgttcgcgtggggaagcggatcaatttcctaaagggggatacggtatcccgaatcgggggaatcccggaaaacatggaggcaagggcccaaagggcgaacggtaagg

SEQ ID NO: 414182 - DNA, 2362 bp, Homo sapiens
gttgtttctcagtataaatgagatcagttgttgatgactgcatataactgacatgatgtcctgtgtcttcatacgctccctacacaccttttctcactgaattgatgtaccagaatctaaaggtgctgattgaccctgtttctgttcaggacaaggacacactcagcattcactacctcatgctgccccgtgttcgagaagaattgattgacaagaaaacagagagtgcagtatctcagatgcagtctgtgattgaacttggaagagtgatcagagaccgaaaaactattcccataaagtatcctttgaaagaaattgtggttatccatcaagatccagaagctcttaaagatatcaagtctttggagaagtatatcattgaggaactcaatgttcgaaaagttacactgtctacagataaaaacaagtatggcattcggctaagggcagaaccagatcacatggtcctggggaagcgtctgaagggagcctttaaggcagtgatgacgtccatcaagcagttgagcagtgaggagctggagcagttccagaagactgggaccattgttgtggaaggccatgaattgcacgatgaagacatccgcctcatgtacacctttgatcaggccacaggtgggactgcgcaatttgaagcacactcagatgctcaggctttggtcctcttagatgtcactcctgaccagtcaatggtagatgaaggaatggctcgggaagtcatcaatcgcatacagaaacttcgcaaaaagtgcaatctggttccaactgatgaaatcacagtgtactataaagcaaagtctgaaggaacatatctgaatagtgttattgaaagccacacagagttcatatttaccaccataaaggctcccttgaaaccatatccagtttctccatcggataaagtccttattcaagaaaaaacacagttgaagggatctgaactggaaattacactcaccagaggatcttcccttcctggtcctgcttgtgcatatgtcaatcttaacatttgtgcaaatggcagtgaacaaggtggagtattgctcctggaaaatccaaaaggtgacaataggttggaccttttaaagctgaagagtgttgtcactagcatttttggtgtgaaaaatacagagctggctgtcttccatgatgaaacagaaatacaaaaccaaactgacttactgagtcttagtggaaaaacactttgtgtgactgcaggatcggctccctctctgatcaacagttctagtactcttctttgtcagtatatcaacctacagctcctgaatgcaaagccacaagagtgtttaatggggacagtgggcactctcctgcttgaaaacccacttgggcagaatggactcacccaccaaggtcttctgtatgaagcagccaaggtgtttggccttcggagcaggaagctaaagctgtttctgaatgagacccaaacgcaggaaattacagaagacatccccgtgaagactttgaatatgaagactgtgtatgtttctgtgttaccaacaacagcagacttctagcatgtacttatcaatgttgttcggtcagcccttccctaattacacctatcccctacacatacatgcacatagacacacacatgaacacactgaagatatttccttcaggtgtgtgtaaaatatgctgcttggattgaaattcaaatgggattgattagtcaagtaacttgagacctcacagtaatcttcacacttaaccttagacacctatgcagtcatgttgggagcaggttacaatgttacttcagcccacagtttatttctatacttgagttcttaagtacagaagatagaagtgatttaaatggcatagtatatatatcattttctggccttttaaaatttatttgagacctcttgatgaaatggacatattatatatttctgccacctggattttcctggataatttgatggaatattttaagtttcagtaaatcagaacaataaacaaactcagatataaatgtgttgaaagtaattcattctcccatagataaatgaaacttgaaatgtgtaaactttgaagaacataaaaacttcatggtggtttcttattaagacagtggactagacatctaataaaacttctttccaaaaaaagaaaaaaaatgggcctcgtggcctaagggtggagctctggggccgttcccttagggagggtaattatggagcctgctactagactcctgcgctgggcgttcgcgtggggaagcggatcaatttcctaaagggggatacggtatcccgaatcgggggaatcccggaaaacatggaggcaagggcccaaagggcgaacggtaagg

SEQ ID NO: 414183 - DNA, 4364 bp, Homo sapiens
agcgcgttgcatcacctccgtgcgcccggttgcagcgtggacgccggatgagttgcttttaggcttgctggcccgcggggctgtccaggcacgcgaggcccctcagcaacaaaatgcttcaacaagttccagaaaacataaattttcctgctgaagaagagaaaatcttggagttttggactgaatttaattgttttcaggaatgcttaaagcaatcaaaacataaaccaaaatttaccttctatgatggtcctccttttgcaactggactgcctcactatggacatatacttgcgggtacaattaaagatatagttacaagatatgctcaccagagtgggtttcatgttgacagaagatttggatgggattgccatggcttacctgtggaatatgaaattgataagacactgggaatcagaggaccagaggatgtggccaaaatggggattacagagtataacaatcagtgccgagcaattgtgatgagatattctgctgagtggaagtctactgttagcagacttggccgatggattgactttgacaatgactataaaactctgtatccacaattcatggaatcagtctggtgggtcttcaaacaactctatgataaaggccttgtttatagaggtgtgaaagtcatgcccttctctacggcatgtaacactccactttccaacttcgagtcacaccagaattataaggatgttcaagatccttcagtatttgtaactttccctttggaagaagatgaaactgtatctttagttgcttggacaaccactccctggactctacctagtaaccttgctgtgtgtgttaatccagaaatgcaatatgtgaaaattaaagatgttgccagaggacgattactcattttaatggaagccagattgtcagccctctataaattggagagtgactatgagatccttgaaagatttcctggtgcctatcttaaaggcaagaagtacaggcccctgtttgactatttcctgaagtgtaaagagaatggcgctttcactgtgcttgttgacaactatgtgaaggaagaagaaggcacaggggttgtccaccaagctccttacttcggtgctgaggactatcgggtctgtatggactttaacattattcggaaagactcactccctgtttgccctgtggatgcttcaggctgcttcacaacggaggtgacagatttcgcaggacagtatgtgaaggatgctgacaaaagtatcatcaggactttgaaggaacaaggccgacttctggttgccaccaccttcactcacagctaccctttttgctggagatcagacactcctctaatttacaaagcagtgcccagctggtttgtgcgagtggagaacatggtggaccagctcctaaggaacaatgacctgtgctactgggtcccagagttggtacgagaaaaacgatttggaaattggctgaaagatgcacgtgactggacaatttccagaaacagatactggggcacccccatcccactgtgggtcagcgatgactttgaggaggtggtatgcattgggtcagtggcggaacttgaagaactgtcaggagcaaagatctcagatctccacagagagagtgttgaccacctgaccattccttcacgctgtgggaagggatccttgcaccgcatctctgaagtgtttgactgttggtttgagagtggcagcatgccctatgctcaggttcattacccgtttgaaaacaagagggagtttgaggatgcttttcctgcagatttcattgccgagggcatcgaccaaaccagaggatggttttataccctgctggtgctggccacggccctctttggacaaccgcctttcaagaacgtaattgtgaatgggcttgtcctggcaagtgatggccaaaaaatgagcaaacggaaaaagaattatccagatccagtttccatcatccagaagtatggtgctgatgccctcagattatatctgattaactcccctgtggtgagagcagaaaacctccgctttaaagaagagggtgtgcgggacgtccttaaggatgtactgctcccatggtacaatgcctatcgcttcttaatccagaacgttctgaggctccagaaggaggaagaaatagaatttctctacaatgagaacacggttagagaaagccccaacattacagaccggtggatcctgtccttcatgcagtctctcattggcttctttgagactgaaatggcagcttataggctttatactgtggtgcctcgcctggtcaagtttgtagatattctgaccaattggtatgttagaatgaaccgcagaagattaaagggtgaaaatgggatggaggattgtgtcatggccctagaaaccttgtttagtgttctgctttctctttgcagacttatggctccctacacaccttttctcactgaattgatgtaccagaatctaaaggtgctgattgaccctgtttctgttcaggacaaggacacactcagcattcactacctcatgctgccccgtgttcgagaagaattgattgacaagaaaacagagagtgcagtatctcagatgcagtctgtgattgaacttggaagagtgatcagagaccgaaaaactattcccataaagtatcctttgaaagaaattgtggttatccatcaagatccagaagctcttaaagatatcaagtctttggagaagtatatcattgaggaactcaatgttcgaaaagttacactgtctacagataaaaacaagtatggcattcggctaagggcagaaccagatcacatggtcctggggaagcgtctgaagggagcctttaaggcagtgatgacgtccatcaagcagttgagcagtgaggagctggagcagttccagaagactgggaccattgttgtggaaggccatgaattgcacgatgaagacatccgcctcatgtacacctttgatcaggccacaggtgggactgcgcaatttgaagcacactcagatgctcaggctttggtcctcttagatgtcactcctgaccagtcaatggtagatgaaggaatggctcgggaagtcatcaatcgcatacagaaacttcgcaaaaagtgcaatctggttccaactgatgaaatcacagtgtactataaagcaaagtctgaaggaacatatctgaatagtgttattgaaagccacacagagttcatatttaccaccataaaggctcccttgaaaccatatccagtttctccatcggataaagtccttattcaagaaaaaacacagttgaagggatctgaactggaaattacactcaccagaggatcttcccttcctggtcctgcttgtgcatatgtcaatcttaacatttgtgcaaatggcagtgaacaaggtggagtattgctcctggaaaatccaaaaggtgacaataggttggaccttttaaagctgaagagtgttgtcactagcatttttggtgtgaaaaatacagagctggctgtcttccatgatgaaacagaaatacaaaaccaaactgacttactgagtcttagtggaaaaacactttgtgtgactgcaggatcggctccctctctgatcaacagttctagtactcttctttgtcagtatatcaacctacagctcctgaatgcaaagccacaagagtgtttaatggggacagtgggcactctcctgcttgaaaacccacttgggcagaatggactcacccaccaaggtcttctgtatgaagcagccaaggtgtttggccttcggagcaggaagctaaagctgtttctgaatgagacccaaacgcaggaaattacagaagacatccccgtgaagactttgaatatgaagactgtgtatgtttctgtgttaccaacaacagcagacttctagcatgtacttatcaatgttgttcggtcagcccttccctaattacacctatcccctacacatacatgcacatagacacacacatgaacacactgaagatatttccttcaggtgtgtgtaaaatatgctgcttggattgaaattcaaatgggattgattagtcaagtaacttgagacctcacagtaatcttcacacttaaccttagacacctatgcagtcatgttgggagcaggttacaatgttacttcagcccacagtttatttctatacttgagttcttaagtacagaagatagaagtgatttaaatggcatagtatatatatcattttctggccttttaaaatttatttgagacctcttgatgaaatggacatattatatatttctgccacctggattttcctggataatttgatggaatattttaagtttcagtaaatcagaacaataaacaaactcagat

SEQ ID NO: 414184 - DNA, 4761 bp, Homo sapiens
agcgcgttgcatcacctccgtgcgcccggttgcagcgtggacgccggatgagttgcttttaggcttgctggcccgcggggctgtccaggcacgcgaggcccctcagcaacaaaatgcttcaacaagttccagaaaacataaattttcctgctgaagaagagaaaatcttggagttttggactgaatttaattgttttcaggaatgcttaaagcaatcaaaacataaaccaaaatttaccttctatgatggtcctccttttgcaactggactgcctcactatggacatatacttgcgggtacaattaaagatatagttacaagatatgctcaccagagtgggtttcatgttgacagaagatttggatgggattgccatggcttacctgtggaatatgaaattgataagacactgggaatcagaggaccagaggatgtggccaaaatggggattacagagtataacaatcagtgccgagcaattgtgatgagatattctgctgagtggaagtctactgttagcagacttggccgatggattgactttgacaatgactataaaactctgtatccacaattcatggaatcagtctggtgggtcttcaaacaactctatgataaaggccttgtttatagaggtgtgaaagtcatgcccttctctacggcatgtaacactccactttccaacttcgagtcacaccagaattataaggatgttcaagatccttcagtatttgtaactttccctttggaagaagatgaaactgtatctttagttgcttggacaaccactccctggactctacctagtaaccttgctgtgtgtgttaatccagaaatgcaatatgtgaaaattaaagatgttgccagaggacgattactcattttaatggaagccagattgtcagccctctataaattggagagtgactatgagatccttgaaagatttcctggtgcctatcttaaaggcaagaagtacaggcccctgtttgactatttcctgaagtgtaaagagaatggcgctttcactgtgcttgttgacaactatgtgaaggaagaagaaggcacaggggttgtccaccaagctccttacttcggtgctgaggactatcgggtctgtatggactttaacattattcggaaagactcactccctgtttgccctgtggatgcttcaggctgcttcacaacggaggtgacagatttcgcaggacagtatgtgaaggatgctgacaaaagtatcatcaggactttgaaggaacaaggccgacttctggttgccaccaccttcactcacagctaccctttttgctggagatcagacactcctctaatttacaaagcagtgcccagctggtttgtgcgagtggagaacatggtggaccagctcctaaggaacaatgacctgtgctactgggtcccagagttggtacgagaaaaacgatttggaaattggctgaaagatgcacgtgactggacaatttccagaaacagatactggggcacccccatcccactgtgggtcagcgatgactttgaggaggtggtatgcattgggtcagtggcggaacttgaagaactgtcaggagcaaagatctcagatctccacagagagagtgttgaccacctgaccattccttcacgctgtgggaagggatccttgcaccgcatctctgaagtgtttgactgttggtttgagagtggcagcatgccctatgctcaggttcattacccgtttgaaaacaagagggagtttgaggatgcttttcctgcagatttcattgccgagggcatcgaccaaaccagaggatggttttataccctgctggtgctggccacggccctctttggacaaccgcctttcaagaacgtaattgtgaatgggcttgtcctggcaagtgatggccaaaaaatgagcaaacggaaaaagaattatccagatccagtttccatcatccagaagtatggtgctgatgccctcagattatatctgattaactcccctgtggtgagagcagaaaacctccgctttaaagaagagggtgtgcgggacgtccttaaggatgtactgctcccatggtacaatgcctatcgcttcttaatccagaacgttctgaggctccagaaggaggaagaaatagaatttctctacaatgagaacacggttagagaaagccccaacattacagaccggtggatcctgtccttcatgcagtctctcattggcttctttgagactgaaatggcagcttataggctttatactgtggtgcctcgcctggtcaagtttgtagatattctgaccaattggtatgttagaatgaaccgcagaagattaaagggtgaaaatgggatggaggattgtgtcatggccctagaaaccttgtttagtgttctgctttctctttgcagacttatggctccctacacaccttttctcactgaattgatgtaccagaatctaaaggtgctgattgaccctgtttctgttcaggacaaggacacactcagcattcactacctcatgctgccccgtgttcgagaagaattgattgacaagaaaacagagagtgcagtatctcagatgcagtctgtgattgaacttggaagagtgatcagagaccgaaaaactattcccataaagtatcctttgaaagaaattgtggttatccatcaagatccagaagctcttaaagatatcaagtctttggagaagtatatcattgaggaactcaatgttcgaaaagttacactgtctacagataaaaacaagtatggcattcggctaagggcagaaccagatcacatggtcctggggaagcgtctgaagggagcctttaaggcagtgatgacgtccatcaagcagttgagcagtgaggagctggagcagttccagaagactgggaccattgttgtggaaggccatgaattgcacgatgaagacatccgcctcatgtacacctttgatcaggccacaggtgggactgcgcaatttgaagcacactcagatgctcaggctttggtcctcttagatgtcactcctgaccagtcaatggtagatgaaggaatggctcgggaagtcatcaatcgcatacagaaacttcgcaaaaagtgcaatctggttccaactgatgaaatcacagtgtactataaagcaaagtctgaaggaacatatctgaatagtgttattgaaagccacacagagttcatatttaccaccataaaggctcccttgaaaccatatccagtttctccatcggataaagtccttattcaagaaaaaacacagttgaagggatctgaactggaaattacactcaccagaggatcttcccttcctggtcctgcttgtgcatatgtcaatcttaacatttgtgcaaatggcagtgaacaaggtggagtattgctcctggaaaatccaaaaggtgacaataggttggaccttttaaagctgaagagtgttgtcactagcatttttggtgtgaaaaatacagagctggctgtcttccatgatgaaacagaaatacaaaaccaaactgacttactgagtcttagtggaaaaacactttgtgtgactgcaggatcggctccctctctgatcaacagttctagtactcttctttgtcagtatatcaacctacagctcctgaatgcaaagccacaagagtgtttaatggggacagtgggcactctcctgcttgaaaacccacttgggcagaatggactcacccaccaaggtcttctgtatgaagcagccaaggtgtttggccttcggagcaggaagctaaagctgtttctgaatgagacccaaacgcaggaaattacagaagacatccccgtgaagactttgaatatgaagactgtgtatgtttctgtgttaccaacaacagcagacttctagcatgtacttatcaatgttgttcggtcagcccttccctaattacacctatcccctacacatacatgcacatagacacacacatgaacacactgaagatatttccttcaggtgtgtgtaaaatatgctgcttggattgaaattcaaatgggattgattagtcaagtaacttgagacctcacagtaatcttcacacttaaccttagacacctatgcagtcatgttgggagcaggttacaatgttacttcagcccacagtttatttctatacttgagttcttaagtacagaagatagaagtgatttaaatggcatagtatatatatcattttctggccttttaaaatttatttgagacctcttgatgaaatggacatattatatatttctgccacctggattttcctggataatttgatggaatattttaagtttcagtaaatcagaacaataaacaaactcagataaaaaaaaatacaaaaaaacaaaaaacaaaaaaaaaaaaacaaatctaaaacaaaaaaaaacataaagacaacaaaaaaaagaggggggggggggcaaaaaaatcccccaggggggggcacccaaagtattgataaataccccccctatttttgatgaccggaggagcactcctaataggtagctctaaatatccgagagccaagcggcgcattaacaacagcatcctgacaggaaaaaacagcttcgggcttccttgagaaaaaacacccttgatgggcgaatggatcattaggagcaccctcccatcaagaatgaaacgccggggaataaataatcagtaggcgtttagtgtttcacccgttgttgtcggggaaagtgtcacgctttttgatatt

SEQ ID NO: 414185 - DNA, 1834 bp, Homo sapiens
ctgattaacagtgtagctgcttctccatagggaccattgttgtggaaggccatgaattgcacgatgaagacatccgcctcatgtacacctttgatcaggccacaggtgggactgcgcaatttgaagcacactcagatgctcaggctttggtcctcttagatgtcactcctgaccagtcaatggtagatgaaggaatggctcgggaagtcatcaatcgcatacagaaacttcgcaaaaagtgcaatctggttccaactgatgaaatcacagtgtactataaagcaaagtctgaaggaacatatctgaatagtgttattgaaagccacacagagttcatatttaccaccataaaggctcccttgaaaccatatccagtttctccatcggataaagtccttattcaagaaaaaacacagttgaagggatctgaactggaaattacactcaccagaggatcttcccttcctggtcctgcttgtgcatatgtcaatcttaacatttgtgcaaatggcagtgaacaaggtggagtattgctcctggaaaatccaaaaggtgacaataggttggaccttttaaagctgaagagtgttgtcactagcatttttggtgtgaaaaatacagagctggctgtcttccatgatgaaacagaaatacaaaaccaaactgacttactgagtcttagtggaaaaacactttgtgtgactgcaggatcggctccctctctgatcaacagttctagtactcttctttgtcagtatatcaacctacagctcctgaatgcaaagccacaagagtgtttaatggggacagtgggcactctcctgcttgaaaacccacttgggcagaatggactcacccaccaaggtcttctgtatgaagcagccaaggtgtttggccttcggagcaggaagctaaagctgtttctgaatgagacccaaacgcaggaaattacagaagacatccccgtgaagactttgaatatgaagactgtgtatgtttctgtgttaccaacaacagcagacttctagcatgtacttatcaatgttgttcggtcagcccttccctaattacacctatcccctacacatacatgcacatagacacacacatgaacacactgaagatatttccttcaggtgtgtgtaaaatatgctgcttggattgaaattcaaatgggattgattagtcaagtaacttgagacctcacagtaatcttcacacttaaccttagacacctatgcagtcatgttgggagcaggttacaatgttacttcagcccacagtttatttctatacttgagttcttaagtacagaagatagaagtgatttaaatggcatagtatatatatcattttctggccttttaaaatttatttgagacctcttgatgaaatggacatattatatatttctgccacctggattttcctggataatttgatggaatattttaagtttcagtaaatcagaacaataaacaaactcagatataaatgtgttgaaagtaattcattctcccatagataaatgaaacttgaaatgtgtaaactttgaagaacataaaaacttcatggtggtttcttattaagacagtggactagacatctaataaaacttctttccaaaaaaagaaaaaaaatgggcctcgtggcctaagggtggagctctggggccgttcccttagggagggtaattatggagcctgctactagactcctgcgctgggcgttcgcgtggggaagcggatcaatttcctaaagggggatacggtatcccgaatcgggggaatcccggaaaacatggaggcaagggcccaaagggcgaacggtaagg

SEQ ID NO: 414186 - DNA, 1883 bp, Homo sapiens
ctgattaacagtgtagctgcttctccatagggaccattgttgtggaaggccatgaattgcacgatgaagacatccgcctcatgtacacctttgatcaggccacaggtgggactgcgcaatttgaagcacactcagatgctcaggctttggtcctcttagatgtcactcctgaccagtcaatggtagatgaaggaatggctcgggaagtcatcaatcgcatacagaaacttcgcaaaaagtgcaatctggttccaactgatgaaatcacagtgtactataaagcaaagtctgaaggaacatatctgaatagtgttattgaaagccacacagagttcatatttaccaccataaaggctcccttgaaaccatatccagtttctccatcggataaagtccttattcaagaaaaaacacagttgaagggatctgaactggaaattacactcaccagaggatcttcccttcctggtcctgcttgtgcatatgtcaatcttaacatttgtgcaaatggcagtgaacaaggcgagatgcagtggatcattcctgaaatctaccacttttggaagccaaggtggagtattgctcctggaaaatccaaaaggtgacaataggttggaccttttaaagctgaagagtgttgtcactagcatttttggtgtgaaaaatacagagctggctgtcttccatgatgaaacagaaatacaaaaccaaactgacttactgagtcttagtggaaaaacactttgtgtgactgcaggatcggctccctctctgatcaacagttctagtactcttctttgtcagtatatcaacctacagctcctgaatgcaaagccacaagagtgtttaatggggacagtgggcactctcctgcttgaaaacccacttgggcagaatggactcacccaccaaggtcttctgtatgaagcagccaaggtgtttggccttcggagcaggaagctaaagctgtttctgaatgagacccaaacgcaggaaattacagaagacatccccgtgaagactttgaatatgaagactgtgtatgtttctgtgttaccaacaacagcagacttctagcatgtacttatcaatgttgttcggtcagcccttccctaattacacctatcccctacacatacatgcacatagacacacacatgaacacactgaagatatttccttcaggtgtgtgtaaaatatgctgcttggattgaaattcaaatgggattgattagtcaagtaacttgagacctcacagtaatcttcacacttaaccttagacacctatgcagtcatgttgggagcaggttacaatgttacttcagcccacagtttatttctatacttgagttcttaagtacagaagatagaagtgatttaaatggcatagtatatatatcattttctggccttttaaaatttatttgagacctcttgatgaaatggacatattatatatttctgccacctggattttcctggataatttgatggaatattttaagtttcagtaaatcagaacaataaacaaactcagatataaatgtgttgaaagtaattcattctcccatagataaatgaaacttgaaatgtgtaaactttgaagaacataaaaacttcatggtggtttcttattaagacagtggactagacatctaataaaacttctttccaaaaaaagaaaaaaaatgggcctcgtggcctaagggtggagctctggggccgttcccttagggagggtaattatggagcctgctactagactcctgcgctgggcgttcgcgtggggaagcggatcaatttcctaaagggggatacggtatcccgaatcgggggaatcccggaaaacatggaggcaagggcccaaagggcgaacggtaagg

SEQ ID NO: 414187 - DNA, 3718 bp, Homo sapiens
agcgcgttgcatcacctccgtgcgcccggttgcagcgtggacgccggatgagttgcttttaggcttgctggcccgcggggctgtccaggcacgcgaggcccctcagcaacaaaatgcttcaacaagttccagaaaacataaattttcctgctgaagaagagaaaatcttggagttttggactgaatttaattgttttcaggaatgcttaaagcaatcaaaacataaaccaaaatttaccttctatgatggtcctccttttgcaactggactgcctcactatggacatatacttgcgggtacaattaaagatatagttacaagatatgctcaccagagtgggtttcatgttgacagaagatttggatgggattgccatggcttacctgtggaatatgaaattgataagacactgggaatcagaggaccagaggatgtggccaaaatggggattacagagtataacaatcagtgccgagcaattgtgatgagatattctgctgagtggaagtctactgttagcagacttggccgatggattgactttgacaatgactataaaactctgtatccacaattcatggaatcagtctggtgggtcttcaaacaactctatgataaaggccttgtttatagaggtgtgaaagtcatgcccttctctacggcatgtaacactccactttccaacttcgagtcacaccagaattataaggatgttcaagatccttcagtatttgtaactttccctttggaagaagatgaaactgtatctttagttgcttggacaaccactccctggactctacctagtaaccttgctgtgtgtgttaatccagaaatgcaatatgtgaaaattaaagatgttgccagaggacgattactcattttaatggaagccagattgtcagccctctataaattggagagtgactatgagatccttgaaagatttcctggtgcctatcttaaaggcaagaagtacaggcccctgtttgactatttcctgaagtgtaaagagaatggcgctttcactgtgcttgttgacaactatgtgaaggaagaagaaggcacaggggttgtccaccaagctccttacttcggtgctgaggactatcgggtctgtatggactttaacattattcggaaagactcactccctgtttgccctgtggatgcttcaggctgcttcacaacggaggtgacagatttcgcaggacagtatgtgaaggatgctgacaaaagtatcatcaggactttgaaggaacaaggccgacttctggttgccaccaccttcactcacagctaccctttttgctggagatcagacactcctctaatttacaaagcagtgcccagctggtttgtgcgagtggagaacatggtggaccagctcctaaggaacaatgacctgtgctactgggtcccagagttggtacgagaaaaacgatttggaaattggctgaaagatgcacgtgactggacaatttccagaaacagatactggggcacccccatcccactgtgggtcagcgatgactttgaggaggtggtatgcattgggtcagtggcggaacttgaagaactgtcaggagcaaagatctcagatctccacagagagagtgttgaccacctgaccattccttcacgctgtgggaagggatccttgcaccgcatctctgaagtgtttgactgttggtttgagagtggcagcatgccctatgctcaggttcattacccgtttgaaaacaagagggagtttgaggatgcttttcctgcagatttcattgccgagggcatcgaccaaaccagaggatggttttataccctgctggtgctggccacggccctctttggacaaccgcctttcaagaacgtaattgtgaatgggcttgtcctggcaagtgatggccaaaaaatgagcaaacggaaaaagaattatccagatccagtttccatcatccagaagtatggtgctgatgccctcagattatatctgattaactcccctgtggtgagagcagaaaacctccgctttaaagaagagggtgtgcgggacgtccttaaggatgtactgctcccatggtacaatgcctatcgcttcttaatccagaacgttctgaggctccagaaggaggaagaaatagaatttctctacaatgagaacacggttagagaaagccccaacattacagaccggtggatcctgtccttcatgcagtctctcattggcttctttgagactgaaatggcagcttataggctttatactgtggtgcctcgcctggtcaagtttgtagatattctgaccaattggtatgttagaatgaaccgcagaagattaaagggtgaaaatgggatggaggattgtgtcatggccctagaaaccttgtttagtgttctgctttctctttgcagacttatggctccctacacaccttttctcactgaattgatgtaccagaatctaaaggtgctgattgaccctgtttctgttcaggacaaggacacactcagcattcactacctcatgctgccccgtgttcgagaagaattgattgacaagaaaacagagagtgcagtatctcagatgcagtctgtgattgaacttggaagagtgatcagagaccgaaaaactattcccataaagtatcctttgaaagaaattgtggttatccatcaagatccagaagctcttaaagatatcaagtctttggagaagtatatcattgaggaactcaatgttcgaaaagttacactgtctacagataaaaacaagtatggcattcggctaagggcagaaccagatcacatggtcctggggaagcgtctgaagggagcctttaaggcagtgatgacgtccatcaagcagttgagcagtgaggagctggagcagttccagaagactgggaccattgttgtggaaggccatgaattgcacgatgaagacatccgcctcatgtacacctttgatcaggccacaggtgggactgcgcaatttgaagcacactcagatgctcaggctttggtcctcttagatgtcactcctgaccagtcaatggtagatgaaggaatggctcgggaagtcatcaatcgcatacagaaacttcgcaaaaagtgcaatctggttccaactgatgaaatcacagtgtactataaagcaaagtctgaaggaacatatctgaatagtgttattgaaagccacacagagttcatatttaccaccataaaggctcccttgaaaccatatccagtttctccatcggataaagtccttattcaagaaaaaacacagttgaagggatctgaactggaaattacactcaccagaggatcttcccttcctggtcctgcttgtgcatatgtcaatcttaacatttgtgcaaatggcagtgaacaaggtggagtattgctcctggaaaatccaaaaggtgacaataggttggaccttttaaagctgaagagtgttgtcactagcatttttggtgtgaaaaatacagagctggctgtcttccatgatgaaacagaaatacaaaaccaaactgacttactgagtcttagtggaaaaacactttgtgtgactgcaggatcggctccctctctgatcaacagttctagtactcttctttgtcagtatatcaaccctaccaggtttcctggaatgccaaagtcccccaagtggtttcaattggtggaccgtgggccacctttttctctgcattg

SEQ ID NO: 414188 - DNA, 1398 bp, Homo sapiens
agcgcgttgcatcacctccgtgcgcccggttgcagcgtggacgccggatgagttgcttttaggcttgctggcccgcggggctgtccaggcacgcgaggcccctcagcaacaaaatgcttcaacaagttccagaaaacataaattttcctgctgaagaagagaaaatcttggagttttggactgaatttaattgttttcaggaatgcttaaagcaatcaaaacataaaccaaaatttaccttctatgatggtcctccttttgcaactggactgcctcactatggacatatacttgcgggtacaattaaagatatagttacaagatatgctcaccagagtgggtttcatgttgacagaagatttggatgggattgccatggcttacctgtggaatatgaaattgataagacactgggaatcagaggaccagaggatgtggccaaaatggggattacagagtataacaatcagtgccgagcaattgtgatgagatattctgctgagtggaagaaattacagaagacatccccgtgaagactttgaatatgaagactgtgtatgtttctgtgttaccaacaacagcagacttctagcatgtacttatcaatgttgttcggtcagcccttccctaattacacctatcccctacacatacatgcacatagacacacacatgaacacactgaagatatttccttcaggtgtgtgtaaaatatgctgcttggattgaaattcaaatgggattgattagtcaagtaacttgagacctcacagtaatcttcacacttaaccttagacacctatgcagtcatgttgggagcaggttacaatgttacttcagcccacagtttatttctatacttgagttcttaagtacagaagatagaagtgatttaaatggcatagtatatatatcattttctggccttttaaaatttatttgagacctcttgatgaaatggacatattatatatttctgccacctggattttcctggataatttgatggaatattttaagtttcagtaaatcagaacaataaacaaactcagatataaatgtgttgaaagtaattcattctcccatagataaatgaaacttgaaatgtgtaaactttgaagaacataaaaacttcatggtggtttcttattaagacagtggactagacatctaataaaacttctttccaaaaaaagaaaaaaaatgggcctcgtggcctaagggtggagctctggggccgttcccttagggagggtaattatggagcctgctactagactcctgcgctgggcgttcgcgtggggaagcggatcaatttcctaaagggggatacggtatcccgaatcgggggaatcccggaaaacatggaggcaagggcccaaagggcgaacggtaagg

SEQ ID NO: 414189 - DNA, 956 bp, Homo sapiens
tacaacgaaaaattaatccatagatagaattatgaaagaaatgtgaatttcgaagatatacaggaggaaattacagaagacatccccgtgaagactttgaatatgaagactgtgtatgtttctgtgttaccaacaacagcagacttctagcatgtacttatcaatgttgttcggtcagcccttccctaattacacctatcccctacacatacatgcacatagacacacacatgaacacactgaagatatttccttcaggtgtgtgtaaaatatgctgcttggattgaaattcaaatgggattgattagtcaagtaacttgagacctcacagtaatcttcacacttaaccttagacacctatgcagtcatgttgggagcaggttacaatgttacttcagcccacagtttatttctatacttgagttcttaagtacagaagatagaagtgatttaaatggcatagtatatatatcattttctggccttttaaaatttatttgagacctcttgatgaaatggacatattatatatttctgccacctggattttcctggataatttgatggaatattttaagtttcagtaaatcagaacaataaacaaactcagatataaatgtgttgaaagtaattcattctcccatagataaatgaaacttgaaatgtgtaaactttgaagaacataaaaacttcatggtggtttcttattaagacagtggactagacatctaataaaacttctttccaaaaaaagaaaaaaaatgggcctcgtggcctaagggtggagctctggggccgttcccttagggagggtaattatggagcctgctactagactcctgcgctgggcgttcgcgtggggaagcggatcaatttcctaaagggggatacggtatcccgaatcgggggaatcccggaaaacatggaggcaagggcccaaagggcgaacggtaagg

SEQ ID NO: 414190 - DNA, 956 bp, Homo sapiens
  misc_feature (11)..(11): n is a, c, g, or t
  misc_feature (22)..(22): n is a, c, g, or t
  misc_feature (27)..(27): n is a, c, g, or t
  misc_feature (67)..(67): n is a, c, g, or t
aaaaaaaaaanaaaaaaaaaanaaganaaaaagaagttaaatgaatggtcctcctgcattacatagnaaattacagaagacatccccgtgaagactttgaatatgaagactgtgtatgtttctgtgttaccaacaacagcagacttctagcatgtacttatcaatgttgttcggtcagcccttccctaattacacctatcccctacacatacatgcacatagacacacacatgaacacactgaagatatttccttcaggtgtgtgtaaaatatgctgcttggattgaaattcaaatgggattgattagtcaagtaacttgagacctcacagtaatcttcacacttaaccttagacacctatgcagtcatgttgggagcaggttacaatgttacttcagcccacagtttatttctatacttgagttcttaagtacagaagatagaagtgatttaaatggcatagtatatatatcattttctggccttttaaaatttatttgagacctcttgatgaaatggacatattatatatttctgccacctggattttcctggataatttgatggaatattttaagtttcagtaaatcagaacaataaacaaactcagatataaatgtgttgaaagtaattcattctcccatagataaatgaaacttgaaatgtgtaaactttgaagaacataaaaacttcatggtggtttcttattaagacagtggactagacatctaataaaacttctttccaaaaaaagaaaaaaaatgggcctcgtggcctaagggtggagctctggggccgttcccttagggagggtaattatggagcctgctactagactcctgcgctgggcgttcgcgtggggaagcggatcaatttcctaaagggggatacggtatcccgaatcgggggaatcccggaaaacatggaggcaagggcccaaagggcgaacggtaagg

SEQ ID NO: 414191 - DNA, 2573 bp, Homo sapiens
agcgcgttgcatcacctccgtgcgcccggttgcagcgtggacgccggatgagttgcttttaggcttgctggcccgcggggctgtccaggcacgcgaggcccctcagcaacaaaatgcttcaacaagttccagaaaacataaattttcctgctgaagaagagaaaatcttggagttttggactgaatttaattgttttcaggaatgcttaaagcaatcaaaacataaaccaaaatttaccttctatgatggtcctccttttgcaactggactgcctcactatggacatatacttgcgggtacaattaaagatatagttacaagatatgctcaccagagtgggtttcatgttgacagaagatttggatgggattgccatggcttacctgtggaatatgaaattgataagacactgggaatcagaggaccagaggatgtggccaaaatggggattacagagtataacaatcagtgccgagcaattgtgatgagatattctgctgagtggaagtctactgttagcagacttggccgatggattgactttgacaatgactataaaactctgtatccacaattcatggaatcagtctggtgggtcttcaaacaactctatgataaaggccttgtttatagaggtgtgaaagtcatgcccttctctacggcatgtaacactccactttccaacttcgagtcacaccagaattataaggatgttcaagatccttcagtatttgtaactttccctttggaagaagatgaaactgtatctttagttgcttggacaaccactccctggactctacctagtaaccttgctgtgtgtgttaatccagaaatgcaatatgtgaaaattaaagatgttgccagaggacgattactcattttaatggaagccagattgtcagccctctataaattggagagtgactatgagatccttgaaagatttcctggtgcctatcttaaaggcaagaagtacaggcccctgtttgactatttcctgaagtgtaaagagaatggcgctttcactgtgcttgttgacaactatgtgaaggaagaagaaggcacaggggttgtccaccaagctccttacttcggtgctgaggactatcgggtctgtatggactttaacattattcggaaagactcactccctgtttgccctgtggatgcttcaggctgcttcacaacggaggtgacagatttcgcaggacagtatgtgaaggatgctgacaaaagtatcatcaggactttgaaggaacaaggccgacttctggttgccaccaccttcactcacagctaccctttttgctggagatcagacactcctctaatttacaaagcagtgcccagctggtttgtgcgagtggagaacatggtggaccagctcctaaggaacaatgacctgtgctactgggtcccagagttggtacgagaaaaacgatttggaaattggctgaaagatgcacgtgactggacaatttccagaaacagatactggggcacccccatcccactgtgggtcagcgatgactttgaggaggtggtatgcattgggtcagtggcggaacttgaagaactgtcaggagcaaagatctcagatctccacagagagagtgttgaccacctgaccattccttcacgctgtgggaagggatccttgcaccgcatctctgaagtgtttgactgttggtttgagagtggcagcatgccctatgctcaggttcattacccgtttgaaaacaagagggagtttgaggatgcttttcctgcagatttcattgccgagggcatcgaccaaaccagaggatggttttataccctgctggtgctggccacggccctctttggacaaccgcctttcaagaacgtaattgtgaatgggcttgtcctggcaagtgatggccaaaaaatgagcaaacggaaaaagaattatccagatccagtttccatcatccagaagtatggtgctgatgccctcagattatatctgattaactcccctgtggtgagagcagaaaacctccgctttaaagaagagggtgtgcgggacgtccttaaggatgtactgctcccatggtacaatgcctatcgcttcttaatccagaacgttctgaggctccagaaggaggaagaaatagaatttctctacaatgagaacacggttagagaaagccccaacattacagaccggtggatcctgtccttcatgcagtctctcattggcttctttgagactgaaatggcaggtgagtctctcttggtctgtcctcccaggaataaggactattctctttgtaactgcccttttgatatttaatagtggaaatattgagagatacagaaaattaaataattgtttccttttacctctcatatagttttgttaaggcttgttaattgtcgtgatatctttgtttcaagaccctggggacttctggcctggtgtggtggctcacgcctgtaatccccagcattttgggagaccaaggcaggcaggtcaccttaggtcaggagttcgagaccagcctggccaacatggcgaaaccctgtctctactaaaaatatattt

SEQ ID NO: 414192 - DNA, 2835 bp, Homo sapiens
agcgcgttgcatcacctccgtgcgcccggttgcagcgtggacgccggatgagttgcttttaggcttgctggcccgcggggctgtccaggcacgcgaggcccctcagcaacaaaatgcttcaacaagttccagaaaacataaattttcctgctgaagaagagaaaatcttggagttttggactgaatttaattgttttcaggaatgcttaaagcaatcaaaacataaaccaaaatttaccttctatgatggtcctccttttgcaactggactgcctcactatggacatatacttgcgggtacaattaaagatatagttacaagatatgctcaccagagtgggtttcatgttgacagaagatttggatgggattgccatggcttacctgtggaatatgaaattgataagacactgggaatcagaggaccagaggatgtggccaaaatggggattacagagtataacaatcagtgccgagcaattgtgatgagatattctgctgagtggaagtctactgttagcagacttggccgatggattgactttgacaatgactataaaactctgtatccacaattcatggaatcagtctggtgggtcttcaaacaactctatgataaaggccttgtttatagaggtgtgaaagtcatgcccttctctacggcatgtaacactccactttccaacttcgagtcacaccagaattataaggatgttcaagatccttcagtatttgtaactttccctttggaagaagatgaaactgtatctttagttgcttggacaaccactccctggactctacctagtaaccttgctgtgtgtgttaatccagaaatgcaatatgtgaaaattaaagatgttgccagaggacgattactcattttaatggaagccagattgtcagccctctataaattggagagtgactatgagatccttgaaagatttcctggtgcctatcttaaaggcaagaagtacaggcccctgtttgactatttcctgaagtgtaaagagaatggcgctttcactgtgcttgttgacaactatgtgaaggaagaagaaggcacaggggttgtccaccaagctccttacttcggtgctgaggactatcgggtctgtatggactttaacattattcggaaagactcactccctgtttgccctgtggatgcttcaggctgcttcacaacggaggtgacagatttcgcaggacagtatgtgaaggatgctgacaaaagtatcatcaggactttgaaggaacaaggccgacttctggttgccaccaccttcactcacagctaccctttttgctggagatcagacactcctctaatttacaaagcagtgcccagctggtttgtgcgagtggagaacatggtggaccagctcctaaggaacaatgacctgtgctactgggtcccagagttggtacgagaaaaacgatttggaaattggctgaaagatgcacgtgactggacaatttccagaaacagatactggggcacccccatcccactgtgggtcagcgatgactttgaggaggtggtatgcattgggtcagtggcggaacttgaagaactgtcaggagcaaagatctcagatctccacagagagagtgttgaccacctgaccattccttcacgctgtgggaagggatccttgcaccgcatctctgaagtgtttgactgttggtttgagagtggcagcatgccctatgctcaggttcattacccgtttgaaaacaagagggagtttgaggatgcttttcctgcagatttcattgccgagggcatcgaccaaaccagaggatggttttataccctgctggtgctggccacggccctctttggacaaccgcctttcaagaacgtaattgtgaatgggcttgtcctggcaagtgatggccaaaaaatgagcaaacggaaaaagaattatccagatccagtttccatcatccagaagtatggtgctgatgccctcagattatatctgattaactcccctgtggtgagagcagaaaacctccgctttaaagaagagggtgtgcgggacgtccttaaggatgtactgctcccatggtacaatgcctatcgcttcttaatccagaacgttctgaggctccagaaggtatgggctgtagggggctgcacatgtacctgccgtgtctccacagcgctcccttcaccaagctgtgaggtggagctctgtgtgagactttagggctgctgttctctgctgcctgatgctggggtaacttagagccatggggaggccatacatgcaggtgcggaaggtatctagggtccgggctatgccaagaccatgggccctagcctgcaaaagagttatgtcatatagttgtttagtcgccagttgttgtttttgtttttgaggtggagtctcagtcttgtcacccagactggattgcaatagcacgatctcggctcactgtaacctctgcctcctgggttgaggcactgcctcagcctccccagtagctgggattacaggcacccaccaccatgcctggctaattgttttatatttttagtggagacttggtttcatcatgttggtcaggctgatcttgaactccagacctcaggtgatccgcccttcttggcctcccaaaagtgctgggattacaggcatgagccacggcacccagcttcgtcagccagttcttggtaccaggaacaccatgttgagtgagacacccctccccttatggaaccaatggagtgggaattgggagatacagtaaagagtcagcaacttttagagagagcacccagtgaaggcggagtcacaggcaagctagggctggccactt

SEQ ID NO: 414193 - DNA, 2628 bp, Homo sapiens
agcgcgttgcatcacctccgtgcgcccggttgcagcgtggacgccggatgagttgcttttaggcttgctggcccgcggggctgtccaggcacgcgaggcccctcagcaacaaaatgcttcaacaagttccagaaaacataaattttcctgctgaagaagagaaaatcttggagttttggactgaatttaattgttttcaggaatgcttaaagcaatcaaaacataaaccaaaatttaccttctatgatggtcctccttttgcaactggactgcctcactatggacatatacttgcgggtacaattaaagatatagttacaagatatgctcaccagagtgggtttcatgttgacagaagatttggatgggattgccatggcttacctgtggaatatgaaattgataagacactgggaatcagaggaccagaggatgtggccaaaatggggattacagagtataacaatcagtgccgagcaattgtgatgagatattctgctgagtggaagtctactgttagcagacttggccgatggattgactttgacaatgactataaaactctgtatccacaattcatggaatcagtctggtgggtcttcaaacaactctatgataaaggccttgtttatagaggtgtgaaagtcatgcccttctctacggcatgtaacactccactttccaacttcgagtcacaccagaattataaggatgttcaagatccttcagtatttgtaactttccctttggaagaagatgaaactgtatctttagttgcttggacaaccactccctggactctacctagtaaccttgctgtgtgtgttaatccagaaatgcaatatgtgaaaattaaagatgttgccagaggacgattactcattttaatggaagccagattgtcagccctctataaattggagagtgactatgagatccttgaaagatttcctggtgcctatcttaaaggcaagaagtacaggcccctgtttgactatttcctgaagtgtaaagagaatggcgctttcactgtgcttgttgacaactatgtgaaggaagaagaaggcacaggggttgtccaccaagctccttacttcggtgctgaggactatcgggtctgtatggactttaacattattcggaaagactcactccctgtttgccctgtggatgcttcaggctgcttcacaacggaggtgacagatttcgcaggacagtatgtgaaggatgctgacaaaagtatcatcaggactttgaaggaacaaggccgacttctggttgccaccaccttcactcacagctaccctttttgctggagatcagacactcctctaatttacaaagcagtgcccagctggtttgtgcgagtggagaacatggtggaccagctcctaaggaacaatgacctgtgctactgggtcccagagttggtacgagaaaaacgatttggaaattggctgaaagatgcacgtgactggacaatttccagaaacagatactggggcacccccatcccactgtgggtcagcgatgactttgaggaggtggtatgcattgggtcagtggcggaacttgaagaactgtcaggagcaaagatctcagatctccacagagagagtgttgaccacctgaccattccttcacgctgtgggaagggatccttgcaccgcatctctgaagtgtttgactgttggtttgagagtggcagcatgccctatgctcaggttcattacccgtttgaaaacaagagggagtttgaggatgcttttcctgcagatttcattgccgagggcatcgaccaaaccagaggatggttttataccctgctggtgctggccacggccctctttggacaaccgcctttcaagaacgtaattgtgaatgggcttgtcctggcaagtgatggccaaaaaatgagcaaacggaaaaagaattatccagatccagtttccatcatccagaagtatggtgctgatgccctcagattatatctgattaactcccctgtggtgagagcagaaaacctccgctttaaagaagagggtgtgcgggacgtccttaaggatgtactgctcccatggtacaatgcctatcgcttcttaatccagaacgttctgaggctccagaaggtatgggctgtagggggctgcacatgtacctgccgtgtctccacagcgctcccttcaccaagctgtgaggtggagctctgtgtgagactttagggctgctgttctctgctgcctgatgctggggtaacttagagccatggggaggccatacatgcaggtgcggaaggtatctagggtccgggctatgccaagaccatgggccctagcctgcaaaagagttatgtcatatagttgtttagtcgccagttgttgtttttgtttttgaggtggagtctcagtcttgtcacccagactggattgcaatagcacgatctcgccactgcactccagcttgggcaatagcaagactccatctcaaaataaaataaaataaaacttagagcaaagtttaaaactgagtattcatattaagtgttttattttccatattagagatgggaagggaaccttatgtgtattttattttgttttcaaccatcaataaagttttatctagaaa

SEQ ID NO: 414194 - DNA, 1171 bp, Homo sapiens
catgattgctgtctttctcaactgatataccatgtgacccaaagtccccatcctaaatcatatacttggtctttctgtcctggccagcactaccctgaattgtctcattagcaacaactgtcaggtttggtgaacatacccaccatgagaaacaaagattcctaccaggaaattccaaggatttagaggttcacctcaggagctgggacaaaaggcagaactcttaggataaggccaaattccttactacacaagcagttaacatttttttaaatattcacccccaataggtaaaatactgattttttttcaactttttctttccattctagaaaaaattacagaagacatccccgtgaagactttgaatatgaagactgtgtatgtttctgtgttaccaacaacagcagacttctagcatgtacttatcaatgttgttcggtcagcccttccctaattacacctatcccctacacatacatgcacatagacacacacatgaacacactgaagatatttccttcaggtgtgtttgagacctcacagtaatcttcacacttaaccttagacacctatgcagtcatgttgggagcaggttacaatgttacttcagcccacagtttatttctatacttgagttcttaagtacagaagatagaagtgatttaaatggcatagtatatatatcattttctggccttttaaaatttatttgagacctcttgatgaaatggacatattatatatttctgccacctggattttcctggataatttgatggaatattttaagtttcagtaaatcagaacaataaacaaactcagatataaatgtgttgaaagtaattcattctcccatagataaatgaaacttgaaatgtgtaaactttgaagaacataaaaacttcatggtggtttcttattaagacagtggactagacatctaataaaacttctttccaaaaaaagaaaaaaaatgggcctcgtggcctaagggtggagctctggggccgttcccttagggagggtaattatggagcctgctactagactcctgcgctgggcgttcgcgtggggaagcggatcaatttcctaaagggggatacggtatcccgaatcgggggaatcccggaaaacatggaggcaagggcccaaagggcgaacggtaagg

SEQ ID NO: 414195 - DNA, 887 bp, Homo sapiens
agcgcgttgcatcacctccgtgcgcccggttgcagcgtggacgccggatgagttgcttttaggcttgctggcccgcggggctgtccaggcacgcgaggcccctcagcaacaaaatgcttcaacaagttccagaaaacataaattttcctgctgaagaagagaaaatcttggagttttggactgaatttaattgttttcaggaatgcttaaagcaatcaaaacataaaccaaaatttaccttctatgatggtcctccttttgcaactggactgcctcactatggacatatacttgcgggtacaattaaagatatagttacaagatatgctcaccagagtgggtttcatgttgacagaagatttggatgggattgccatggcttacctgtggaatatgaaattgataagacactgggaatcagaggaccagaggatgtggccaaaatggggattacagagtataacaatcagtgccgagcaattgtgatgagatattctgctgagtggaaggtatgttgggtttttttcagtagaatgaacagcaaatgtagttactaaatgggcattgaaatggtttatggtcccttgtgctttttttattaatttattttttgtagaaaaagtgttagcttccaccttcaaccctattacttaaacggttagcttaaactgaaccatctctcttctgacttctgtgtgcttaattggtctaactttcttgcatgatcaccaatagggaaaaattctaataagtataacatgatatataggccttttctttttttctcaaatacttttttcaatttttttaacttttcattttgaaataatttgacttattaaacaattgaaaaagtagtatgatgggttcccctatatccttcatcc

SEQ ID NO: 414196 - DNA, 201 bp, Homo sapiens
aagagaattggaataattatttaatcatgtttaatagataactttttcttcttgtcatcaaaatgaattcactaggcgagatgcagtggatcattcctgaaatctaccacttttggaagccaaggtgagaggattgcttgaggccaagagttcaagactaaccttgccaacataataagatcctgcctcaattaaaaaaaa

SEQ ID NO: 414197 - DNA, 212 bp, Homo sapiens
caaaaaaacttatggatgtttttaagagaattggaataattatttaatcatgtttaatagataactttttcttcttgtcatcaaaatgaattcactaggcgagatgcagtggatcattcctgaaatctaccacttttggaagccaaggtgagaggattgcttgaggccaagagttcaagactaaccttgccaacataataagatcctgcctc

SEQ ID NO: 414198 - DNA, 2389 bp, Homo sapiens
ccaagttcaattcttaagacattcctgtcttatttcttctaaaatttcacctttaaaatgatgttttcaaagtatggttgaatgtttaatgtgctcaaacactttttctgcaactagggatgaaataatataatttctttctttaaactctgaatgtgatgaatcatattaattcatgtgattagtattttagtataaaccatctcaggcatataaaatagtataaaagaataccttgtacccactacttagcttaagtgaacatccatgtaccctgtacttaagaaatagaacattacagacctgtctgaagacctcacccctgcatagtcttccctgaatgaattccccattaccattatcctaaattttgttttaacttttctcatttttttcttacaatatacattgatgcattctctagtgatagattactttgaattcccaaaataaacccaactagttcatgatagtacatgtcatattaataatcttcctatcataatgcaaaattcctaaaagaaaaaaattagcaggcttgatccagctttcatcctttctggaatatttggtagtactcaaaacttgaaagaaaaacaccataggatctggtctgtccttccttcctttcttcctcttagtagctttactttctttttatttgatctagtatcctttgaaagaaattgtggttatccatcaagatccagaagctcttaaagatatcaagtctttggagaagtatatcattgaggaactcaatgttcgaaaagttacactgtctacagataaaaacaagtatggcattcggctaagggcagaaccagatcacatggtcctggggaagcgtctgaagggagcctttaaggcagtgatgacgtccatcaagcagttgagcagtgaggagctggagcagttccagaagactgggaccattgttgtggaaggccatgaattgcacgatgaagacatccgcctcatgtacacctttgatcaggccacaggtgggactgcgcaatttgaagcacactcagatgctcaggctttggtcctcttagatgtcactcctgaccagtcaatggtagatgaaggaatggctcgggaagtcatcaatcgcatacagaaacttcgcaaaaagtgcaatctggttccaactgatgaaatcacagtgtactataaagcaaagtctgaaggaacatatctgaatagtgttattgaaagccacacagagttcatatttaccaccataaaggctcccttgaaaccatatccagtttctccatcggataaagtccttattcaagaaaaaacacagttgaagggatctgaactggaaattacactcaccagaggatcttcccttcctggtcctgcttgtgcatatgtcaatcttaacatttgtgcaaatggcagtgaacaaggtggagtattgctcctggaaaatccaaaaggtgacaataggttggaccttttaaagctgaagagtgttgtcactagcatttttggtgtgaaaaatacagagctggctgtcttccatgatgaaacagaaatacaaaaccaaactgacttactgagtcttagtggaaaaacactttgtgtgactgcaggatcggctccctctctgatcaacagttctagtactcttctttgtcagtatatcaacctacagctcctgaatgcaaagccacaagagtgtttaatggggacagtgggcactctcctgcttgaaaacccacttgggcagaatggactcacccaccaaggtcttctgtatgaagcagccaaggtgtttggccttcggagcaggaagctaaagctgtttctgaatgagacccaaacgcaggaaattacagaagacatccccgtgaagactttgaatatgaagactgtgtatgtttctgtgttaccaacaacagcagacttctagcatgtacttatcaatgttgttcggtcagcccttccctaattacacctatcccctacacatacatgcacatagacacacacatgaacacactgaagatatttccttcaggtgtgtgtaaaatatgctgcttggattgaaattcaaatgggattgattagtcaagtaacttgagacctcacagtaatcttcacacttaaccttagacacctatgcagtcatgttgggagcaggttacaatgttacttcagcccacagtttatttctatacttgagttcttaagtacagaagatagaagtgatttaaatggcatagtatatatatcattttctggccttttaaaatttatttgagacctcttgatgaaatggacatattatatatttctgccacctggattttcctggataatttgatggaatattttaagtttcagtaaatcagaacaataaacaaactcagat

SEQ ID NO: 414199 - DNA, 4708 bp, Homo sapiens
agcgcgttgcatcacctccgtgcgcccggttgcagcgtggacgccggatgagttgcttttaggcttgctggcccgcggggctgtccaggcacgcgaggcccctcagcaacaaaatgcttcaacaagttccagaaaacataaattttcctgctgaagaagagaaaatcttggagttttggactgaatttaattgttttcaggaatgcttaaagcaatcaaaacataaaccaaaatttaccttctatgatggtcctccttttgcaactggactgcctcactatggacatatacttgcgggtacaattaaagatatagttacaagatatgctcaccagagtgggtttcatgttgacagaagatttggatgggattgccatggcttacctgtggaatatgaaattgataagacactgggaatcagaggaccagaggatgtggccaaaatggggattacagagtataacaatcagtgccgagcaattgtgatgagatattctgctgagtggaagtctactgttagcagacttggccgatggattgactttgacaatgactataaaactctgtatccacaattcatggaatcagtctggtgggtcttcaaacaactctatgataaaggccttgtttatagaggtgtgaaagtcatgcccttctctacggcatgtaacactccactttccaacttcgagtcacaccagaattataaggatgttcaagatccttcagtatttgtaactttccctttggaagaagatgaaactgtatctttagttgcttggacaaccactccctggactctacctagtaaccttgctgtgtgtgttaatccagaaatgcaatatgtgaaaattaaagatgttgccagaggacgattactcattttaatggaagccagattgtcagccctctataaattggagagtgactatgagatccttgaaagatttcctggtgcctatcttaaaggcaagaagtacaggcccctgtttgactatttcctgaagtgtaaagagaatggcgctttcactgtgcttgttgacaactatgtgaaggaagaagaaggcacaggggttgtccaccaagctccttacttcggtgctgaggactatcgggtctgtatggactttaacattattcggaaagactcactccctgtttgccctgtggatgcttcaggctgcttcacaacggaggtgacagatttcgcaggacagtatgtgaaggatgctgacaaaagtatcatcaggactttgaaggaacaaggccgacttctggttgccaccaccttcactcacagctaccctttttgctggagatcagacactcctctaatttacaaagcagtgcccagctggtttgtgcgagtggagaacatggtggaccagctcctaaggaacaatgacctgtgctactgggtcccagagttggtacgagaaaaacgatttggaaattggctgaaagatgcacgtgactggacaatttccagaaacagatactggggcacccccatcccactgtgggtcagcgatgactttgaggaggtggtatgcattgggtcagtggcggaacttgaagaactgtcaggagcaaagatctcagatctccacagagagagtgttgaccacctgaccattccttcacgctgtgggaagggatccttgcaccgcatctctgaagtgtttgactgttggtttgagagtggcagcatgccctatgctcaggttcattacccgtttgaaaacaagagggagtttgaggatgcttttcctgcagatttcattgccgagggcatcgaccaaaccagaggatggttttataccctgctggtgctggccacggccctctttggacaaccgcctttcaagaacgtaattgtgaatgggcttgtcctggcaagtgatggccaaaaaatgagcaaacggaaaaagaattatccagatccagtttccatcatccagaagtatggtgctgatgccctcagattatatctgattaactcccctgtggtgagagcagaaaacctccgctttaaagaagagggtgtgcgggacgtccttaaggatgtactgctcccatggtacaatgcctatcgcttcttaatccagaacgttctgaggctccagaaggaggaagaaatagaatttctctacaatgagaacacggttagagaaagccccaacattacagaccggtggatcctgtccttcatgcagtctctcattggcttctttgagactgaaatggcagcttataggctttatactgtggtgcctcgcctggtcaagtttgtagatattctgaccaattggtatgttagaatgaaccgcagaagattaaagggtgaaaatgggatggaggattgtgtcatggccctagaaaccttgtttagtgttctgctttctctttgcagacttatggctccctacacaccttttctcactgaattgatgtaccagaatctaaaggtgctgattgaccctgtttctgttcaggacaaggacacactcagcattcactacctcatgctgccccgtgttcgagaagaattgattgacaagaaaacagagagtgcagtatctcagatgcagtctgtgattgaacttggaagagtgatcagagaccgaaaaactattcccataaagtatcctttgaaagaaattgtggttatccatcaagatccagaagctcttaaagatatcaagtctttggagaagtatatcattgaggaactcaatgttcgaaaagttacactgtctacagataaaaacaagtatggcattcggctaagggcagaaccagatcacatggtcctggggaagcgtctgaagggagcctttaaggcagtgatgacgtccatcaagcagttgagcagtgaggagctggagcagttccagaagactgggaccattgttgtggaaggccatgaattgcacgatgaagacatccgcctcatgtacacctttgatcaggccacaggtgggactgcgcaatttgaagcacactcagatgctcaggctttggtcctcttagatgtcactcctgaccagtcaatggtagatgaaggaatggctcgggaagtcatcaatcgcatacagaaacttcgcaaaaagtgcaatctggttccaactgatgaaatcacagtgtactataaagcaaagtctgaaggaacatatctgaatagtgttattgaaagccacacagagttcatatttaccaccataaaggctcccttgaaaccatatccagtttctccatcggataaagtccttattcaagaaaaaacacagttgaagggatctgaactggaaattacactcaccagaggatcttcccttcctggtcctgcttgtgcatatgtcaatcttaacatttgtgcaaatggcagtgaacaaggtggagtattgctcctggaaaatccaaaaggtgacaataggttggaccttttaaagctgaagagtgttgtcactagcatttttggtgtgaaaaatacagagctggctgtcttccatgatgaaacagaaatacaaaaccaaactgacttactgagtcttagtggaaaaacactttgtgtgactgcaggatcggctccctctctgatcaacagttctagtactcttctttgtcagtatatcaacctacagctcctgaatgcaaagccacaagagtgtttaatggggacagtgggcactctcctgcttgaaaacccacttgggcagaatggactcacccaccaaggtcttctgtatgaagcagccaaggtgtttggccttcggagcaggaagctaaagctgtttctgaatgagacccaaacgcaggaaattacagaagacatccccgtgaagactttgaatatgaagactgtgtatgtttctgtgttaccaacaacagcagacttctagcatgtacttatcaatgttgttcggtcagcccttccctaattacacctatcccctacacatacatgcacatagacacacacatgaacacactgaagatatttccttcaggtgtgtgtaaaatatgctgcttggattgaaattcaaatgggattgattagtcaagtaacttgagacctcacagtaatcttcacacttaaccttagacacctatgcagtcatgttgggagcaggttacaatgttacttcagcccacagtttatttctatacttgagttcttaagtacagaagatagaagtgatttaaatggcatagtatatatatcattttctggccttttaaaatttatttgagacctcttgatgaaatggacatattatatatttctgccacctggattttcctggataatttgatggaatattttaagtttcagtaaatcagaacaataaacaaactcagatataaatgtgttgaaagtaattcattctcccatagataaatgaaacttgaaatgtgtaaactttgaagaacataaaaacttcatggtggtttcttattaagacagtggactagacatctaataaaacttctttccaaaaaaagaaaaaaaatgggcctcgtggcctaagggtggagctctggggccgttcccttagggagggtaattatggagcctgctactagactcctgcgctgggcgttcgcgtggggaagcggatcaatttcctaaagggggatacggtatcccgaatcgggggaatcccggaaaacatggaggcaagggcccaaagggcgaacggtaagg

SEQ ID NO: 414200 - DNA, 3391 bp, Homo sapiens
agcgcgttgcatcacctccgtgcgcccggttgcagcgtggacgccggatgagttgcttttaggcttgctggcccgcggggctgtccaggcacgcgaggcccctcagcaacaaaatgcttcaacaagttccagaaaacataaattttcctgctgaagaagagaaaatcttggagttttggactgaatttaattgttttcaggaatgcttaaagcaatcaaaacataaaccaaaatttaccttctatgatggtcctccttttgcaactggactgcctcactatggacatatacttgcgggtacaattaaagatatagttacaagatatgctcaccagagtgggtttcatgttgacagaagatttggatgggattgccatggcttacctgtggaatatgaaattgataagacactgggaatcagaggaccagaggatgtggccaaaatggggattacagagtataacaatcagtgccgagcaattgtgatgagatattctgctgagtggaagtctactgttagcagacttggccgatggattgactttgacaatgactataaaactctgtatccacaattcatggaatcagtctggtgggtcttcaaacaactctatgataaaggccttgtttatagaggtgtgaaagtcatgcccttctctacggcatgtaacactccactttccaacttcgagtcacaccagaattataaggatgttcaagatccttcagtatttgtaactttccctttggaagaagatgaaactgtatctttagttgcttggacaaccactccctggactctacctagtaaccttgctgtgtgtgttaatccagaaatgcaatatgtgaaaattaaagatgttgccagaggacgattactcattttaatggaagccagattgtcagccctctataaattggagagtgactatgagatccttgaaagatttcctggtgcctatcttaaaggcaagaagtacaggcccctgtttgactatttcctgaagtgtaaagagaatggcgctttcactgtgcttgttgacaactatgtgaaggaagaagaaggcacaggggttgtccaccaagctccttacttcggtgctgctccctacacaccttttctcactgaattgatgtaccagaatctaaaggtgctgattgaccctgtttctgttcaggacaaggacacactcagcattcactacctcatgctgccccgtgttcgagaagaattgattgacaagaaaacagagagtgcagtatctcagatgcagtctgtgattgaacttggaagagtgatcagagaccgaaaaactattcccataaagtatcctttgaaagaaattgtggttatccatcaagatccagaagctcttaaagatatcaagtctttggagaagtatatcattgaggaactcaatgttcgaaaagttacactgtctacagataaaaacaagtatggcattcggctaagggcagaaccagatcacatggtcctggggaagcgtctgaagggagcctttaaggcagtgatgacgtccatcaagcagttgagcagtgaggagctggagcagttccagaagactgggaccattgttgtggaaggccatgaattgcacgatgaagacatccgcctcatgtacacctttgatcaggccacaggtgggactgcgcaatttgaagcacactcagatgctcaggctttggtcctcttagatgtcactcctgaccagtcaatggtagatgaaggaatggctcgggaagtcatcaatcgcatacagaaacttcgcaaaaagtgcaatctggttccaactgatgaaatcacagtgtactataaagcaaagtctgaaggaacatatctgaatagtgttattgaaagccacacagagttcatatttaccaccataaaggctcccttgaaaccatatccagtttctccatcggataaagtccttattcaagaaaaaacacagttgaagggatctgaactggaaattacactcaccagaggatcttcccttcctggtcctgcttgtgcatatgtcaatcttaacatttgtgcaaatggcagtgaacaaggtggagtattgctcctggaaaatccaaaaggtgacaataggttggaccttttaaagctgaagagtgttgtcactagcatttttggtgtgaaaaatacagagctggctgtcttccatgatgaaacagaaatacaaaaccaaactgacttactgagtcttagtggaaaaacactttgtgtgactgcaggatcggctccctctctgatcaacagttctagtactcttctttgtcagtatatcaacctacagctcctgaatgcaaagccacaagagtgtttaatggggacagtgggcactctcctgcttgaaaacccacttgggcagaatggactcacccaccaaggtcttctgtatgaagcagccaaggtgtttggccttcggagcaggaagctaaagctgtttctgaatgagacccaaacgcaggaaattacagaagacatccccgtgaagactttgaatatgaagactgtgtatgtttctgtgttaccaacaacagcagacttctagcatgtacttatcaatgttgttcggtcagcccttccctaattacacctatcccctacacatacatgcacatagacacacacatgaacacactgaagatatttccttcaggtgtgtgtaaaatatgctgcttggattgaaattcaaatgggattgattagtcaagtaacttgagacctcacagtaatcttcacacttaaccttagacacctatgcagtcatgttgggagcaggttacaatgttacttcagcccacagtttatttctatacttgagttcttaagtacagaagatagaagtgatttaaatggcatagtatatatatcattttctggccttttaaaatttatttgagacctcttgatgaaatggacatattatatatttctgccacctggattttcctggataatttgatggaatattttaagtttcagtaaatcagaacaataaacaaactcagatataaatgtgttgaaagtaattcattctcccatagataaatgaaacttgaaatgtgtaaactttgaagaacataaaaacttcatggtggtttcttattaagacagtggactagacatctaataaaacttctttccaaaaaaagaaaaaaaatgggcctcgtggcctaagggtggagctctggggccgttcccttagggagggtaattatggagcctgctactagactcctgcgctgggcgttcgcgtggggaagcggatcaatttcctaaagggggatacggtatcccgaatcgggggaatcccggaaaacatggaggcaagggcccaaagggcgaacggtaagg

SEQ ID NO: 414201 - DNA, 2851 bp, Homo sapiens
acagtgtaatacaatggaaagaagttgggcattgttgatgctgtcaaattgcacagctccgtgtaaatggcacttcctacagttgtgtagtgggcagtcttggactttgatccacacatactggagtttttggcttttctcactgaccaatgggaattcgcatgtggctcacatggtgatttttttgtgtgcacccctaaacactctgactgccatgtagcacatcctcaacaaacagtcattatgtgattgattcattttggttcttttctccttagtaagtggaggcacttggatggaaggagctgccccttctttgttgtatccaaccctctccccaccccagatgcctggtaacccacttgctgcctgattgacttgtcttacttttagcttataggctttatactgtggtgcctcgcctggtcaagtttgtagatattctgaccaattggtatgttagaatgaaccgcagaagattaaagggtgaaaatgggatggaggattgtgtcatggccctagaaaccttgtttagtgttctgctttctctttgcagacttatggctccctacacaccttttctcactgaattgatgtaccagaatctaaaggtgctgattgaccctgtttctgttcaggacaaggacacactcagcattcactacctcatgctgccccgtgttcgagaagaattgattgacaagaaaacagagagtgcagtatctcagatgcagtctgtgattgaacttggaagagtgatcagagaccgaaaaactattcccataaagtatcctttgaaagaaattgtggttatccatcaagatccagaagctcttaaagatatcaagtctttggagaagtatatcattgaggaactcaatgttcgaaaagttacactgtctacagataaaaacaagtatggcattcggctaagggcagaaccagatcacatggtcctggggaagcgtctgaagggagcctttaaggcagtgatgacgtccatcaagcagttgagcagtgaggagctggagcagttccagaagactgggaccattgttgtggaaggccatgaattgcacgatgaagacatccgcctcatgtacacctttgatcaggccacaggtgggactgcgcaatttgaagcacactcagatgctcaggctttggtcctcttagatgtcactcctgaccagtcaatggtagatgaaggaatggctcgggaagtcatcaatcgcatacagaaacttcgcaaaaagtgcaatctggttccaactgatgaaatcacagtgtactataaagcaaagtctgaaggaacatatctgaatagtgttattgaaagccacacagagttcatatttaccaccataaaggctcccttgaaaccatatccagtttctccatcggataaagtccttattcaagaaaaaacacagttgaagggatctgaactggaaattacactcaccagaggatcttcccttcctggtcctgcttgtgcatatgtcaatcttaacatttgtgcaaatggcagtgaacaaggtggagtattgctcctggaaaatccaaaaggtgacaataggttggaccttttaaagctgaagagtgttgtcactagcatttttggtgtgaaaaatacagagctggctgtcttccatgatgaaacagaaatacaaaaccaaactgacttactgagtcttagtggaaaaacactttgtgtgactgcaggatcggctccctctctgatcaacagttctagtactcttctttgtcagtatatcaacctacagctcctgaatgcaaagccacaagagtgtttaatggggacagtgggcactctcctgcttgaaaacccacttgggcagaatggactcacccaccaaggtcttctgtatgaagcagccaaggtgtttggccttcggagcaggaagctaaagctgtttctgaatgagacccaaacgcaggaaattacagaagacatccccgtgaagactttgaatatgaagactgtgtatgtttctgtgttaccaacaacagcagacttctagcatgtacttatcaatgttgttcggtcagcccttccctaattacacctatcccctacacatacatgcacatagacacacacatgaacacactgaagatatttccttcaggtgtgtgtaaaatatgctgcttggattgaaattcaaatgggattgattagtcaagtaacttgagacctcacagtaatcttcacacttaaccttagacacctatgcagtcatgttgggagcaggttacaatgttacttcagcccacagtttatttctatacttgagttcttaagtacagaagatagaagtgatttaaatggcatagtatatatatcattttctggccttttaaaatttatttgagacctcttgatgaaatggacatattatatatttctgccacctggattttcctggataatttgatggaatattttaagtttcagtaaatcagaacaataaacaaactcagatataaatgtgttgaaagtaattcattctcccatagataaatgaaacttgaaatgtgtaaactttgaagaacataaaaacttcatggtggtttcttattaagacagtggactagacatctaataaaacttctttccaaaaaaagaaaaaaaatgggcctcgtggcctaagggtggagctctggggccgttcccttagggagggtaattatggagcctgctactagactcctgcgctgggcgttcgcgtggggaagcggatcaatttcctaaagggggatacggtatcccgaatcgggggaatcccggaaaacatggaggcaagggcccaaagggcgaacggtaagg

SEQ ID NO: 414202 - DNA, 4645 bp, Homo sapiens
agcgcgttgcatcacctccgtgcgcccggttgcagcgtggacgccggatgagttgcttttaggcttgctggcccgcggggctgtccaggcacgcgaggcccctcagcaacaaaatgcttcaacaagttccagaaaacataaattttcctgctgaagaagagaaaatcttggagttttggactgaatttaattgttttcaggaatgcttaaagcaatcaaaacataaaccaaaatttaccttctatgatggtcctccttttgcaactggactgcctcactatggacatatacttgcgggtacaattaaagatatagttacaagatatgctcaccagagtgggtttcatgttgacagaagatttggatgggattgccatggcttacctgtggaatatgaaattgataagacactgggaatcagaggaccagaggatgtggccaaaatggggattacagagtataacaatcagtgccgagcaattgtgatgagatattctgctgagtggaagtctactgttagcagacttggccgatggattgactttgacaatgactataaaactctgtatccacaattcatggaatcagtctggtgggtcttcaaacaactctatgataaaggccttgtttatagaggtgtgaaagtcatgcccttctctacggcatgtaacactccactttccaacttcgagtcacaccagaattataaggatgttcaagatccttcagtatttgtaactttccctttggaagaagatgaaactgtatctttagttgcttggacaaccactccctggactctacctagtaaccttgctgtgtgtgttaatccagaaatgcaatatgtgaaaattaaagatgttgccagaggacgattactcattttaatggaagccagattgtcagccctctataaattggagagtgactatgagatccttgaaagatttcctggtgcctatcttaaaggcaagaagtacaggcccctgtttgactatttcctgaagtgtaaagagaatggcgctttcactgtgcttgttgacaactatgtgaaggaagaagaaggcacaggggttgtccaccaagctccttacttcggtgctgaggactatcgggtctgtatggactttaacattattcggaaagactcactccctgtttgccctgtggatgcttcaggctgcttcacaacggaggtgacagatttcgcaggacagtatgtgaaggatgctgacaaaagtatcatcaggactttgaaggaacaaggccgacttctggttgccaccaccttcactcacagctaccctttttgctggagatcagacactcctctaatttacaaagcagtgcccagctggtttgtgcgagtggagaacatggtggaccagctcctaaggaacaatgacctgtgctactgggtcccagagttggtacgagaaaaacgatttggaaattggctgaaagatgcacgtgactggacaatttccagaaacagatactggggcacccccatcccactgtgggtcagcgatgactttgaggaggtggtatgcattgggtcagtggcggaacttgaagaactgtcaggagcaaagatctcagatctccacagagagagtgttgaccacctgaccattccttcacgctgtgggaagggatccttgcaccgcatctctgaagtgtttgactgttggtttgagagtggcagcatgccctatgctcaggttcattacccgtttgaaaacaagagggagtttgaggatgcttttcctgcagatttcattgccgagggcatcgaccaaaccagaggatggttttataccctgctggtgctggccacggccctctttggacaaccgcctttcaagaacgtaattgtgaatgggcttgtcctggcaagtgatggccaaaaaatgagcaaacggaaaaagaattatccagatccagtttccatcatccagaagtatggtgctgatgccctcagattatatctgattaactcccctgtggtgagagcagaaaacctccgctttaaagaagagggtgtgcgggacgtccttaaggatgtactgctcccatggtacaatgcctatcgcttcttaatccagaacgttctgaggctccagaaggaggaagaaatagaatttctctacaatgagaacacggttagagaaagccccaacattacagaccggtggatcctgtccttcatgcagtctctcattggcttctttgagactgaaatggcagcttataggctttatactgtggtgcctcgcctggtcaagtttgtagatattctgaccaattggtatgttagaatgaaccgcagaagattaaagggtgaaaatgggatggaggattgtgtcatggccctagaaaccttgtttagtgttctgctttctctttgcagacttatggctccctacacaccttttctcactgaattgatgtaccagaatctaaaggtgctgattgaccctgtttctgttcaggacaaggacacactcagcattcactacctcatgctgccccgtgttcgagaagaattgattgacaagaaaacagagagtgcagtatctcagatgcagtctgtgattgaacttggaagagtgatcagagaccgaaaaactattcccataaagtatcctttgaaagaaattgtggttatccatcaagatccagaagctcttaaagatatcaagtctttggagaagtatatcattgaggaactcaatgttcgaaaagttacactgtctacagataaaaacaagtatggcattcggctaagggcagaaccagatcacatggtcctggggaagcgtctgaagggagcctttaaggcagtgatgacgtccatcaagcagttgagcagtgaggagctggagcagttccagaagactgggaccattgttgtggaaggccatgaattgcacgatgaagacatccgcctcatgtacacctttgatcaggccacaggtgggactgcgcaatttgaagcacactcagatgctcaggctttggtcctcttagatgtcactcctgaccagtcaatggtagatgaaggaatggctcgggaagtcatcaatcgcatacagaaacttcgcaaaaagtgcaatctggttccaactgatgaaatcacagtgtactataaagcaaagtctgaaggaacatatctgaatagtgttattgaaagccacacagagttcatatttaccaccataaaggctcccttgaaaccatatccagtttctccatcggataaagtccttattcaagaaaaaacacagttgaagggatctgaactggaaattacactcaccagaggatcttcccttcctggtcctgcttgtgcatatgtcaatcttaacatttgtgcaaatggcagtgaacaaggtggagtattgctcctggaaaatccaaaaggtgacaataggttggaccttttaaagctgaagagtgttgtcactagcatttttggtgtgaaaaatacagagctggctgtcttccatgatgaaacagcggctccctctctgatcaacagttctagtactcttctttgtcagtatatcaacctacagctcctgaatgcaaagccacaagagtgtttaatggggacagtgggcactctcctgcttgaaaacccacttgggcagaatggactcacccaccaaggtcttctgtatgaagcagccaaggtgtttggccttcggagcaggaagctaaagctgtttctgaatgagacccaaacgcaggaaattacagaagacatccccgtgaagactttgaatatgaagactgtgtatgtttctgtgttaccaacaacagcagacttctagcatgtacttatcaatgttgttcggtcagcccttccctaattacacctatcccctacacatacatgcacatagacacacacatgaacacactgaagatatttccttcaggtgtgtgtaaaatatgctgcttggattgaaattcaaatgggattgattagtcaagtaacttgagacctcacagtaatcttcacacttaaccttagacacctatgcagtcatgttgggagcaggttacaatgttacttcagcccacagtttatttctatacttgagttcttaagtacagaagatagaagtgatttaaatggcatagtatatatatcattttctggccttttaaaatttatttgagacctcttgatgaaatggacatattatatatttctgccacctggattttcctggataatttgatggaatattttaagtttcagtaaatcagaacaataaacaaactcagatataaatgtgttgaaagtaattcattctcccatagataaatgaaacttgaaatgtgtaaactttgaagaacataaaaacttcatggtggtttcttattaagacagtggactagacatctaataaaacttctttccaaaaaaagaaaaaaaatgggcctcgtggcctaagggtggagctctggggccgttcccttagggagggtaattatggagcctgctactagactcctgcgctgggcgttcgcgtggggaagcggatcaatttcctaaagggggatacggtatcccgaatcgggggaatcccggaaaacatggaggcaagggcccaaagggcgaacggtaagg

SEQ ID NO: 414203 - DNA, 1749 bp, Homo sapiens
agcgcgttgcatcacctccgtgcgcccggttgcagcgtggacgccggatgagttgcttttaggcttgctggcccgcggggctgtccaggcacgcgaggcccctcaggctccctacacaccttttctcactgaattgatgtaccagaatctaaaggtgctgattgaccctgtttctgttcaggacaaggacacactcagcattcactacctcatgctgccccgtgttcgagaagaattgattgacaagaaaacagagagtgcagtatctcagatgcagtctgtgattgaacttggaagagtgatcagagaccgaaaaactattcccataaagttgaagggatctgaactggaaattacactcaccagaggatcttcccttcctggtcctgcttgtgcatatgtcaatcttaacatttgtgcaaatggcagtgaacaaggtggagtattgctcctggaaaatccaaaaggtgacaataggttggaccttttaaagctgaagagtgttgtcactagcatttttggtgtgaaaaatacagagctggctgtcttccatgatgaaacagaaatacaaaaccaaactgacttactgagtcttagtggaaaaacactttgtgtgactgcaggatcggctccctctctgatcaacagttctagtactcttctttgtcagtatatcaacctacagctcctgaatgcaaagccacaagagtgtttaatggggacagtgggcactctcctgcttgaaaacccacttgggcagaatggactcacccaccaaggtcttctgtatgaagcagccaaggtgtttggccttcggagcaggaagctaaagctgtttctgaatgagacccaaacgcaggaaattacagaagacatccccgtgaagactttgaatatgaagactgtgtatgtttctgtgttaccaacaacagcagacttctagcatgtacttatcaatgttgttcggtcagcccttccctaattacacctatcccctacacatacatgcacatagacacacacatgaacacactgaagatatttccttcaggtgtgtgtaaaatatgctgcttggattgaaattcaaatgggattgattagtcaagtaacttgagacctcacagtaatcttcacacttaaccttagacacctatgcagtcatgttgggagcaggttacaatgttacttcagcccacagtttatttctatacttgagttcttaagtacagaagatagaagtgatttaaatggcatagtatatatatcattttctggccttttaaaatttatttgagacctcttgatgaaatggacatattatatatttctgccacctggattttcctggataatttgatggaatattttaagtttcagtaaatcagaacaataaacaaactcagatataaatgtgttgaaagtaattcattctcccatagataaatgaaacttgaaatgtgtaaactttgaagaacataaaaacttcatggtggtttcttattaagacagtggactagacatctaataaaacttctttccaaaaaaagaaaaaaaatgggcctcgtggcctaagggtggagctctggggccgttcccttagggagggtaattatggagcctgctactagactcctgcgctgggcgttcgcgtggggaagcggatcaatttcctaaagggggatacggtatcccgaatcgggggaatcccggaaaacatggaggcaagggcccaaagggcgaacggtaagg

SEQ ID NO: 414204 - DNA, 1568 bp, Homo sapiens
agcgcgttgcatcacctccgtgcgcccggttgcagcgtggacgccggatgagttgcttttaggcttgctggcccgcggggctgtccaggcacgcgaggcccctcaggtacgccctctcttccctgcaggatccggccctcaaagacgagggtcacgcacgcgttacaaccccgaaacagtagcacaagatttaatttttaaaagagcgtgtttcttcggggcttgccgttcgttcgtttccagcctcaggaatttatggtcgcctttttgaatgagcaacaaaatgcttcaacaagttccagaaaacataaattttcctgctgaagaagagaaaatcttggagttttggactgaatttaattgttttcaggaatgcttaaagcaatcaaaacataaaccaaaatttaccttctatgatggtcctccttttgcaactggactgcctcactatggacatatacttgcgggtacaattaaagatatagttacaagatatgctcaccagagtgggtttcatgttgacagaagatttggatgggattgccatggcttacctgtggaatatgaaattgataagacactgggaatcagaggaccagaggatgtggccaaaatggggattacagagtataacaatcagtgccgagcaattgtgatgagatattctgctgagtggaagaaattacagaagacatccccgtgaagactttgaatatgaagactgtgtatgtttctgtgttaccaacaacagcagacttctagcatgtacttatcaatgttgttcggtcagcccttccctaattacacctatcccctacacatacatgcacatagacacacacatgaacacactgaagatatttccttcaggtgtgtgtaaaatatgctgcttggattgaaattcaaatgggattgattagtcaagtaacttgagacctcacagtaatcttcacacttaaccttagacacctatgcagtcatgttgggagcaggttacaatgttacttcagcccacagtttatttctatacttgagttcttaagtacagaagatagaagtgatttaaatggcatagtatatatatcattttctggccttttaaaatttatttgagacctcttgatgaaatggacatattatatatttctgccacctggattttcctggataatttgatggaatattttaagtttcagtaaatcagaacaataaacaaactcagatataaatgtgttgaaagtaattcattctcccatagataaatgaaacttgaaatgtgtaaactttgaagaacataaaaacttcatggtggtttcttattaagacagtggactagacatctaataaaacttctttccaaaaaaagaaaaaaaatgggcctcgtggcctaagggtggagctctggggccgttcccttagggagggtaattatggagcctgctactagactcctgcgctgggcgttcgcgtggggaagcggatcaatttcctaaagggggatacggtatcccgaatcgggggaatcccggaaaacatggaggcaagggcccaaagggcgaacggtaagg

SEQ ID NO: 414205 - DNA, 2340 bp, Homo sapiens
agcgcgttgcatcacctccgtgcgcccggttgcagcgtggacgccggatgagttgcttttaggcttgctggcccgcggggctgtccaggcacgcgaggcccctcagcaacaaaatgcttcaacaagttccagaaaacataaattttcctgctgaagaagagaaaatcttggagttttggactgaatttaattgttttcaggaatgcttaaagcaatcaaaacataaaccaaaatttaccttctatgatggtcctccttttgcaactggactgcctcactatggacatatacttgcgggtacaattaaagatatagttacaagatatgctcaccagagtgggtttcatgttgacagaagatttggatgggattgccatggcttacctgtggaatatgaaattgataagacactgggaatcagaggaccagaggatgtggccaaaatggggattacagagtataacaatcagtgccgagcaattgtgatgagatattctgctgagtggaagtctactgttagcagacttggccgatggattgactttgacaatgactataaaactctgtatccacaattcatggaatcagtctggtgggtcttcaaacaactctatgataaaggccttgtttatagaggtgtgaaagtcatgcccttctctacggcatgtaacactccactttccaacttcgagtcacaccagaattataaggatgttcaagatccttcagtatttgtaactttccctttggaagaagatgaaactgtatctttagttgcttggacaaccactccctggactctacctagtaaccttgctgtgtgtgttaatccagaaatgcaatatgtgaaaattaaagatgttgccagaggacgattactcattttaatggaagccagattgtcagccctctataaattggagagtgactatgagatccttgaaagatttcctggtgcctatcttaaaggcaagaagtacaggcccctgtttgactatttcctgaagtgtaaagagaatggcgctttcactgtgcttgttgacaactatgtgaaggaagaagaaggcacaggggttgtccaccaagctccttacttcggtgctgaggactatcgggtctgtatggactttaacattattcggaaagactcactccctgtttgccctgtggatgcttcaggctgcttcacaacggaggtgacagatttcgcaggacagtatgtgaaggatgctgacaaaagtatcatcaggactttgaaggaacaaggccgacttctggttgccaccaccttcactcacagctaccctttttgctggagatcagacactcctctaatttacaaagcagtgcccagctggtttgtgcgagtggagaacatggtggaccagctcctaaggaacaatgacctgtgctactgggtcccagagttggtacgagaaaaacgatttggaaattggctgaaagatgcacgtgactggacaatttccagaaacagatactggggcacccccatcccactgtgggtcagcgatgactttgaggaggtggtatgcattgggtcagtggcggaacttgaagaactgtcaggagcaaagatctcagatctccacagagagagtgttgaccacctgaccattccttcacgctgtgggaagggatccttgcaccgcatctctgaagtgtttgactgttggtttgagagtggcagcatgccctatgctcaggttcattacccgtttgaaaacaagagggagtttgaggatgcttttcctgcagatttcattgccgagggcatcgaccaaaccagaggatggttttataccctgctggtgctggccacggccctctttggacaaccgcctttcaagaacgtaattgtgaatgggcttgtcctggcaagtgatggccaaaaaatgagcaaacggaaaaagaattatccagatccagtttccatcatccagaagtatggtgctgatgccctcagattatatctgattaactcccctgtggtgagagcagaaaacctccgctttaaagaagagggtgtgcgggacgtccttaaggatgtactgctcccatggtacaatgcctatcgcttcttaatccagaacgttctgaggctccagaaggaggaagaaatagaatttctctacaatgagaacacggttagagaaagccccaacattacagaccggtggatcctgtccttcatgcagtctctcattggcttctttgagactgaaatggcagacttcctcgttctgccatcttcctaacaaggctatggctgataacgcgtgtggtgtggcgggaattaccggcttgggggtcccggtccgg

SEQ ID NO: 414206 - DNA, 2387 bp, Homo sapiens
agcgcgttgcatcacctccgtgcgcccggttgcagcgtggacgccggatgagttgcttttaggcttgctggcccgcggggctgtccaggcacgcgaggcccctcagcaacaaaatgcttcaacaagttccagaaaacataaattttcctgctgaagaagagaaaatcttggagttttggactgaatttaattgttttcaggaatgcttaaagcaatcaaaacataaaccaaaatttaccttctatgatggtcctccttttgcaactggactgcctcactatggacatatacttgcgggtacaattaaagatatagttacaagatatgctcaccagagtgggtttcatgttgacagaagatttggatgggattgccatggcttacctgtggaatatgaaattgataagacactgggaatcagaggaccagaggatgtggccaaaatggggattacagagtataacaatcagtgccgagcaattgtgatgagatattctgctgagtggaagtctactgttagcagacttggccgatggattgactttgacaatgactataaaactctgtatccacaattcatggaatcagtctggtgggtcttcaaacaactctatgataaaggccttgtttatagaggtgtgaaagtcatgcccttctctacggcatgtaacactccactttccaacttcgagtcacaccagaattataaggatgttcaagatccttcagtatttgtaactttccctttggaagaagatgaaactgtatctttagttgcttggacaaccactccctggactctacctagtaaccttgctgtgtgtgttaatccagaaatgcaatatgtgaaaattaaagatgttgccagaggacgattactcattttaatggaagccagattgtcagccctctataaattggagagtgactatgagatccttgaaagatttcctggtgcctatcttaaaggcaagaagtacaggcccctgtttgactatttcctgaagtgtaaagagaatggcgctttcactgtgcttgttgacaactatgtgaaggaagaagaaggcacaggggttgtccaccaagctccttacttcggtgctgaggactatcgggtctgtatggactttaacattattcggaaagactcactccctgtttgccctgtggatgcttcaggctgcttcacaacggaggtgacagatttcgcaggacagtatgtgaaggatgctgacaaaagtatcatcaggactttgaaggaacaaggccgacttctggttgccaccaccttcactcacagctaccctttttgctggagatcagacactcctctaatttacaaagcagtgcccagctggtttgtgcgagtggagaacatggtggaccagctcctaaggaacaatgacctgtgctactgggtcccagagttggtacgagaaaaacgatttggaaattggctgaaagatgcacgtgactggacaatttccagaaacagatactggggcacccccatcccactgtgggtcagcgatgactttgaggaggtggtatgcattgggtcagtggcggaacttgaagaactgtcaggagcaaagatctcagatctccacagagagagtgttgaccacctgaccattccttcacgctgtgggaagggatccttgcaccgcatctctgaagtgtttgactgttggtttgagagtggcagcatgccctatgctcaggttcattacccgtttgaaaacaagagggagtttgaggatgcttttcctgcagatttcattgccgagggcatcgaccaaaccagaggatggttttataccctgctggtgctggccacggccctctttggacaaccgcctttcaagaacgtaattgtgaatgggcttgtcctggcaagtgatggccaaaaaatgagcaaacggaaaaagaattatccagatccagtttccatcatccagaagtatggtgctgatgccctcagattatatctgattaactcccctgtggtgagagcagaaaacctccgctttaaagaagagggtgtgcgggacgtccttaaggatgtactgctcccatggtacaatgcctatcgcttcttaatccagaacgttctgaggctccagaaggaggaagaaatagaatttctctacaatgagaacacggttagagaaagccccaacattacagaccggtggatcctgtccttcatgcagtctctcattggcttctttgagactgaaatggcagcttataggctttatactgtggtgctggcaaaaagtgagctggagattggatcacagccgaagagtaaaggtgctgcaatgatgttagctgtggccactgtggatttttcgcaagaacattaataaactaaaaacttc

SEQ ID NO: 414207 - DNA, 2274 bp, Homo sapiens
agcgcgttgcatcacctccgtgcgcccggttgcagcgtggacgccggatgagttgcttttaggcttgctggcccgcggggctgtccaggcacgcgaggcccctcagcaacaaaatgcttcaacaagttccagaaaacataaattttcctgctgaagaagagaaaatcttggagttttggactgaatttaattgttttcaggaatgcttaaagcaatcaaaacataaaccaaaatttaccttctatgatggtcctccttttgcaactggactgcctcactatggacatatacttgcgggtacaattaaagatatagttacaagatatgctcaccagagtgggtttcatgttgacagaagatttggatgggattgccatggcttacctgtggaatatgaaattgataagacactgggaatcagaggaccagaggatgtggccaaaatggggattacagagtataacaatcagtgccgagcaattgtgatgagatattctgctgagtggaagtctactgttagcagacttggccgatggattgactttgacaatgactataaaactctgtatccacaattcatggaatcagtctggtgggtcttcaaacaactctatgataaaggccttgtttatagaggtgtgaaagtcatgcccttctctacggcatgtaacactccactttccaacttcgagtcacaccagaattataaggatgttcaagatccttcagtatttgtaactttccctttggaagaagatgaaactgtatctttagttgcttggacaaccactccctggactctacctagtaaccttgctgtgtgtgttaatccagaaatgcaatatgtgaaaattaaagatgttgccagaggacgattactcattttaatggaagccagattgtcagccctctataaattggagagtgactatgagatccttgaaagatttcctggtgcctatcttaaaggcaagaagtacaggcccctgtttgactatttcctgaagtgtaaagagaatggcgctttcactgtgcttgttgacaactatgtgaaggaagaagaaggcacaggggttgtccaccaagctccttacttcggtgctgaggactatcgggtctgtatggactttaacattattcggaaagactcactccctgtttgccctgtggatgcttcaggctgcttcacaacggaggtgacagatttcgcaggacagtatgtgaaggatgctgacaaaagtatcatcaggactttgaaggaacaaggccgacttctggttgccaccaccttcactcacagctaccctttttgctggagatcagacactcctctaatttacaaagcagtgcccagctggtttgtgcgagtggagaacatggtggaccagctcctaaggaacaatgacctgtgctactgggtcccagagttggtacgagaaaaacgatttggaaattggctgaaagatgcacgtgactggacaatttccagaaacagatactggggcacccccatcccactgtgggtcagcgatgactttgaggaggtggtatgcattgggtcagtggcggaacttgaagaactgtcaggagcaaagatctcagatctccacagagagagtgttgaccacctgaccattccttcacgctgtgggaagggatccttgcaccgcatctctgaagtgtttgactgttggtttgagagtggcagcatgccctatgctcaggttcattacccgtttgaaaacaagagggagtttgaggatgcttttcctgcagatttcattgccgagggcatcgaccaaaccagaggatggttttataccctgctggtgctggccacggccctctttggacaaccgcctttcaagaacgtaattgtgaatgggcttgtcctggcaagtgatggccaaaaaatgagcaaacggaaaaagaattatccagatccagtttccatcatccagaagtatggtgctgatgccctcagcattatactctgattaactcccctgtggctgagcagcacgcaaaacctccgcctttcacccgcacgcagcgcgctgtgcgcgcgacgctcctttacgcgcactgctcctgcctcccactggctaccaactgccctactcgccttcctctacctccagaaccgcttcctgaggcctcccgcaccggacgcgcacgacacctagcactcttctctacactgagcacccccggctctcccgacagccccatccctccccgacgcgtggcccctgtccttcctgccgcccctca

SEQ ID NO: 414208 - DNA, 437 bp, Homo sapiens
ttttttttttgagacagtctcgctgtgtcaccaggctggagtgtagtgctgtgatcttggctcactgcatcctccgcctcctgagttcaagtgattctcctacctcagcctcccaagtagctgggactacaggcacctgccaccacacccagctaattttttgtttttagtagagacggggtttcaccatgttggccaggatggtctccatctcttgacctcataatccgcccgcctcggcctcccaaagtgctgggattacaggtgtgagccactgcaccaggcctgtaatttatatattgttttagtttgttgctagtgcttttggtttcatatctaagaatccattgtcaatccagagtcatgttgccccagcaccatgttgaaaactgctcttcctccattgagtggacttggcacccttctaaaaatcattt

SEQ ID NO: 414209 - DNA, 3175 bp, Homo sapiens
gagctcacagcctcctgccagcgcgctctctgtttctctgcagccccgaagctcgcgaatgtagcaggcgccccaagctcggtcctcaagaagccatggcggaatccagggccgtctgtacctttggatgtgcttggctgctgcgctggcatctttcctgatgggatttatggtgggctggtttattaagcctctcaaagaaacaaccacttctgtgcgctatcatcaaagtatacggtggaaactggtatccgaaatgaaagctgaaaacatcaaatcatttcttcgttcttttacaaagcttcctcatctggcaggaacagaacaaaatttcttgcttgccaagaaaatccaaacccagtggaagaaatttggactagattcagccaagttggttcattatgatgtcctcttatcttaccccaatgagacaaatgccaactatatatcgattgtggatgaacatgaaactgagattttcaaaacatcataccttgaaccaccaccagatggctatgagaatgttacaaatattgtgccaccatataatgctttctcagcccaaggcatgccagagggagatcttgtatatgtgaactatgctcgcactgaagactttttcaaactagaaagagagatgggcatcaactgtactgggaagattgttattgcaagatatggaaaaatcttcagaggaaataaagttaaaaatgccatgttagcaggagccataggaatcatcttgtactcagatccagctgactactttgctcctgaggtacagccatatcccaaaggatggaatcttcctggaactgcagcccagagaggaaatgtgttaaatttgaatggtgctggtgacccactcactccaggctatccagcaaaagaatacactttcagacttgatgttgaagaaggagtgggaatcccccgaatacctgtacatcccattggatataatgatgcagaaatattattacgctacttgggaggaattgctccaccagataagagttggaagggagcccttaatgtgagttatagtatcggacctggctttacagggagtgattctttcaggaaggttagaatgcatgtttataacatcaataaaattacaaggatttacaatgtagttggaactatcagaggatctgtggaacctgacaggtatgttattctgggaggtcaccgggactcctgggtatttggagctattgacccaaccagtggggttgctgttttgcaagaaattgcccggagttttggaaaactgatgagtaaaggctggagacctagaagaactatcatttttgccagctgggatgcagaagaatttggacttctgggttccacagaatgggctgaggagaatgtcaaaatactccaggagagaagcattgcttatatcaactcggattcatctatagaaggcaattatactctcagagttgactgtactccccttctttaccaattagtgtataaactgacaaaagagatccccagccctgatgatgggtttgagagtaaatcactgtatgaaagctggttggaaaaagacccttcacctgaaaataaaaatttgcctagaatcaataagctgggatctggaagtgactttgaagcttattttcagagacttggaattgcttcaggcagagcccgttacactaagaataagaaaacagataagtacagcagctacccagtgtaccacacaatttatgagacatttgaattggtagagaaattttatgaccccacatttaaaaaacaactttctgtggctcaattacgaggagcactggtatatgagcttgtggattctaaaatcattccttttaatattcaagactatgcagaagctttgaaaaactatgcagcaagtatctataatctatctaagaaacatgatcaacaattaacagaccatggagtatcatttgactccttattttctgctgtgaaaaacttctcagaggctgcttcagattttcataaacgacttatacaagttgatcttaacaatcccattgcagtgagaatgatgaatgaccaactgatgctcctggaaagagcattcatcgatcctcttggtttaccaggaaagctgttctataggcacatcatatttgctccaagtagccacaacaaatatgctggagaatcatttcctggaatctatgatgctatctttgatattgaaaataaagccaactctcgtttggcctggaaagaagtaaagaaacatatttctattgcagcttttacaattcaagcagcagcaggaactctgaaagaagtattatagaaggtctcaagtggctagccattaaaggtgttgctaaaagtctgaggataaaattcacctttctgataacttatgaagccagggtgttctaaactcttttcatgtcatgttttgattataggctttggtcttttcatctgcaaagccttttttttttttgctctttaaaagttaataattatattagcaaagtgttaatctaatgaagtaaaaaactcctgtgtggcagaaagtaaaagaaaattccctaaattatagcaaggaacatgaattctcagacattgtgagtgtgggaatgtaaaatggtaaaatcacttttgaaaacagtttggcagtttcctataaagttaaacatacacttttactttaggactccagaattccacttctagttatttattcaagagaaggaaaaacaatgatcacagcaatacttgtatgcatgttcattgcaacttaaaagcgtaaaaaccccaaatgtccatccacagacgaatggataaactgtggtatccattacacaatagactacttactactcagcaataaaaatgaagtaactttcaataaatgcaatattattggcagacattgttgaaggaaaaaagccagacaaacaactacataaaatatgtttctatttagatgaagtggcaaactaatctgtagtgttaaaaattagattagtgattgcctgggccaagtggcaggttggggaggatggctgcaaagaagtatgaggaaactttctccaatagatgagaattttccgtatcttgatctgagtggcaaattgtaaacttaaaatatatataaaatttattgtatgaaaattaagcctcaataaatgtgattata

SEQ ID NO: 414210 - DNA, 1773 bp, Homo sapiens
  misc_feature (798)..(798): n is a, c, g, or t
  misc_feature (1770)..(1770): n is a, c, g, or t
atttaatataaatataaatagatacatttaaataatatgcttatacttttttctttattacataatgggctgtcttcttcgttttcataattaactggggtatatttttacattttagaataaatatgacattttgaataatagaatattttgaattttaaataaataacaatttagctatgagaaaataatataaaatagacagcttttaaaatttgacttcaaggtgcatgcttaggtgcttagaagtaaattggcataatgtctgtaccttacttgcaaatgcttcaacagtgttaacaattattgaatttaggtggtagagatatgagaatccattatgctattgcacagcttttcataataaaacactattatgaaaatagttttttataataaaacactgtaaaaaacataatttgctgtactaagtaatttattccttttaaaattctaggaaggttagaatgcatgtttataacatcaataaaattacaaggatttacaatgtagttggaactatcagaggatctgtggaacctggtgagtcacataattttttaaaacattttgtttttacaaaaattaaagggtaagtaaagataaattgtagtcaacaattgaagtggggttttttggctgatttgaaactactaaattttgaggaaaactgtacaaatctaaaagaagattttactttatagtgttgtcttctatagaggaaactcaagcaagaggatgtttattttaaaaacataaattacaaatatttataatgtattcaaagttgtaggtttnttgaacgtattattttccagacaggtatgttattctgggaggtcaccgggactcctgggtatttggagctattgacccaaccagtggggttgctgttttgcaagaaattgcccggagttttggaaaactgatgagtaaaggctggagacctagaagaactatcatttttgccagctgggatgcagaagaatttggacttctgggttccacagaatgggctgaggagaatgtcaaaatactccaggagagaagcattgcttatatcaactcggattcatctatagaaggtaaattttatttcaatttgaagtgaaattttcagaaaggaaattttacttcaagtaacttttattattgagtagaataccatctactaagactataaattctagcttattaagcacctcagatatccccttcctttgagatgcctcagtaatacctttatttttcattttgccacagagaaaataattaggattcatatgaattgatatgattcataactaagctattgcttttaatttctttgatatatttactatttgtttatattactacttaaaactctagtattaaccacatattttctcgataaagatattaatggaatttggctaaaacagttcagaagaaaggttttgcagactattctgtgtagaaatatttcctgtatttgttgtaacaaatttgaagtaagtgtactcacttactcactccttttgaactacaaactcctattgaatctagctcaggatcacctgagcccaggagtgtaagccatagagagaccctgactctcaaaaaaaaaaaaagaaaaagaaaaagaaaaaaactgatctggattgtctacgccaacaggacttgatttctgattagcactactatggagacagtatgattcagaaaatgaagagattcgtgtctctaggctttcattgcattgtgattatttctaaataaatgttagancct

SEQ ID NO: 414211 - DNA, 423 bp, Homo sapiens
aaagtttaccaaaataagcaggaaattacatcttaggtacatggcaaaattaccaacacaggtagacatcatgaataaaaaataatttgggctagatttatttcttgccatttgcaaaaatataatttttctataaaacatatacatgtacatatgttattaaaagtagaagttgatgacaaataatatatagttttattttggcataaatgtagttgcttctacccctaatttccagtatttgatttctctttccagatccccagccctgatgatgggtttgagagtaaatcactgtatgaaagctggttggaaaaagacccttcacctgaaaataaaaatttgcctaggtaagttactgatatgcaccttttctactgtaggataagttatgaattcccctctgcctcttgtttctccaag

SEQ ID NO: 414212 - DNA, 1455 bp, Homo sapiens
gagctcacagcctcctgccagcgcgctctctgtttctctgcagccccgaagctcgcgaatgtagcaggcgccccaagctcggtcctcaagaagccatggcggaatccagggccgtctgtacctttggatgtgcttggctgctgcgctggcatctttcctgatgggatttatggtgggctggtttattaagcctctcaaagaaacaaccacttctgtgcgctatcatcaaagtatacggtggaaactggtatccgaaatgaaagctgaaaacatcaaatcatttcttcgttcttttacaaagcttcctcatctggcaggaacagaacaaaatttcttgcttgccaagaaaatccaaacccagtggaagaaatttggactagattcagccaagttggttcattatgatgtcctcttatcttaccccaatgagacaaatgccaactatatatcgattgtggatgaacatgaaactgagattttcaaaacatcataccttgaaccaccaccagatggctatgagaatgttacaaatattgtgccaccatataatgctttctcagcccaaggcatgccagagggagatcttgtatatgtgaactatgctcgcactgaagactttttcaaactagaaagagagatgggcatcaactgtactgggaagattgttattgcaagatatggaaaaatcttcagaggaaataaagttaaaaatgccatgttagcaggagccataggaatcatcttgtactcagatccagctgactactttgctcctgaggtacagccatatcccaaaggatggaatcttcctggaactgcagcccagagaggaaatgtgttaaatttgaatggtgctggtgacccactcactccaggctatccagcaaaagaatacactttcagacttgatgttgaagaaggagtgggaatcccccgaatacctgtacatcccattggatataatgatgcagaaatattattacggtatagttttcttgttggatatgagattaagatattttgcactagttgtctattttctcattgaaaaccaatatggcattcttatgttaaacacaaagttttataactaaataactcctgaaataggaataacagagtatactatctttttatttcataaaagtagtcattttagtgactaagaaatcaaaataaaatatcgctctgttcgctacaaatgaaattctcaaatacaaagctatgtcctaagataattctgatttgagatttttcaagcaattgaattttcataggtattcattagatatttatattcaacgtctagtataagaatatgacaatgccccccacttactagaggtatgaccttggatcagttgcttaaactttctccagctcagtttctttatttgtaagatgaggctagtaactgtttctccttgatagggttattataagatcatatgagta

SEQ ID NO: 414213 - DNA, 785 bp, Homo sapiens
  misc_feature (782)..(782): n is a, c, g, or t
gtgaattaagtaacaactttgcttcaactacaggagaatgtcaaaatactccaggagagaagcattgcttatatcaactcggattcatctatagaaggtaaattttatttcaatttgaagtgaaattttcagaaaggaaattttacttcaagtaacttttattattgagtagaataccatctactaagactataaattctagcttattaagcacctcagatatccccttcctttgagatgcctcagtaatacctttatttttcattttgccacagagaaaataattaggattcatatgaattgatatgattcataactaagctattgcttttaatttctttgatatatttactatttgtttatattactacttaaaactctagtattaaccacatattttctcgataaagatattaatggaatttggctaaaacagttcagaagaaaggttttgcagactattctgtgtagaaatatttcctgtatttgttgtaacaaatttgaagtaagtgtactcacttactcactccttttgaactacaaactcctattgaatctagctcaggatcacctgagcccaggagtgtaagccatagagagaccctgactctcaaaaaaaaaaaaagaaaaagaaaaagaaaaaaactgatctggattgtctacgccaacaggacttgatttctgattagcactactatggagacagtatgattcagaaaatgaagagattcgtgtctctaggctttcattgcattgtgattatttctaaataaatgttagancct

SEQ ID NO: 414214 - DNA, 3465 bp, Homo sapiens
gagctcacagcctcctgccagcgcgctctctgtttctctgcagccccgaagctcgcgaatgtagcaggcgccccaagctcggtcctcaagaagccatggcggaatccagggccgtctgtacctttggatgtgcttggctgctgcgctggcatctttcctgatgggatttatggtgggctggtttattaagcctctcaaagaaacaaccacttctgtgcgctatcatcaaagtatacggtggaaactggtatccgaaatgaaagctgaaaacatcaaatcatttcttcgttcttttacaaagcttcctcatctggcaggaacagaacaaaatttcttgcttgccaagaaaatccaaacccagtggaagaaatttggactagattcagccaagttggttcattatgatgtcctcttatcttaccccaatgagacaaatgccaactatatatcgattgtggatgaacatgaaactgagattttcaaaacatcataccttgaaccaccaccagatggctatgagaatgttacaaatattgtgccaccatataatgctttctcagcccaaggcatgccagagggagatcttgtatatgtgaactatgctcgcactgaagactttttcaaactagaaagagagatgggcatcaactgtactgggaagattgttattgcaagatatggaaaaatcttcagaggaaataaagttaaaaatgccatgttagcaggagccataggaatcatcttgtactcagatccagctgactactttgctcctgaggtacagccatatcccaaaggatggaatcttcctggaactgcagcccagagaggaaatgtgttaaatttgaatggtgctggtgacccactcactccaggctatccagcaaaagaatacactttcagacttgatgttgaagaaggagtgggaatcccccgaatacctgtacatcccattggatataatgatgcagaaatattattacgctacttgggaggaattgctccaccagataagagttggaagggagcccttaatgtgagttatagtatcggacctggctttacagggagtgattctttcaggaaggttagaatgcatgtttataacatcaataaaattacaaggatttacaatgtagttggaactatcagaggatctgtggaacctgacaggtatgttattctgggaggtcaccgggactcctgggtatttggagctattgacccaaccagtggggttgctgttttgcaagaaattgcccggagttttggaaaactgatgagtaaaggctggagacctagaagaactatcatttttgccagctgggatgcagaagaatttggacttctgggttccacagaatgggctgaggagaatgtcaaaatactccaggagagaagcattgcttatatcaactcggattcatctatagaaggcaattatactctcagagttgactgtactccccttctttaccaattagtgtataaactgacaaaagagatccccagccctgatgatgggtttgagagtaaatcactgtatgaaagctggttggaaaaagacccttcacctgaaaataaaaatttgcctagaatcaataagctgggatctggaagtgactttgaagcttattttcagagacttggaattgcttcaggcagagcccgttacactaagaataagaaaacagataagtacagcagctacccagtgtaccacacaatttatgagacatttgaattggtagagaaattttatgaccccacatttaaaaaacaactttctgtggctcaattacgaggagcactggtatatgagcttgtggattctaaaatcattccttttaatattcaagactatgcagaagctttgaaaaactatgcagcaagtatctataatctatctaagaaacatgatcaacaattaacagaccatggagtatcatttgactccttattttctgctgtgaaaaacttctcagaggctgcttcagattttcataaacgacttatacaagttgatcttaacaatcccattgcagtgagaatgatgaatgaccaactgatgctcctggaaagagcattcatcgatcctcttggtttaccaggaaagctgttctataggcacatcatatttgctccaagtagccacaacaaatatgctggagaatcatttcctggaatctatgatgctatctttgatattgaaaataaagccaactctcgtttggcctggaaagaagtaaagaaacatatttctattgcagcttttacaattcaagcagcagcaggaactctgaaagaagtattatagaaggtctcaagtggctagccattaaaggtgttgctaaaagtctgaggataaaattcacctttctgataacttatgaagccagggtgttctaaactcttttcatgtcatgttttgattataggctttggtcttttcatctgcaaagccttttttttttttgctctttaaaagttaataattatattagcaaagtgttaatctaatgaagtaaaaaactcctgtgtggcagaaagtaaaagaaaattccctaaattatagcaaggaacatgaattctcagacattgtgagtgtgggaatgtaaaatggtaaaatcacttttgaaaacagtttggcagtttcctataaagttaaacatacacttttactttaggactccagaattccacttctagttatttattcaagagaaggaaaaacaatgatcacagcaatacttgtatgcatgttcattgcaacttaaaagcgtaaaaaccccaaatgtccatccacagacgaatggataaactgtggtatccattacacaatagactacttactactcagcaataaaaatgaagtaactttcaataaatgcaatattattggcagacattgttgaaggaaaaaagccagacaaacaactacataaaatatgtttctatttagatgaagtggcaaactaatctgtagtgttaaaaattagattagtgattgcctgggccaagtggcaggttggggaggatggctgcaaagaagtatgaggaaactttctccaatagatgagaattttccgtatcttgatctgagtggcaaattgtaaacttaaaatatatataaaatttattgtatgaaaattaagcctcaataaatgtgattataaaaaacaagtctgcaaggaaaccagaatcatataccttctcttgtgaaatcaccatgaagtgtgaatggtcaggaaaaagccagtaatattcatacatttaataatttcagctctactgaataaacatataagtctgatgggtgatgaaaatagctactacaatcttcatattctaactcctataaagactgtatatcagaatctgcaaacttttatgcagatcccagtgactcaattacatgttcaactatgattaaagcttcaataaacttggttgttcatctacttc

SEQ ID NO: 414215 - DNA, 3378 bp, Homo sapiens
taaatgttcactgagttcactaaagacaacctacagctgtcactgtctgcagggatgaaaaaaaatcgttttatttccaagcaacattagctggtttattaagcctctcaaagaaacaaccacttctgtgcgctatcatcaaagtatacggtggaaactggtatccgaaatgaaagctgaaaacatcaaatcatttcttcgttcttttacaaagcttcctcatctggcaggaacagaacaaaatttcttgcttgccaagaaaatccaaacccagtggaagaaatttggactagattcagccaagttggttcattatgatgtcctcttatcttaccccaatgagacaaatgccaactatatatcgattgtggatgaacatgaaactgagattttcaaaacatcataccttgaaccaccaccagatggctatgagaatgttacaaatattgtgccaccatataatgctttctcagcccaaggcatgccagagggagatcttgtatatgtgaactatgctcgcactgaagactttttcaaactagaaagagagatgggcatcaactgtactgggaagattgttattgcaagatatggaaaaatcttcagaggaaataaagttaaaaatgccatgttagcaggagccataggaatcatcttgtactcagatccagctgactactttgctcctgaggtacagccatatcccaaaggatggaatcttcctggaactgcagcccagagaggaaatgtgttaaatttgaatggtgctggtgacccactcactccaggctatccagcaaaagaatacactttcagacttgatgttgaagaaggagtgggaatcccccgaatacctgtacatcccattggatataatgatgcagaaatattattacgctacttgggaggaattgctccaccagataagagttggaagggagcccttaatgtgagttatagtatcggacctggctttacagggagtgattctttcaggaaggttagaatgcatgtttataacatcaataaaattacaaggatttacaatgtagttggaactatcagaggatctgtggaacctgacaggtatgttattctgggaggtcaccgggactcctgggtatttggagctattgacccaaccagtggggttgctgttttgcaagaaattgcccggagttttggaaaactgatgagtaaaggctggagacctagaagaactatcatttttgccagctgggatgcagaagaatttggacttctgggttccacagaatgggctgaggagaatgtcaaaatactccaggagagaagcattgcttatatcaactcggattcatctatagaaggcaattatactctcagagttgactgtactccccttctttaccaattagtgtataaactgacaaaagagatccccagccctgatgatgggtttgagagtaaatcactgtatgaaagctggttggaaaaagacccttcacctgaaaataaaaatttgcctagaatcaataagctgggatctggaagtgactttgaagcttattttcagagacttggaattgcttcaggcagagcccgttacactaagaataagaaaacagataagtacagcagctacccagtgtaccacacaatttatgagacatttgaattggtagagaaattttatgaccccacatttaaaaaacaactttctgtggctcaattacgaggagcactggtatatgagcttgtggattctaaaatcattccttttaatattcaagactatgcagaagctttgaaaaactatgcagcaagtatctataatctatctaagaaacatgatcaacaattaacagaccatggagtatcatttgactccttattttctgctgtgaaaaacttctcagaggctgcttcagattttcataaacgacttatacaagttgatcttaacaatcccattgcagtgagaatgatgaatgaccaactgatgctcctggaaagagcattcatcgatcctcttggtttaccaggaaagctgttctataggcacatcatatttgctccaagtagccacaacaaatatgctggagaatcatttcctggaatctatgatgctatctttgatattgaaaataaagccaactctcgtttggcctggaaagaagtaaagaaacatatttctattgcagcttttacaattcaagcagcagcaggaactctgaaagaagtattatagaaggtctcaagtggctagccattaaaggtgttgctaaaagtctgaggataaaattcacctttctgataacttatgaagccagggtgttctaaactcttttcatgtcatgttttgattataggctttggtcttttcatctgcaaagccttttttttttttgctctttaaaagttaataattatattagcaaagtgttaatctaatgaagtaaaaaactcctgtgtggcagaaagtaaaagaaaattccctaaattatagcaaggaacatgaattctcagacattgtgagtgtgggaatgtaaaatggtaaaatcacttttgaaaacagtttggcagtttcctataaagttaaacatacacttttactttaggactccagaattccacttctagttatttattcaagagaaggaaaaacaatgatcacagcaatacttgtatgcatgttcattgcaacttaaaagcgtaaaaaccccaaatgtccatccacagacgaatggataaactgtggtatccattacacaatagactacttactactcagcaataaaaatgaagtaactttcaataaatgcaatattattggcagacattgttgaaggaaaaaagccagacaaacaactacataaaatatgtttctatttagatgaagtggcaaactaatctgtagtgttaaaaattagattagtgattgcctgggccaagtggcaggttggggaggatggctgcaaagaagtatgaggaaactttctccaatagatgagaattttccgtatcttgatctgagtggcaaattgtaaacttaaaatatatataaaatttattgtatgaaaattaagcctcaataaatgtgattataaaaaacaagtctgcaaggaaaccagaatcatataccttctcttgtgaaatcaccatgaagtgtgaatggtcaggaaaaagccagtaatattcatacatttaataatttcagctctactgaataaacatataagtctgatgggtgatgaaaatagctactacaatcttcatattctaactcctataaagactgtatatcagaatctgcaaacttttatgcagatcccagtgactcaattacatgttcaactatgattaaagcttcaataaacttggttgttcatctacttc

SEQ ID NO: 414216 - DNA, 1508 bp, Homo sapiens
  misc_feature (1301)..(1301): n is a, c, g, or t
gagctcacagcctcctgccagcgcgctctctgtttctctgcagccccgaagctcgcgaatgtagcaggcgccccaagctcggtcctcaagaagccatggcggaatccagggccgtctgtacctttggatgtgcttggctgctgcgctggcatctttcctgatgggatttatggtgggctggtttattaagcctctcaaagaaacaaccacttctgtgcgctatcatcaaagtatacggtggaaactggtatccgaaatgaaagctgaaaacatcaaatcatttcttcgttcttttacaaagcttcctcatctggcaggaacagaacaaaatttcttgcttgccaagaaaatccaaacccagtggaagaaatttggactagattcagccaagttggttcattatgatgtcctcttatcttaccccaatgagacaaatgccaactatatatcgattgtggatgaacatgaaactgagattttcaaaacatcataccttgaaccaccaccagatggctatgagaatgttacaaatattgtgccaccatataatgctttctcagcccaaggcatgccagagggagatcttgtatatgtgaactatgctcgcactgaagactttttcaaactagaaagagagatgggcatcaactgtactgggaagattgttattgcaagatatggaaaaatcttcagaggaaataaagttaaaaatgccatgttagcaggagccataggaatcatcttgtactcagatccagctgactactttgctcctgaggtacagccatatcccaaaggatggaatcttcctggaactgcagcccagagaggaaatgtgttaaatttgaatggtgctggtgacccactcactccaggctatccagcaaaagaatacactttcagacttgatgttgaagaaggagtgggaatcccccgaatacctgtacatcccattggatataatgatgcagaaatattattacgctacttgggaggaattgctccaccagataagagttggaagggagcccttaatgtgagttatagtatcggacctggctttacagggagtgattctttcaggaaggttagaatgcatgtttataacatcaataaaattacaaggatttacaatgtagttggaactatcagaggatctgtggaacctgacaggtatgttattctgggaggtcaccgggactcctgggtatttggagctattgacccaaccagtggggttgctgttttgcaagaaattgcccggagttttggaaaactgatgagtaaagctgatgagtaangtcgggactcgaagacttcctttgggcgctgggtgcccacatgtggctcggctccccagaggggggggttgaccgagcggtcttatttggcgcgggcccttttgttcccggccagatcttctctcagggtgtgtcggcaacacctcagtcttcctcccgccggcattcccggcgatcgcgtttgccggtcttcccctttttgtgtcc

SEQ ID NO: 414217 - DNA, 453 bp, Homo sapiens
gtcttactctgttacccaggctggaatgcagtggtgtgatcatagctcattgcaacctctgccctctaggctcaagtgatcctcccacctcagcctcccgagtagctgggactacacgtacatgccaccatgcccagctaatttttgtatttttggtagagacggggttttgccatgttgactaggctggtcttgaactcgtgagctcaagtgatctgcctgcctcggcctcccaaagtgctgggattacaagcgtgagtcatggtgcctggcctagtttgctcttattttttttccatctttgcagtttctaggccactgggaacaggctgcagagctcagagtccacagctgtgaggctccatgttgcaccatcaaaaaataaggtgacgagagtcctggttttccccagtgtcacggcaagaggggttactgctcacgggctacacacag

SEQ ID NO: 414218 - DNA, 3436 bp, Homo sapiens
agacgtttcccgccggcgggagctgtggctgtgattgagagaggggttagaggcgggtcccagcgctgccgcaccatggcggaccagctttatctggaaaatatagacgagttcgtcacggaccaaaacaagatcgtgacatacaaatggctgagctatacactaggggttcatgttaaccaggccaaacagatgctgtatgattatgttgaaaggaaacgaaaagaaaattcaggagcccaactgcatgttacctacttggtgtctggcagtctcattcagaatggacattcctgccacaaggttgcagtagtgagagaagataaattggaagcagtgaagtccaagctagctgtgactgccagcatccatgtgtacagcatccagaaagccatgctaaaggacagtgggcctctgttcaatactgactatgacatccttaaaagcaacttgcagaactgcagcaaatttagtgctatacaatgtgcagctgccgtccctagagctcctgctgaatcctcttcgtcttccaaaaagtttgagcagtcacatcttcacatgtcaagtgagacacaagccaacaatgagctgaccaccaatggtcatggcccacctgcatccaagcaggtttcccagcagcccaaaggaattatgggaatgtttgcctccaaagctgctgctaaaacccaagaaaccaacaaggaaacgaaaacagaggctaaagaagtaacaaatgcatctgcagcaggcaacaaggcaccagggaaagggaatatgatgagcaacttttttggaaaagctgctatgaataaatttaaagtcaatttggactcagaacaagcagtgaaagaagaaaaaatagtggagcagcctacagtgtctgtcacggaaccaaagctggcaactcctgcaggcctgaaaaaatccagcaaaaaagcagagcctgttaaggtgctgcagaaggaaaaaaaaagggggaagcgagtagcattatctgatgatgagacaaaggaaactgaaaacatgaggaaaaagaggagaagaatcaaacttcctgaatctgatagcagtgaagatgaagtctttccagactctcctggggcttatgaagctgagtcaccatccccacctcctcctccgtctccacctcttgaaccagtgccaaagactgagcctgaacctccttctgtcaagagctcaagtggagaaaacaaaagaaaacgaaaacgcgtactaaaatctaaaacttacctggatggggaaggctgcatagtgactgaaaaagtctacgagagtgaatcctgcacagatagtgaagaggagcttaacatgaagacatcctcagtacacagaccccctgccatgactgtgaaaaaagaacccagagaggaacgaaagggccccaagaaagggactgctgctctgggcaaagccaacagacaggtgtccattactggcttcttccagaggaaataaactgccatctctggtagatcagagacttggagtggtcaagggagaagaccaagaaatgtactcctcacttactatgtaagttcatctagatctccacctcacctgtatcaaaagactgttctttcatcctgtgaggtttatactatttctggtttttaaccaaaaggaaatcatctggaagcaggaggcaaaaagctgttaccttctaatgacatttaaaaagcacagtctttgacctgtccaggagaaggatttactccaaaattatactggaacagttttcagaattctcactgaagccatttagtggctaacccactgtgctccactcaccctatgccctggtccgcatatggcacaggaattattccttcttgttcctctgtattctaagaattcatgtgggtgtttcttatccttacattctgctggatacgtttacccctcttgtcttcctgcagtaccacacttctgtcccctaacctcctgaggctgttctctgtaagtcttttaagttttggttggactaaaggctgaagtgaaaatctccctgtaatcctcttcctccattatgcagtacacggacacctggctacagaccaggacgtggcttgtgttctgttcctttcacaaaagctctctgggaccttcacttgcaattagtggttagggaaaagcctcaggcagaacacaaatagaaatttaatgatgtgttcaactccaccagaaattacctcgagtcagcattgacgatattggaggagctgccgtgctgctgatacggggtgtgctttatgctgctctttgcggtttgttgatcccctcctcccccactctcaatacctagagagtgaaacccgtacaatgagataaagactaaaaagagaaatcccttcctatatacagtgtgctacatttacaaaaaatttctccttaagaaaacagaatattcaaaaacagcacttttccaggaagttagtgaggaagataaggcacacatttatttataaatggatgttgctcctttgtatttttagcttccctatttgcttaaaagtacaggctccctaagagaggatggagagggagagactgaattgttagtaggtctaaacatcaaagaaaacatttttattagttacttatggaaaatcatctattacaatgataaccttcaagtgacttccattatggctggacaggcggtgagctcagtggattgcagtggtgtgctggtgattttgcacagtgagctctgcggaaggggtcaggctcaactgctgatgtgtctcacacgtagcagacaaggggtgtctgactggcttcttttgcctcaagatggtgtatgtcgtaagtgatgcaatcagctgtctgctttttaaggttgggattgtgctgactttgggattaacatgagcttctttagcaaccaagcatgaacttgattaagaccagaagtttgggagatgagtcctggcattatgtctaggactaaagcagtggctttgtatagcaagctgagtaaaggttgacatattccaaaacccttctttttaaaatgaaaaaggatggagagaaggatggaaagcctggacttaaacctttagaaaaaacttctggagagaaatcccttttaaacagttacttttgtcattgcctctggtcatttgtctaaataggaatggaaaattaaaagaaaagcaacaatccaatcttttttctaaaaattatgctggggtctcgactaaaactgaatttgaattggaaaattctggtgttggttggagttccatcttgcaagggataatacaaatcctatgatctctatgcccaatatgctgcctcaactctgagctgtctgcaaggcttagtaagtattgagtggtgttttttttttctttttatacaataccatgttaaccacatgagttaaataaatttgagaagttgttttaaaaca

SEQ ID NO: 414219 - DNA, 648 bp, Homo sapiens
cgtccgaaaaattatgctggggtctcgactaaataggaatggaaaattaaaagaaaagcaacaatccaatcttttttctaaaaattatgctggggtctcgactaaaactgaatttgaattggaaaattctggtgttggttggagttccatcttgcaagggataatacaaatcctatgatctctatgcccaatatgctgcctcaactctgagctgtctgcaaggcttagtaagtattgagtggtgttttttttttctttttatacaataccatgttaaccacatgagttaaataaatttgagaagttgttttaaaacagtgcttcaaactgagtatctgatgagtctcttatttgatggatggtaacagtgttgcaattatttaagctctgaatgggaagaaggctggttttcagttgatattgttaaaactgcatacccacagtctgagatgaacaagttatttgctgccttcatcgtttttttcagcactggggaaatgttagtttcagccaacctcattttttagttcatctagaagaaaatctagcacattgtattagtttggcttcatcacttgctagctgtatgactgtgggcaagtttcacagcctcaagttctttatcaaaataaaactaaaatgagttac

SEQ ID NO: 414220 - DNA, 2608 bp, Homo sapiens
caagagtccttcttggactatttggccgtccttttctaccctctggaattaagaccacgagttataaagcaaaacccataagagcatgtgaatacttacatttttgttctgtgtaacacgcttaatttatttctggatggcaacagggggaagcgagtagcattatctgatgatgagacaaaggaaactgaaaacatgaggaaaaagaggagaagaatcaaacttcctgaatctgatagcagtgaagatgaagtctttccagactctcctggggcttatgaagctgagtcaccatccccacctcctcctccgtctccacctcttgaaccagtgccaaagactgagcctgaacctccttctgtcaagagctcaagtggagaaaacaaaagaaaacgaaaacgcgtactaaaatctaaaacttacctggatggggaaggctgcatagtgactgaaaaagtctacgagagtgaatcctgcacagatagtgaagaggagcttaacatgaagacatcctcagtacacagaccccctgccatgactgtgaaaaaagaacccagagaggaacgaaagggccccaagaaagggactgctgctctgggcaaagccaacagacaggtgtccattactggcttcttccagaggaaataaactgccatctctggtagatcagagacttggagtggtcaagggagaagaccaagaaatgtactcctcacttactatgtaagttcatctagatctccacctcacctgtatcaaaagactgttctttcatcctgtgaggtttatactatttctggtttttaaccaaaaggaaatcatctggaagcaggaggcaaaaagctgttaccttctaatgacatttaaaaagcacagtctttgacctgtccaggagaaggatttactccaaaattatactggaacagttttcagaattctcactgaagccatttagtggctaacccactgtgctccactcaccctatgccctggtccgcatatggcacaggaattattccttcttgttcctctgtattctaagaattcatgtgggtgtttcttatccttacattctgctggatacgtttacccctcttgtcttcctgcagtaccacacttctgtcccctaacctcctgaggctgttctctgtaagtcttttaagttttggttggactaaaggctgaagtgaaaatctccctgtaatcctcttcctccattatgcagtacacggacacctggctacagaccaggacgtggcttgtgttctgttcctttcacaaaagctctctgggaccttcacttgcaattagtggttagggaaaagcctcaggcagaacacaaatagaaatttaatgatgtgttcaactccaccagaaattacctcgagtcagcattgacgatattggaggagctgccgtgctgctgatacggggtgtgctttatgctgctctttgcggtttgttgatcccctcctcccccactctcaatacctagagagtgaaacccgtacaatgagataaagactaaaaagagaaatcccttcctatatacagtgtgctacatttacaaaaaatttctccttaagaaaacagaatattcaaaaacagcacttttccaggaagttagtgaggaagataaggcacacatttatttataaatggatgttgctcctttgtatttttagcttccctatttgcttaaaagtacaggctccctaagagaggatggagagggagagactgaattgttagtaggtctaaacatcaaagaaaacatttttattagttacttatggaaaatcatctattacaatgataaccttcaagtgacttccattatggctggacaggcggtgagctcagtggattgcagtggtgtgctggtgattttgcacagtgagctctgcggaaggggtcaggctcaactgctgatgtgtctcacacgtagcagacaaggggtgtctgactggcttcttttgcctcaagatggtgtatgtcgtaagtgatgcaatcagctgtctgctttttaaggttgggattgtgctgactttgggattaacatgagcttctttagcaaccaagcatgaacttgattaagaccagaagtttgggagatgagtcctggcattatgtctaggactaaagcagtggctttgtatagcaagctgagtaaaggttgacatattccaaaacccttctttttaaaatgaaaaaggatggagagaaggatggaaagcctggacttaaacctttagaaaaaacttctggagagaaatcccttttaaacagttacttttgtcattgcctctggtcatttgtctaaataggaatggaaaattaaaagaaaagcaacaatccaatcttttttctaaaaattatgctggggtctcgactaaaactgaatttgaattggaaaattctggtgttggttggagttccatcttgcaagggataatacaaatcctatgatctctatgcccaatatgctgcctcaactctgagctgtctgcaaggcttagtaagtattgagtggtgttttttttttctttttatacaataccatgttaaccacatgagttaaataaatttgagaagttgttttaaaaca

SEQ ID NO: 414221 - DNA, 3767 bp, Homo sapiens
agacgtttcccgccggcgggagctgtggctgtgattgagagaggggttagaggcgggtcccagcgctgccgcaccatggcggaccagctttatctggaaaatatagacgagttcgtcacggaccaaaacaagatcgtgacatacaaatggctgagctatacactaggggttcatgttaaccaggccaaacagatgctgtatgattatgttgaaaggaaacgaaaagaaaattcaggagcccaactgcatgttacctacttggtgtctggcagtctcattcagaatggacattcctgccacaaggttgcagtagtgagagaagataaattggaagcagtgaagtccaagctagctgtgactgccagcatccatgtgtacagcatccagaaagccatgctaaaggacagtgggcctctgttcaatactgactatgacatccttaaaagcaacttgcagaactgcagcaaatttagtgctatacaatgtgcagctgccgtccctagagctcctgctgaatcctcttcgtcttccaaaaagtttgagcagtcacatcttcacatgtcaagtgagacacaagccaacaatgagctgaccaccaatggtcatggcccacctgcatccaagcaggtttcccagcagcccaaaggaattatgggaatgtttgcctccaaagctgctgctaaaacccaagaaaccaacaaggaaacgaaaacagaggctaaagaagtaacaaatgcatctgcagcaggcaacaaggcaccagggaaagggaatatgatgagcaacttttttggaaaagctgctatgaataaatttaaagtcaatttggactcagaacaagcagtgaaagaagaaaaaatagtggagcagcctacagtgtctgtcacggaaccaaagctggcaactcctgcaggcctgaaaaaatccagcaaaaaagcagagcctgttaaggtgctgcagaaggaaaaaaaaagggggaagcgagtagcattatctgatgatgagacaaaggaaactgaaaacatgaggaaaaagaggagaagaatcaaacttcctgaatctgatagcagtgaagatgaagtctttccagactctcctggggcttatgaagctgagtcaccatccccacctcctcctccgtctccacctcttgaaccagtgccaaagactgagcctgaacctccttctgtcaagagctcaagtggagaaaacaaaagaaaacgaaaacgcgtactaaaatctaaaacttacctggatggggaaggctgcatagtgactgaaaaagtctacgagagtgaatcctgcacagatagtgaagaggagcttaacatgaagacatcctcagtacacagaccccctgccatgactgtgaaaaaagaacccagagaggaacgaaagggccccaagaaagggactgctgctctgggcaaagccaacagacaggtgtccattactggcttcttccagaggaaataaactgccatctctggtagatcagagacttggagtggtcaagggagaagaccaagaaatgtactcctcacttactatgtaagttcatctagatctccacctcacctgtatcaaaagactgttctttcatcctgtgaggtttatactatttctggtttttaaccaaaaggaaatcatctggaagcaggaggcaaaaagctgttaccttctaatgacatttaaaaagcacagtctttgacctgtccaggagaaggatttactccaaaattatactggaacagttttcagaattctcactgaagccatttagtggctaacccactgtgctccactcaccctatgccctggtccgcatatggcacaggaattattccttcttgttcctctgtattctaagaattcatgtgggtgtttcttatccttacattctgctggatacgtttacccctcttgtcttcctgcagtaccacacttctgtcccctaacctcctgaggctgttctctgtaagtcttttaagttttggttggactaaaggctgaagtgaaaatctccctgtaatcctcttcctccattatgcagtacacggacacctggctacagaccaggacgtggcttgtgttctgttcctttcacaaaagctctctgggaccttcacttgcaattagtggttagggaaaagcctcaggcagaacacaaatagaaatttaatgatgtgttcaactccaccagaaattacctcgagtcagcattgacgatattggaggagctgccgtgctgctgatacggggtgtgctttatgctgctctttgcggtttgttgatcccctcctcccccactctcaatacctagagagtgaaacccgtacaatgagataaagactaaaaagagaaatcccttcctatatacagtgtgctacatttacaaaaaatttctccttaagaaaacagaatattcaaaaacagcacttttccaggaagttagtgaggaagataaggcacacatttatttataaatggatgttgctcctttgtatttttagcttccctatttgcttaaaagtacaggctccctaagagaggatggagagggagagactgaattgttagtaggtctaaacatcaaagaaaacatttttattagttacttatggaaaatcatctattacaatgataaccttcaagtgacttccattatggctggacaggcggtgagctcagtggattgcagtggtgtgctggtgattttgcacagtgagctctgcggaaggggtcaggctcaactgctgatgtgtctcacacgtagcagacaaggggtgtctgactggcttcttttgcctcaagatggtgtatgtcgtaagtgatgcaatcagctgtctgctttttaaggttgggattgtgctgactttgggattaacatgagcttctttagcaaccaagcatgaacttgattaagaccagaagtttgggagatgagtcctggcattatgtctaggactaaagcagtggctttgtatagcaagctgagtaaaggttgacatattccaaaacccttctttttaaaatgaaaaaggatggagagaaggatggaaagcctggacttaaacctttagaaaaaacttctggagagaaatcccttttaaacagttacttttgtcattgcctctggtcatttgtctaaataggaatggaaaattaaaagaaaagcaacaatccaatcttttttctaaaaattatgctggggtctcgactaaaactgaatttgaattggaaaattctggtgttggttggagttccatcttgcaagggataatacaaatcctatgatctctatgcccaatatgctgcctcaactctgagctgtctgcaaggcttagtaagtattgagtggtgttttttttttctttttatacaataccatgttaaccacatgagttaaataaatttgagaagttgttttaaaacagtgcttcaaactgagtatctgatgagtctcttatttgatggatggtaacagtgttgcaattatttaagctctgaatgggaagaaggctggttttcagttgatattgttaaaactgcatacccacagtctgagatgaacaagttatttgctgccttcatcgtttttttcagcactggggaaatgttagtttcagccaacctcattttttagttcatctagaagaaaatctagcacattgtattagtttggcttcatcacttgctagctgtatgactgtgggcaagtttcacagcctcaagttctttatcaaaataaaactaaaatgagttac

SEQ ID NO: 414222 - DNA, 317 bp, Homo sapiens
cgtccgaaaaattatgctggggtctcgactaaataggaatggaaaattaaaagaaaagcaacaatccaatcttttttctaaaaattatgctggggtctcgactaaaactgaatttgaattggaaaattctggtgttggttggagttccatcttgcaagggataatacaaatcctatgatctctatgcccaatatgctgcctcaactctgagctgtctgcaaggcttagtaagtattgagtggtgttttttttttctttttatacaataccatgttaaccacatgagttaaataaatttgagaagttgttttaaaaca

SEQ ID NO: 414223 - DNA, 2565 bp, Homo sapiens
catttttttggaaacctctgcgccatgagagccaagtggaggaagaagcgaatgcgcaggctgaagcgcaaaagaagaaagatgaggcagaggtccaagtaaaccgctagcttgttgcaccgtggaggccacaggagcagaaacatggaatgccagacgctggggatgctggtacaagttgtgggactgcatgctactgtctagagcttgtctcaatggatctagaacttcatcgccctctgatcgccgatcacctctgagacccaccttgctcataaacaaaatgcccatgttggtcctctgccctggacctgtgacattctggactatttctgtgtttatttgtggccgagtgtaacaaccatataataaatcacctcttccgctgttttagctgaagaattaaaaaaaaaaaaaaaaaaactcgagactagttcctcgtgccgaattcggcactgactgaaaaagtctacgagagtgaatcctgcacagatagtgaagaggagcttaacatgaagacatcctcagtacacagaccccctgccatgactgtgaaaaaagccaacagacaggtgtccattactggcttcttccagaggaaataaactgccatctctggtagatcagagacttggagtggtcaagggagaagaccaagaaatgtactcctcacttactatgtaagttcatctagatctccacctcacctgtatcaaaagactgttctttcatcctgtgaggtttatactatttctggtttttaaccaaaaggaaatcatctggaagcaggaggcaaaaagctgttaccttctaatgacatttaaaaagcacagtctttgacctgtccaggagaaggatttactccaaaattatactggaacagttttcagaattctcactgaagccatttagtggctaacccactgtgctccactcaccctatgccctggtccgcatatggcacaggaattattccttcttgttcctctgtattctaagaattcatgtgggtgtttcttatccttacattctgctggatacgtttacccctcttgtcttcctgcagtaccacacttctgtcccctaacctcctgaggctgttctctgtaagtcttttaagttttggttggactaaaggctgaagtgaaaatctccctgtaatcctcttcctccattatgcagtacacggacacctggctacagaccaggacgtggcttgtgttctgttcctttcacaaaagctctctgggaccttcacttgcaattagtggttagggaaaagcctcaggcagaacacaaatagaaatttaatgatgtgttcaactccaccagaaattacctcgagtcagcattgacgatattggaggagctgccgtgctgctgatacggggtgtgctttatgctgctctttgcggtttgttgatcccctcctcccccactctcaatacctagagagtgaaacccgtacaatgagataaagactaaaaagagaaatcccttcctatatacagtgtgctacatttacaaaaaatttctccttaagaaaacagaatattcaaaaacagcacttttccaggaagttagtgaggaagataaggcacacatttatttataaatggatgttgctcctttgtatttttagcttccctatttgcttaaaagtacaggctccctaagagaggatggagagggagagactgaattgttagtaggtctaaacatcaaagaaaacatttttattagttacttatggaaaatcatctattacaatgataaccttcaagtgacttccattatggctggacaggcggtgagctcagtggattgcagtggtgtgctggtgattttgcacagtgagctctgcggaaggggtcaggctcaactgctgatgtgtctcacacgtagcagacaaggggtgtctgactggcttcttttgcctcaagatggtgtatgtcgtaagtgatgcaatcagctgtctgctttttaaggttgggattgtgctgactttgggattaacatgagcttctttagcaaccaagcatgaacttgattaagaccagaagtttgggagatgagtcctggcattatgtctaggactaaagcagtggctttgtatagcaagctgagtaaaggttgacatattccaaaacccttctttttaaaatgaaaaaggatggagagaaggatggaaagcctggacttaaacctttagaaaaaacttctggagagaaatcccttttaaacagttacttttgtcattgcctctggtcatttgtctaaataggaatggaaaattaaaagaaaagcaacaatccaatcttttttctaaaaattatgctggggtctcgactaaaactgaatttgaattggaaaattctggtgttggttggagttccatcttgcaagggataatacaaatcctatgatctctatgcccaatatgctgcctcaactctgagctgtctgcaaggcttagtaagtattgagtggtgttttttttttctttttatacaataccatgttaaccacatgagttaaataaatttgagaagttgttttaaaaca

SEQ ID NO: 414224 - DNA, 1885 bp, Homo sapiens
  misc_feature (1885)..(1885): n is a, c, g, or t
gtgcgcacgcacacacggtgcacacgtcagtccggcgcctccccgtgccccgactcacgcaggtcctcccgcgcgcccgcaacacgcccgcaggctcctgtgtctgctgccggggcagcggggcccggaaggaagatggctgtgccacccacgtatgccgatcttggcaaatctgccagggatgtcttcaccaagggctatggatttggcttaataaagcttgatttgaaaacaaaatctgagaatggattggaatttacaagctcaggctcagccaacactgagaccaccaaagtgacgggcagtctggaaaccaagtacagatggactgagtacggcctgacgtttacagagaaatggaataccgacaatacactaggcaccgagattactgtggaagatcagcttgcacgtggactgaagctgaccttcgattcatccttctcacctaacactgggaaaaaaaatgctaaaatcaagacagggtacaagcgggagcacattaacctgggctgcgacatggatttcgacattgctgggccttccatccggggtgctctggtgctaggttacgagggctggctggccggctaccagatgaattttgagactgcaaaatcccgagtgacccagagcaactttgcagttggctacaagactgatgaattccagcttcacactaatgtgaatgacgggacagagtttggcggctccatttaccagaaagtgaacaagaagttggagaccgctgtcaatcttgcctggacagcaggaaacagtaacacgcgcttcggaatagcagccaagtatcagattgaccctgacgcctgcttctcggctaaagtgaacaactccagcctgataggtttaggatacactcagactctaaagccaggtattaaactgacactgtcagctcttctggatggcaagaacgtcaatgctggtggccacaagcttggtctaggactggaatttcaagcataaatgaatactgtacaattgtttaattttaaactattttgcagcatagctaccttcagaatttagtgtatcttttaatgttgtatgtctgggatgcaagtattgctaaatatgttagccctccaggttaaagttgattcagctttaagatgttacccttccagaggtacagaagaaacctatttccaaaaaaggtcctttcagtggtagactcggggagaacttggtggcccctttgagatgccaggtttcttttttatctagaaatggctgcaagtggaagcggataatatgtaggcactttgtaaattcatattgagtaaatgaatgaaattgtgatttcctgagaatcgaaccttggttccctaaccctaattgatgagaggctcgctgcttgatggtgtgtacaaactcacctgaatgggacttttttagacagatcttcatgacctgttcccaccccagttcatcatcatctcttttacaccaaaaggtctgcagggtgtggtaactgtttcttttgtgccattttggggtggagaaggtggatgtgatgaagccaataattcaggacttattccttcttgtgttgtgttttttttttgcccttgcaccagagtatgaaatagcttccaggagctccagctataagcttggaagtgtctgtgtgattgtaatcacatggtgacaacactcagaatctaaattggacttctgttgtattctcaccactcaatttgttttttagcagtttaatgggtacattttagagtcttccattttgttggaattagatcctccccttcaaatgctgtaattaacaacacttaaaaaacttgaataaaatattgaaacctcatccttcttctgttgtctttattaataaaatataaataaacan

SEQ ID NO: 414225 - DNA, 1593 bp, Homo sapiens
  misc_feature (1593)..(1593): n is a, c, g, or t
cagccgctcgctcggctccgctccctggctcggctccctgcctccgcgtcgcagcccccgccgtagccgcctccgagcccgccgccacatcctctgagcagaagatggctgtgccacccacgtatgccgatcttggcaaatctgccagggatgtcttcaccaagggctatggatttggcttaataaagcttgatttgaaaacaaaatctgagaatggattggaatttacaagctcaggctcagccaacactgagaccaccaaagtgacgggcagtctggaaaccaagtacagatggactgagtacggcctgacgtttacagagaaatggaataccgacaatacactaggcaccgagattactgtggaagatcagcttgcacgtggactgaagctgaccttcgattcatccttctcacctaacactgggaaaaaaaatgctaaaatcaagacagggtacaagcgggagcacattaacctgggctgcgacatggatttcgacattgctgggccttccatccggggtgctctggtgctaggttacgagggctggctggccggctaccagatgaattttgagactgcaaaatcccgagtgacccagagcaactttgcagttggctacaagactgatgaattccagcttcacactaatgtgaatgacgggacagagtttggcggctccatttaccagaaagtgaacaagaagttggagaccgctgtcaatcttgcctggacagcaggaaacagtaacacgcgcttcggaatagcagccaagtatcagattgaccctgacgcctgcttctcggctaaagtgaacaactccagcctgataggtttaggatacactcagactctaaagccaggtattaaactgacactgtcagctcttctggatggcaagaacgtcaatgctggtggccacaagcttggtctaggactggaatttcaagcataaatgaatactgtacaattgtttaattttaaactattttgcagcatagctaccttcagaatttagtgtatcttttaatgttgtatgtctgggatgcaagtattgctaaatatgttagccctccaggttaaagttgattcagctttaagatgttacccttccagaggtacagaagaaacctatttccaaaaaaggtcctttcagtggtagactcggggagaacttggtggcccctttgagatgccaggtttcttttttatctagaaatggctgcaagtggaagcggataatatgtaggcactttgtaaattacttattccttcttgtgttgtgttttttttttgcccttgcaccagagtatgaaatagcttccaggagctccagctataagcttggaagtgtctgtgtgattgtaatcacatggtgacaacactcagaatctaaattggacttctgttgtattctcaccactcaatttgttttttagcagtttaatgggtacattttagagtcttccattttgttggaattagatcctccccttcaaatgctgtaattaacaacacttaaaaaacttgaataaaatattgaaacctcatccttcttctgttgtctttattaataaaatataaataaacan

SEQ ID NO: 414226 - DNA, 516 bp, Homo sapiens
  misc_feature (516)..(516): n is a, c, g, or t
ggagctccagctataagctggaagtgtctgtgagttgtacacaccatcaagcagcgagcctctcatcaattagggttagggaaccaaggttcgattctcaggaaatcacaatttcattcatttactcaatatgaatttacaaagtgcctacatattatccgcttccacttgcagccatttctagataaaaaagaaacctggcatctcaaaggggccaccaagttctccccgagtctaccactgaaagccaggagctccagctataagcttggaagtgtctgtgtgattgtaatcacatggtgacaacactcagaatctaaattggacttctgttgtattctcaccactcaatttgttttttagcagtttaatgggtacattttagagtcttccattttgttggaattagatcctccccttcaaatgctgtaattaacaacacttaaaaaacttgaataaaatattgaaacctcatccttcttctgttgtctttattaataaaatataaataaacan

SEQ ID NO: 414227 - DNA, 413 bp, Homo sapiens
  misc_feature (413)..(413): n is a, c, g, or t
actcggctcggtcctttccgggaggatggggtgtctttgttgtggttggaggttggtgatcattgctctggatttggggctcccggctgccaccacatgcagctttgcctcacctttctccagcagccgggaccctctggagagccaggagctccagctataagcttggaagtgtctgtgtgattgtaatcacatggtgacaacactcagaatctaaattggacttctgttgtattctcaccactcaatttgttttttagcagtttaatgggtacattttagagtcttccattttgttggaattagatcctccccttcaaatgctgtaattaacaacacttaaaaaacttgaataaaatattgaaacctcatccttcttctgttgtctttattaataaaatataaataaacan

SEQ ID NO: 414228 - DNA, 186 bp, Homo sapiens
  misc_feature (186)..(186): n is a, c, g, or t
gaggtttcaatattttattcaagttttttaagtgttgttaattacagcattttagagtcttccattttgttggaattagatcctccccttcaaatgctgtaattaacaacacttaaaaaacttgaataaaatattgaaacctcatccttcttctgttgtctttattaataaaatataaataaacan

SEQ ID NO: 414229 - DNA, 1854 bp, Homo sapiens
  misc_feature (1854)..(1854): n is a, c, g, or t
cagccgctcgctcggctccgctccctggctcggctccctgcctccgcgtcgcagcccccgccgtagccgcctccgagcccgccgccacatcctctgagcagaagatggctgtgccacccacgtatgccgatcttggcaaatctgccagggatgtcttcaccaagggctatggatttggcttaataaagcttgatttgaaaacaaaatctgagaatggattggaatttacaagctcaggctcagccaacactgagaccaccaaagtgacgggcagtctggaaaccaagtacagatggactgagtacggcctgacgtttacagagaaatggaataccgacaatacactaggcaccgagattactgtggaagatcagcttgcacgtggactgaagctgaccttcgattcatccttctcacctaacactgggaaaaaaaatgctaaaatcaagacagggtacaagcgggagcacattaacctgggctgcgacatggatttcgacattgctgggccttccatccggggtgctctggtgctaggttacgagggctggctggccggctaccagatgaattttgagactgcaaaatcccgagtgacccagagcaactttgcagttggctacaagactgatgaattccagcttcacactaatgtgaatgacgggacagagtttggcggctccatttaccagaaagtgaacaagaagttggagaccgctgtcaatcttgcctggacagcaggaaacagtaacacgcgcttcggaatagcagccaagtatcagattgaccctgacgcctgcttctcggctaaagtgaacaactccagcctgataggtttaggatacactcagactctaaagccaggtattaaactgacactgtcagctcttctggatggcaagaacgtcaatgctggtggccacaagcttggtctaggactggaatttcaagcataaatgaatactgtacaattgtttaattttaaactattttgcagcatagctaccttcagaatttagtgtatcttttaatgttgtatgtctgggatgcaagtattgctaaatatgttagccctccaggttaaagttgattcagctttaagatgttacccttccagaggtacagaagaaacctatttccaaaaaaggtcctttcagtggtagactcggggagaacttggtggcccctttgagatgccaggtttcttttttatctagaaatggctgcaagtggaagcggataatatgtaggcactttgtaaattcatattgagtaaatgaatgaaattgtgatttcctgagaatcgaaccttggttccctaaccctaattgatgagaggctcgctgcttgatggtgtgtacaaactcacctgaatgggacttttttagacagatcttcatgacctgttcccaccccagttcatcatcatctcttttacaccaaaaggtctgcagggtgtggtaactgtttcttttgtgccattttggggtggagaaggtggatgtgatgaagccaataattcaggacttattccttcttgtgttgtgttttttttttgcccttgcaccagagtatgaaatagcttccaggagctccagctataagcttggaagtgtctgtgtgattgtaatcacatggtgacaacactcagaatctaaattggacttctgttgtattctcaccactcaatttgttttttagcagtttaatgggtacattttagagtcttccattttgttggaattagatcctccccttcaaatgctgtaattaacaacacttaaaaaacttgaataaaatattgaaacctcatccttcttctgttgtctttattaataaaatataaataaacan

SEQ ID NO: 414230 - DNA, 2264 bp, Homo sapiens
cagccgctcgctcggctccgctccctggctcggctccctgcctccgcgtcgcagcccccgccgtagccgcctccgagcccgccgccacatcctctgagcagaagatggctgtgccacccacgtatgccgatcttggcaaatctgccagggatgtcttcaccaagggctatggatttggcttaataaagcttgatttgaaaacaaaatctgagaatggattggaatttacaagctcaggctcagccaacactgagaccaccaaagtgacgggcagtctggaaaccaagtacagatggactgagtacggcctgacgtttacagagaaatggaataccgacaatacactaggcaccgagattactgtggaagatcagcttgcacgtggactgaagctgaccttcgattcatccttctcacctaacactgggaaaaaaaatgctaaaatcaagacagggtacaagcgggagcacattaacctgggctgcgacatggatttcgacattgctgggccttccatccggggtgctctggtgctaggttacgagggctggctggccggctaccagatgaattttgagactgcaaaatcccgagtgacccagagcaactttgcagttggctacaagactgatgaattccagcttcacactaatgtgaatgacgggacagagtttggcggctccatttaccagaaagtgaacaagaagttggagaccgctgtcaatcttgcctggacagcaggaaacagtaacacgcgcttcggaatagcagccaagtatcagattgaccctgacgcctgcttctcggctaaagtgaacaactccagcctgataggtttaggatacactcagactctaaagccaggtattaaactgacactgtcagctcttctggatggcaagaacgtcaatgctggtggccacaagcttggtctaggactggaatttcaagcataaatgaatactgtacaattgtttaattttaaactattttgcagcatagctaccttcagaatttagtgtatcttttaatgttgtatgtctgggatgcaagtattgctaaatatgttagccctccaggttaaagttgattcagctttaagatgttacccttccagaggtacagaagaaacctatttccaaaaaaggtcctttcagtggtagactcggggagaacttggtggcccctttgagatgccaggtttcttttttatctagaaatggctgcaagtggaagcggataatatgtaggcactttgtaaattcatattgagtaaatgaatgaaattgtgatttcctgagaatcgaaccttggttccctaaccctaattgatgagaggctcgctgcttgatggtgtgtacaaactcacctgaatgggacttttttagacagatcttcatgacctgttcccaccccagttcatcatcatctcttttacaccaaaaggtctgcagggtgtggtaactgtttcttttgtgccattttggggtggagaaggtggatgtgatgaagccaataattcaggacttattccttcttgtgttgtgttttttttttgcccttgcaccagagtatgaaatagcttccaggagctccagctataagcttggaagtgtctgtgtgattgtaatcacatggtgacaacactcagaatctaaattggacttctgttgtattctcaccactcaatttgttttttagcagtttaatgggtacattttagagtcttccattttgttggaattagatcctccccttcaaatgctgtaattaacaacacttaaaaaacttgaataaaatattgaaaaaaaaaaaaaaaaaaaaaactcgagaaaagtttggtatgtttctctcaagaaaaaagcatggtgagtccagacagcagcaaaagcttttgtgaaaaccaattgtgttcatctagatagtaagtaactcctatttttactgttaattttttaaaagagaatttttccctgtggaaactccctgttagtacgtcctaggggagaaagcctgtggaatatggtggttattgatggcgttgcctttgtttcatctttgagtttgccctttgtgggatctagtgggataatgagcactgacagaactcttaacagcgtgctgtatttttgacattgaaaatgttaatgacttgatttgtacataactctgtaactaggtgaaagtagatcacagctgacatttacaaaatgtttttgtaccttagaatttctgcattaaataaaatgtttgttttaaaaaaa

SEQ ID NO: 414231 - DNA, 1875 bp, Homo sapiens
cagccgctcgctcggctccgctccctggctcggctccctgcctccgcgtcgcagcccccgccgtagccgcctccgagcccgccgccacatcctctgagcagaagatggctgtgccacccacgtatgccgatcttggcaaatctgccagggatgtcttcaccaagggctatggatttggcttaataaagcttgatttgaaaacaaaatctgagaatggattggaatttacaagctcaggctcagccaacactgagaccaccaaagtgacgggcagtctggaaaccaagtacagatggactgagtacggcctgacgtttacagagaaatggaataccgacaatacactaggcaccgagattactgtggaagatcagcttgcacgtggactgaagctgaccttcgattcatccttctcacctaacactgggaaaaaaaatgctaaaatcaagacagggtacaagcgggagcacattaacctgggctgcgacatggatttcgacattgctgggccttccatccggggtgctctggtgctaggttacgagggctggctggccggctaccagatgaattttgagactgcaaaatcccgagtgacccagagcaactttgcagttggctacaagactgatgaattccagcttcacactaatgtgaatgacgggacagagtttggcggctccatttaccagaaagtgaacaagaagttggagaccgctgtcaatcttgcctggacagcaggaaacagtaacacgcgcttcggaatagcagccaagtatcagattgaccctgacgcctgcttctcggctaaagtgaacaactccagcctgataggtttaggatacactcagactctaaagccaggtattaaactgacactgtcagctcttctggatggcaagaacgtcaatgctggtggccacaagcttggtctaggactggaatttcaagcataaatgaatactgtacaattgtttaattttaaactattttgcagcatagctaccttcagaatttagtgtatcttttaatgttgtatgtctgggatgcaagtattgctaaatatgttagccctccaggttaaagttgattcagctttaagatgttacccttccagaggtacagaagaaacctatttccaaaaaaggtcctttcagtggtagactcggggagaacttggtggcccctttgagatgccaggtttcttttttatctagaaatggctgcaagtggaagcggataatatgtaggcactttgtaaattcatattgagtaaatgaatgaaattgtgatttcctgagaatcgaaccttggttccctaaccctaattgatgagaggctcgctgcttgatggtgtgtacaaactcacctgaatgggacttttttagacagatcttcatgacctgttcccaccccagttcatcatcatctcttttacaccaaaaggtctgcagggtgtggtaactgtttcttttgtgccattttggggtggagaaggtggatgtgatgaagccaataattcaggacttattccttcttgtgttgtgttttttttttgcccttgcaccagagtatgaaatagcttccaggagctccagctataagcttggaagtgtctgtgtgattgtaatcacatggtgacaacactcagaatctaaattggacttctgttgtattctcaccactcaatttgttttttagcagtttaatgggtacattttagagtcttccattttgttggaattagatcctccccttcaaatgctgtaattaacaacacttaaaaaacttgaataaaatattgaagatggcctcgttggctacagcgtggagtgtgcggcagacaacacgtcccatataacccctatatctatg

SEQ ID NO: 414232 - DNA, 1797 bp, Homo sapiens
  misc_feature (1797)..(1797): n is a, c, g, or t
cagccgctcgctcggctccgctccctggctcggctccctgcctccgcgtcgcagcccccgccgtagccgcctccgagcccgccgccacatcctctgagcagaagatggctgtgccacccacgtatgccgatcttggcaaatctgccagggatgtcttcaccaagggctatggatttggcttaataaagcttgatttgaaaacaaaatctgagaatggattggaatttacaagctcaggctcagccaacactgagaccaccaaagtgacgggcagtctggaaaccaagtacagatggactgagtacggcctgacgtttacagagaaatggaataccgacaatacactaggcaccgagattactgtggaagatcagcttgcacgtggactgaagctgaccttcgattcatccttctcacctaacactgggaaaaaaaatgctaaaatcaagacagggtacaagcgggagcacattaacctgggctgcgacatggatttcgacattgctgggccttccatccggggtgctctggtgctaggttacgagggctggctggccggctaccagatgaattttgagactgcaaaatcccgagtgacccagagcaactttgcagttggctacaagactgatgaattccagcttcacactaatgtgaatgacgggacagagtttggcggctccatttaccagaaagtgaacaagaagttggagaccgctgtcaatcttgcctggacagcaggaaacagtaacacgcgcttcggaatagcagccaagtatcagattgaccctgacgcctgcttctcggctaaagtgaacaactccagcctgataggtttaggatacactcagactctaaagccaggtattaaactgacactgtcagctcttctggatggcaagaacgtcaatgctggtggccacaagcttggtctaggactggaatttcaagcataaatgaatactgtacaattgtttaattttaaactattttgcagcatagctaccttcagaatttagtgtatcttttaatgttgtatgtctgggatgcaagtattgctaaatatgttagccctccaggttaaagttgattcagctttaagatgttacccttccagaggtacagaagaaacctatttccaaaaaaggtcctttcagtggtagactcggggagaacttggtggcccctttgagatgccaggtttcttttttatctagaaatggctgcaagtggaagcggataatatgtaggcactttgtaaattcatattgagtaaatgaatgaaattgtgatttcctgagaatcgaaccttggttccctaaccctaattgatgagaggctcgctgcttgatggtgtgtacaaactcacctgaatgggacttttttagacagatcttcatgacctgttcccaccccagttcatcatcatctcttttacaccaaaaggtctgcagggtgtggtaactgtttcttttgtgccattttggggtggagaagtttgcccttgcaccagagtatgaaatagcttccaggagctccagctataagcttggaagtgtctgtgtgattgtaatcacatggtgacaacactcagaatctaaattggacttctgttgtattctcaccactcaatttgttttttagcagtttaatgggtacattttagagtcttccattttgttggaattagatcctccccttcaaatgctgtaattaacaacacttaaaaaacttgaataaaatattgaaacctcatccttcttctgttgtctttattaataaaatataaataaacan

SEQ ID NO: 414233 - DNA, 3465 bp, Homo sapiens
  misc_feature (1)..(1): n is a, c, g, or t
naagtgagtccagggcccgcctcccggggagtcggcctcggatgtccggaggctcctgggctgagccggcgacagagcccgggaaggcagcgagacgtgggcgccggcccagccccctcccgcgtccttcagccccaagccccgagcccctctgacccttccgcagccctccctccagccgcgcccggcctccggcagctccctgtacgcctccctccccctgcccgcccctccctcccacagccgcccatgacgccctctcggcacctcttcccactctgccacgcgtccttttcctgcaccttcgccccgcgtacctactcctgccccgccctgccattcctctcccctcccttctctctgcgacccctccctgttaggccccagcctcttctcccctcacaggtcttctctgtcctggcctcaccgccttatcctattcctctcccttgccctgtgtcttgtctcagagccccctcggggtgggagtaggttgtggagcagcacaactgggctcaccccaaagcagaacttctcaatccatgaggacaatggggaggcctttaggccagcccacatgtgacaatggagggctgcggcttccttgcggagagcacaagtgagctcactgccctggactccagggaatcagagttctggccgcggggtgacccagctcctctgctaccatgaatagggcccctctgaagcggtccaggatcctgcacatggcgctgaccggggcctcagacccctctgcagaggcagaggccaacggggagaagccctttctgctgcgggcattgcagatcgcgctggtggtctccctctactgggtcacctccatctccatggtgttccttaataagtacctgctggacagcccctccctgcggctggacacccccatcttcgtcaccttctaccagtgcctggtgaccacgctgctgtgcaaaggcctcagcgctctggccgcctgctgccctggtgccgtggacttccccagcttgcgcctggacctcagggtggcccgcagcgtcctgcccctgtcggtggtcttcatcggcatgatcaccttcaataacctctgcctcaagtacgtcggtgtggccttctacaatgtgggccgctcactcaccaccgtcttcaacgtgctgctctcctacctgctgctcaagcagaccacctccttctatgccctgctcacctgcggtatcatcatcgggggcttctggcttggtgtggaccaggagggggcagaaggcaccctgtcgtggctgggcaccgtcttcggcgtgctggctagcctctgtgtctcgctcaacgccatctacaccacgaaggtgctcccggcggtggacggcagcatctggcgcctgactttctacaacaacgtcaacgcctgcatcctcttcctgcccctgctcctgctgctcggggagcttcaggccctgcgtgactttgcccagctgggcagtgcccacttctgggggatgatgacgctgggcggcctgtttggctttgccatcggctacgtgacaggactgcagatcaagttcaccagtccgctgacccacaatgtgtcgggcacggccaaggcctgtgcccagacagtgctggccgtgctctactacgaggagaccaagagcttcctctggtggacgagcaacatgatggtgctgggcggctcctccgcctacacctgggtcaggggctgggagatgaagaagactccggaggagcccagccccaaagacagcgagaagagcgccatgggggtgtgagcaccacaggcaccctggatggcccggccccggggcccgtacacaggcggggccagcacagtagtgaaggcggtctcctggaccccagaagcgtgctgtggtgtggactgggtgctacttatagacccaatcagaatacggtggttgagaaggaaccagtgtttacaagtaatatcagaaagttgaaggaaccagtgtttacaagtaataccagaaagttgccaaacccttctctatcctctcgtatttctgagtttttgtccttcccgagggagcaccctagtgagagttgaaccccttccttctgcctccagggcctgtctgcctccacatcactctgaggacagggacaggcaacaaccttgaagggacagcaatggcaaagccacaaaggcttcactgtactcaggggagatggccctaccacagccacctggagagggttgggaagccttccgtctgcggtgggcaggcagcctcaccctgggcccacagaccggccttcctttggaggaaagtgtggcctggactgagggaggaaatgagcgagttccctctgacaccagcagatccccaggggctgctgggcagtggcctgggaatggggtggattgtgagaaagtgctcaccatctatacaccctgtatgtccagcttttgaacacaagggaaccatgcttctcttagaggttaagcagggtcattaacatcctcccccagtccctaacatcacattgtcctgcgtggctcctctggccctgagtggcacctgtccctctggtctcccagcacctggcccaggtaacagccttctgaaagcagagccaaggagctgcttctctcttctcccagttctacctccccagaagccttcctccccaggtggggctgatggagcaagggtccagactaggagccttccaccccagctgtgtctggcgcccctagatctctgcaagggaggtgttacagctggttctgagccgcttgccttgtgatggtaagacaccaacctttacattcttccctgaggttgtggctgacagagcctgcttggccccactgttagtccagcgagctcctatatcaaaatgccgtaggccgggtggcttacaaacaacagaaacgtattgctcacagtcctggggggctgggacgtccaagatcaagaggccagcagattcggactccgctgagggctgtttcccgatccatagatggtgccttctcgctgtatcctcaatggtagaagcacaaacaagcaagctccttcctgcctcttttataaggactccaaccctgttcatgagggctccgcccccatgacccaatcagctccaaaggccccacctcctaatactgtcaccttgggggtgagaattccaatgtgaatttgcagggggagtgggggacacacacaaatttcggggccataccacccttcaccacaccctcctgcgctcagggtggcttgcagtccctggcccttctggtgggcatttggtatgtcctttctcttggggtgatttctgatgtttttactctatatagtgaaaagctagggagagcgggtcttctcccccctccctctccagtcccctcacaatcccagatgggttctaatgcagctgctggggcctgatgccctgagttgtttgtgattcaataaagaatccataaga

SEQ ID NO: 414234 - DNA, 3497 bp, Homo sapiens
  misc_feature (1)..(1): n is a, c, g, or t
naagtgagtccagggcccgcctcccggggagtcggcctcggatgtccggaggctcctgggctgagccggcgacagagcccgggaaggcagcgagacgtgggcgccggcccagccccctcccgcgtccttcagccccaagccccgagcccctctgacccttccgcagccctccctccagccgcgcccggcctccggcagctccctgtacgcctccctccccctgcccgcccctccctcccacagccgcccatgacgccctctcggcacctcttcccactctgccacgcgtccttttcctgcaccttcgccccgcgtacctactcctgccccgccctgccattcctctcccctcccttctctctgcgacccctccctgttaggccccagcctcttctcccctcacaggtcttctctgtcctggcctcaccgccttatcctattcctctcccttgccctgtgtcttgtctcagagccccctcggggtgggagtaggttgtggagcagcacaactgggctcaccccaaagcagaacttctcaatccatgaggacaatggggaggcctttaggccagcccacatgtgacaatggagggctgcggcttccttgcggagagcacaagtgagctcactgccctggactccagggaatcagagttctggccgcggggtgacccagctcctctgctaccatgaatagggcccctctgaagcggtccaggatcctgcacatggcgctgaccggggcctcagacccctctgcagaggcagaggccaacggggagaagccctttctgctgcgggcattgcagatcgcgctggtggtctccctctactgggtcacctccatctccatggtgttccttaataagtacctgctggacagcccctccctgcggctggacacccccatcttcgtcaccttctaccagtgcctggtgaccacgctgctgtgcaaaggcctcagcgctctggccgcctgctgccctggtgccgtggacttccccagcttgcgcctggacctcagggtggcccgcagcgtcctgcccctgtcggtggtcttcatcggcatgatcaccttcaataacctctgcctcaagtacgtcggtgtggccttctacaatgtgggccgctcactcaccaccgtcttcaacgtgctgctctcctacctgctgctcaagcagaccacctccttctatgccctgctcacctgcggtatcatcatcgggggcttctggcttggtgtggaccaggagggggcagaaggcaccctgtcgtggctgggcaccgtcttcggcgtgctggctagcctctgtgtctcgctcaacgccatctacaccacgaaggtgctcccggcggtggacggcagcatctggcgcctgactttctacaacaacgtcaacgcctgcatcctcttcctgcccctgctcctgctgctcggggagcttcaggccctgcgtgactttgcccagctgggcagtgcccacttctgggggatgatgacgctgggcggcctgtttggctttgccatcggctacgtgacaggactgcagatcaagttcaccagtccgctgacccacaatgtgtcgggcacggccaaggcctgtgcccagacagtgctggccgtgctctactacgaggagaccaagagcttcctctggtggacgagcaacatgatggtgctgggcggctcctccgcctacacctgggtcaggggctgggagatgaagaagactccggaggagcccagccccaaagacagcgagaagagcgccatgggggtgtgagcaccacaggcaccctggatggcccggccccggggcccgtacacaggcggggccagcacagtagtgaaggcggtctcctggaccccagaagcgtgctgtggtgtggactgggtgctacttatagacccaatcagaatacggtggttgagaaggaaccagtgtttacaagtaatatcagaaagttgaaggaaccagtgtttacaagtaataccagaaagttgccaaacccttctctatcctctcgtatttctgagtttttgtccttcccgagggagcaccctagtgagagttgaaccccttccttctgcctccagggcctgtctgcctccacatcactctgaggacagggacaggcaacaaccttgaagggacagcaatggcaaagccacaaaggcttcactgtactcaggggagatggccctaccacagccacctggagagggttgggaagccttccgtctgcggtgggcaggcagcctcaccctgggcccacagaccggccttcctttggaggaaagtgtggcctggactgagggaggaaatgagcgagttccctctgacaccagcagatccccaggggctgctgggcagtggcctgggaatggggtggattgtgagaaagtgctcaccatctatacaccctgtatgtccagcttttgaacacaagggaaccatgcttctcttagaggttaagcagggtcattaacatcctcccccagtccctaacatcacattgtcctgcgtggctcctctggccctgagtggcacctgtccctctggtctcccagcacctggcccaggtaacagccttctgaaagcagagccaaggagctgcttctctcttctcccagttctacctccccagaagccttcctccccaggtggggctgatggagcaagggtccagactaggagccttccaccccagctgtgtctggcgcccctagatctctgcaagggaggtgttacagctggttctgagccgcttgccttgtgatggtaagacaccaacctttacattcttccctgaggttgtggctgacagagcctgcttggccccactgttagtccagcgagctcctatatcaaaatgccgtaggccgggtggcttacaaacaacagaaacgtattgctcacagtcctggggggctgggacgtccaagatcaagaggccagcagattcggactccgctgagggctgtttcccgatccatagatggtgccttctcgctgtatcctcaatggtagaagcacaaacaagcaagctccttcctgcctcttttataaggactccaaccctgttcatgagggctccgcccccatgacccaatcagctccaaaggccccacctcctaatactgtcaccttgggggtgagaattccaatgtgaatttgcagggggagtgggggacacacacaaatttcggggccataccacccttcaccacaccctcctgcgctcagggtggcttgcagtccctggcccttctggtgggcatttggtatgtcctttctcttggggtgatttctgatgtttttactctatatagtgaaaagctagggagagcgggtcttctcccccctccctctccagtcccctcacaatcccagatgggttctaatgcagctgctggggcctgatgccctgagttgtttgtgattcaataaagaatccataagaaaaaaagccacacaaggaagaaggcaagaaca

SEQ ID NO: 414235 - DNA, 3206 bp, Homo sapiens
cgcacttctggaagtgcaagccggtagcgcggcgggccagggatacagccaagtcccgggacgtgccagctgcggtaactgaagccgggtcccgggcgggcgggggtaccagggacaggagtagccttggaaagaggagagggcctcctcccacgaccgtccggatcaccgcctctccgccggcacccccggggcccatgccgcgaacaggccggcgaggctggcaaggtgcccgggcccggggcggaaagcaggaagtcgatcccgcgggcgcggcccagggtgcggcgctgcagatgcagcacggggtcgcggggcgggcgcccagtgcaccggaggaggtgagcgccaggtcgccttcgcggcccggggacacaggcagggacgcgggagctgatgcggctggaccggccggggaaacagtattttctggaagggggcccctctgaagcggtccaggatcctgcacatggcgctgaccggggcctcagacccctctgcagaggcagaggccaacggggagaagccctttctgctgcgggcattgcagatcgcgctggtggtctccctctactgggtcacctccatctccatggtgttccttaataagtacctgctggacagcccctccctgcggctggacacccccatcttcgtcaccttctaccagtgcctggtgaccacgctgctgtgcaaaggcctcagcgctctggccgcctgctgccctggtgccgtggacttccccagcttgcgcctggacctcagggtggcccgcagcgtcctgcccctgtcggtggtcttcatcggcatgatcaccttcaataacctctgcctcaagtacgtcggtgtggccttctacaatgtgggccgctcactcaccaccgtcttcaacgtgctgctctcctacctgctgctcaagcagaccacctccttctatgccctgctcacctgcggtatcatcatcgggggcttctggcttggtgtggaccaggagggggcagaaggcaccctgtcgtggctgggcaccgtcttcggcgtgctggctagcctctgtgtctcgctcaacgccatctacaccacgaaggtgctcccggcggtggacggcagcatctggcgcctgactttctacaacaacgtcaacgcctgcatcctcttcctgcccctgctcctgctgctcggggagcttcaggccctgcgtgactttgcccagctgggcagtgcccacttctgggggatgatgacgctgggcggcctgtttggctttgccatcggctacgtgacaggactgcagatcaagttcaccagtccgctgacccacaatgtgtcgggcacggccaaggcctgtgcccagacagtgctggccgtgctctactacgaggagaccaagagcttcctctggtggacgagcaacatgatggtgctgggcggctcctccgcctacacctgggtcaggggctgggagatgaagaagactccggaggagcccagccccaaagacagcgagaagagcgccatgggggtgtgagcaccacaggcaccctggatggcccggccccggggcccgtacacaggcggggccagcacagtagtgaaggcggtctcctggaccccagaagcgtgctgtggtgtggactgggtgctacttatagacccaatcagaatacggtggttgagaaggaaccagtgtttacaagtaatatcagaaagttgaaggaaccagtgtttacaagtaataccagaaagttgccaaacccttctctatcctctcgtatttctgagtttttgtccttcccgagggagcaccctagtgagagttgaaccccttccttctgcctccagggcctgtctgcctccacatcactctgaggacagggacaggcaacaaccttgaagggacagcaatggcaaagccacaaaggcttcactgtactcaggggagatggccctaccacagccacctggagagggttgggaagccttccgtctgcggtgggcaggcagcctcaccctgggcccacagaccggccttcctttggaggaaagtgtggcctggactgagggaggaaatgagcgagttccctctgacaccagcagatccccaggggctgctgggcagtggcctgggaatggggtggattgtgagaaagtgctcaccatctatacaccctgtatgtccagcttttgaacacaagggaaccatgcttctcttagaggttaagcagggtcattaacatcctcccccagtccctaacatcacattgtcctgcgtggctcctctggccctgagtggcacctgtccctctggtctcccagcacctggcccaggtaacagccttctgaaagcagagccaaggagctgcttctctcttctcccagttctacctccccagaagccttcctccccaggtggggctgatggagcaagggtccagactaggagccttccaccccagctgtgtctggcgcccctagatctctgcaagggaggtgttacagctggttctgagccgcttgccttgtgatggtaagacaccaacctttacattcttccctgaggttgtggctgacagagcctgcttggccccactgttagtccagcgagctcctatatcaaaatgccgtaggccgggtggcttacaaacaacagaaacgtattgctcacagtcctggggggctgggacgtccaagatcaagaggccagcagattcggactccgctgagggctgtttcccgatccatagatggtgccttctcgctgtatcctcaatggtagaagcacaaacaagcaagctccttcctgcctcttttataaggactccaaccctgttcatgagggctccgcccccatgacccaatcagctccaaaggccccacctcctaatactgtcaccttgggggtgagaattccaatgtgaatttgcagggggagtgggggacacacacaaatttcggggccataccacccttcaccacaccctcctgcgctcagggtggcttgcagtccctggcccttctggtgggcatttggtatgtcctttctcttggggtgatttctgatgtttttactctatatagtgaaaagctagggagagcgggtcttctcccccctccctctccagtcccctcacaatcccagatgggttctaatgcagctgctggggcctgatgccctgagttgtttgtgattcaataaagaatccataaga

SEQ ID NO: 414236 - DNA, 1634 bp, Homo sapiens
cgcacttctggaagtgcaagccggtagcgcggcgggccagggatacagccaagtcccgggacgtgccagctgcggtaactgaagccgggtcccgggcgggcgggggtaccagggacaggagtagccttggaaagaggagagggcctcctcccacgaccgtccggatcaccgcctctccgccggcacccccggggcccatgccgcgaacaggccggcgaggctggcaaggtgcccgggcccggggcggaaagcaggaagtcgatcccgcgggcgcggcccagggtgcggcgctgcagatgcagcacggggtcgcggggcgggcgcccagtgcaccggaggaggtgagcgccaggtcgccttcgcggcccggggacacaggcagggacgcgggagctgatgcggctggaccggccggggaaacagtattttctggaagggggcccctctgaagcggtccaggatcctgcacatggcgctgaccggggcctcagacccctctgcagaggcagaggccaacggggagaagccctttctgctgcgggcattgcagatcgcgctggtggtctccctctactgggtcacctccatctccatggtgttccttaataagtacctgctggacagcccctccctgcggctggacacccccatcttcgtcaccttctaccagtgcctggtgaccacgctgctgtgcaaaggcctcagcgctctggccgcctgctgccctggtgccgtggacttccccagcttgcgcctggacctcagggtggcccgcagcgtcctgcccctgtcggtggtcttcatcggcatgatcaccttcaataacctctgcctcaagtacgtcggtgtggccttctacaatgtgggccgctcactcaccaccgtcttcaacgtgctgctctcctacctgctgctcaagcagaccacctccttctatgccctgctcacctgcggtatcatcatcgggggcttctggcttggtgtggaccaggagggggcagaaggcaccctgtcgtggctgggcaccgtcttcggcgtgctggctagcctctgtgtctcgctcaacgccatctacaccacgaaggtgctcccggcggtggacggcagcatctggcgcctgactttctacaacaacgtcaacgcctgcatcctcttcctgcccctgctcctgctgctcggggagcttcaggccctgcgtgactttgcccagctgggcagtgcccacttctgggggatgatgacgctgggcggcctgtttggctttgccatcggctacgtgacaggactgcagatcaagttcacctcctaatactgtcaccttgggggtgagaattccaatgtgaatttgcagggggagtgggggacacacacaaatttcggggccataccacccttcaccacaccctcctgcgctcagggtggcttgcagtccctggcccttctggtgggcatttggtatgtcctttctcttggggtgatttctgatgtttttactctatatagtgaaaagctagggagagcgggtcttctcccccctccctctccagtcccctcacaatcccagatgggttctaatgcagctgctggggcctgatgccctgagttgtttgtgattcaataaagaatccataaga

SEQ ID NO: 414237 - DNA, 1824 bp, Homo sapiens
  misc_feature (1)..(1): n is a, c, g, or t
naagtgagtccagggcccgcctcccggggagtcggcctcggatgtccggaggctcctgggctgagccggcgacagagcccgggaaggcagcgagacgtgggcgccggcccagccccctcccgcgtccttcagccccaagccccgagcccctctgacccttccgcagccctccctccagccgcgcccggcctccggcagctccctgtacgcctccctccccctgcccgcccctccctcccacagccgcccatgacgccctctcggcacctcttcccactctgccacgcgtccttttcctgcaccttcgccccgcgtacctactcctgccccgccctgccattcctctcccctcccttctctctgcgacccctccctgttaggccccagcctcttctcccctcacaggtcttctctgtcctggcctcaccgccttatcctattcctctcccttgccctgtgtcttgtctcagagccccctcggggtgggagtaggttgtggagcagcacaactgggctcaccccaaagcagaacttctcaatccatgaggacaatggggaggcctttaggccagcccacatgtgacaatggagggctgcggcttccttgcggagagcacaagtgagctcactgccctggactccagggaatcagagttctggccgcggggtgacccagctcctctgctaccatgaatagggcccctctgaagcggtccaggatcctgcacatggcgctgaccggggcctcagacccctctgcagaggcagaggccaacggggagaagccctttctgctgcgggcattgcagatcgcgctggtggtctccctctactgggtcacctccatctccatggtgttccttaataagtacctgctggacagcccctccctgcggctggacacccccatcttcgtcaccttctaccagtgcctggtgaccacgctgctgtgcaaaggcctcagcgctctggccgcctgctgccctggtgccgtggacttccccagcttgcgcctggacctcagggtggcccgcagcgtcctgcccctgtcggtggtcttcatcggcatgatcaccttcaataacctctgcctcaagtacgtcggtgtggccttctacaatgtgggccgctcactcaccaccgtcttcaacgtgctgctctcctacctgctgctcaagcagaccacctccttctatgccctgctcacctgcggtatcatcatcgggggcttctggcttggtgtggaccaggagggggcagaaggcaccctgtcgtggctgggcaccgtcttcggcgtgctggctagcctctgtgtctcgctcaacgccatctacaccacgaaggtgctcccggcggtggacggcagcatctggcgcctgactttctacaacaacgtcaacgcctgcatcctcttcctgcctcttttataaggactccaaccctgttcatgagggctccgcccccatgacccaatcagctccaaaggccccacctcctaatactgtcaccttgggggtgagaattccaatgtgaatttgcagggggagtgggggacacacacaaatttcggggccataccacccttcaccacaccctcctgcgctcagggtggcttgcagtccctggcccttctggtgggcatttggtatgtcctttctcttggggtgatttctgatgtttttactctatatagtgaaaagctagggagagcgggtcttctcccccctccctctccagtcccctcacaatcccagatgggttctaatgcagctgctggggcctgatgccctgagttgtttgtgattcaataaagaatccataaga

SEQ ID NO: 414238 - DNA, 3313 bp, Homo sapiens
  misc_feature (1)..(1): n is a, c, g, or t
naagtgagtccagggcccgcctcccggggagtcggcctcggatgtccggaggctcctgggctgagccggcgacagagcccgggaaggcagcgagacgtgggcgccggcccagccccctcccgcgtccttcagccccaagccccgagcccctctgacccttccgcagccctccctccagccgcgcccggcctccggcagctccctgtacgcctccctccccctgcccgcccctccctcccacagccgcccatgacgccctctcggcacctcttcccactctgccacgcgtccttttcctgcaccttcgccccgcgtacctactcctgccccgccctgccattcctctcccctcccttctctctgcgacccctccctgttaggccccagcctcttctcccctcacaggtcttctctgtcctggcctcaccgccttatcctattcctctcccttgccctgtgtcttgtctcagagccccctcggggtgggagtaggttgtggagcagcacaactgggctcaccccaaagcagaacttctcaatccatgaggacaatggggaggcctttaggccagcccacatgtgacaatggagggctgcggcttccttgcggagagcacaagtgagctcactgccctggactccagggaatcagagttctggccgcggggtgacccagctcctctgctaccatgaatagggcccctctgaagcggtccaggatcctgcacatggcgctgaccggggcctcagacccctctgcagaggcagaggccaacggggagaagccctttctgctgcgggcattgcagatcgcgctggtggtctccctctactgggtcacctccatctccatggtgttccttaataagtacctgctggacagcccctccctgcggctggacacccccatcttcgtcaccttctaccagtgcctggtgaccacgctgctgtgcaaaggcctcagcgctctggccgcctgctgccctggtgccgtggacttccccagcttgcgcctggacctcagggtggcccgcagcgtcctgcccctgtcggtggtcttcatcggcatgatcaccttcaataacctctgcctcaagtacgtcggtgtggccttctacaatgtgggccgctcactcaccaccgtcttcaacgtgctgctctcctacctgctgctcaagcagaccacctccttctatgccctgctcacctgcggtatcatcatcgggggcttctggcttggtgtggaccaggagggggcagaaggcaccctgtcgtggctgggcaccgtcttcggcgtgctggctagcctctgtgtctcgctcaacgccatctacaccacgaaggtgctcccggcggtggacggcagcatctggcgcctgactttctacaacaacgtcaacgcctgcatcctcttcctgcccctgctcctgctgctcggggagcttcaggccctgcgtgactttgcccagctgggcagtgcccacttctgggggatgatgacgctgggcggcctgtttggctttgccatcggctacgtgacaggactgcagatcaagttcaccagtccgctgacccacaatgtgtcgggcacggccaaggcctgtgcccagacagtgctggccgtgctctactacgaggagaccaagagcttcctctggtggacgagcaacatgatggtgctgggcggctcctccgcctacacctgggtcaggggctgggagatgaagaagactccggaggagcccagccccaaagacagcgagaagagcgccatgggggtgtgagcaccacaggcaccctggatggcccggccccggggcccgtacacaggcggggccagcacagtagtgaaggcggtctcctggaccccagaagcgtgctgtggtgtggactgggtgctacttatagacccaatcagaatacggtggttgagaaggaaccagtgtttacaagtaatatcagaaagttgaaggaaccagtgtttacaagtaataccagaaagttgccaaacccttctctatcctctcgtatttctgagtttttgtccttcccgagggagcaccctagtgagagttgaaccccttccttctgcctccagggcctgtctgcctccacatcactctgaggacagggacaggcaacaaccttgaagggacagcaatggcaaagccacaaaggcttcactgtactcaggggagatggccctaccacagccacctggagagggttgggaagccttccgtctgcggtgggcaggcagcctcaccctgggcccacagaccggccttcctttggaggaaagtgtggcctggactgagggaggaaatgagcgagttccctctgacaccagcagatccccaggggctgctgggcagtggcctgggaatggggtggattgtgagaaagtgctcaccatctatacaccctgtatgtccagcttttgaacacaagggaaccatgcttctcttagaggttaagcagggtcattaacatcctcccccagtccctaacatcacattgtcctgcgtggctcctctggccctgagtggcacctgtccctctggtctcccagcacctggcccaggtaacagccttctgaaagcagagccaaggagctgcttctctcttctcccagttctacctccccagaagccttcctccccaggtggggctgatggagcaagggtccagactaggagccttccaccccagctgtgtctggcgcccctagatctctgcaagggaggtgttacagctggttctgagccgcttgccttgtgatggtaagacaccaacctttacattcttccctgaggttgtggctgacagagcctgcttggccccactgttagtccagcgagctcctatatcaaaatgccgtaggccgggtggcttacaaacaacagaaacgtattgctcacagtcctggggggctgggacgggctccgcccccatgacccaatcagctccaaaggccccacctcctaatactgtcaccttgggggtgagaattccaatgtgaatttgcagggggagtgggggacacacacaaatttcggggccataccacccttcaccacaccctcctgcgctcagggtggcttgcagtccctggcccttctggtgggcatttggtatgtcctttctcttggggtgatttctgatgtttttactctatatagtgaaaagctagggagagcgggtcttctcccccctccctctccagtcccctcacaatcccagatgggttctaatgcagctgctggggcctgatgccctgagttgtttgtgattcaataaagaatccataaga

SEQ ID NO: 414239 - DNA, 1276 bp, Homo sapiens
cgcacttctggaagtgcaagccggtagcgcggcgggccagggatacagccaagtcccgggacgtgccagctgcggtaactgaagccgggtcccgggcgggcgggggtaccagggacaggagtagccttggaaagaggagagggcctcctcccacgaccgtccggatcaccgcctctccgccggcacccccggggcccatgccgcgaacaggccggcgaggctggcaaggtgcccgggcccggggcggaaagcaggaagtcgatcccgcgggcgcggcccagggtgcggcgctgcagatgcagcacggggtcgcggggcgggcgcccagtgcaccggaggaggtgagcgccaggtcgccttcgcggcccggggacacaggcagggacgcgggagctgatgcggctggaccggccggggaaacagtattttctggaagggggcccctctgaagcggtccaggatcctgcacatggcgctgaccggggcctcagacccctctgcagaggcagaggccaacggggagaagccctttctgctgcgggcattgcagatcgcgctggtggtctccctctactgggtcacctccatctccatggtgttccttaataagtacctgctggacagcccctccctgcggctggacacccccatcttcgtcaccttctaccagtgcctggtgaccacgctgctgtgcaaaggcctcagcgctctggccgcctgctgccctggtgccgtggacttccccagcttgcgcctggacctcagggtggcccgcagcgtcctgcccctgtcggtggtcttcatcggcatgatcaccttcaataacctctgcctcaagtacgtcggtgtggccttctacaatgtgggccgctcactcaccaccgtcttcaacgtgctgctctcctacctgctgctcaagcagaccacctccttctatgccctgctcacctgcggtatcatcatcggtgagtggcagctggggccacgggggatagagtggtcatggggactgaagcagtgaagaacaactcttctaggcatcctaggacttcatctgtcccagctcctttggtgcagcagtcataggagaaagagcctgggggcacagagagagcaagtaacttactaaaggtcacccagcaagttaggagcccagccggggcaagaacaatagtaataataatagtaacaacagcagcaggaggaggacagcagcaggaggagagcagcaggaggagcacagcaggaggaggacagcagcaggaggagcggggat

SEQ ID NO: 414240 - DNA, 282 bp, Homo sapiens
caaggtttcacataggcaggaagcaaggaggatagtgaagcatctaggtggaggtggaactcttactgagaaaaacatgaagtagtaaaatcaccctttctttgatataaatgcatttagaagtcaatgagggcacttacagctgtgtttcccttcactaacttttcatctcttgcattctttacttctctttctcaatttattcatcttgaggtatacttatcctgagttgactctgagcagcccatcctcaaaacacaaacaatgttaggatgagaagtt

SEQ ID NO: 414241 - DNA, 669 bp, Homo sapiens
aaaaaaaaaaaaaaaaaggtacctgtcagaaaaatctagagagcaaaacggtacacatactgaagagtagctctctcttctgttcctctactttttagaagctgtttccttcattctgttcctggcctcaagtgatcctcccgcctccagctaccagagtgctaggattataggtatgagccaccacacctagccaattattctttctaaaacacactctgattatgtcatcctctttttcagctatctgcagagaatcccattgtgtgtagaatgtttttaacttgacagaggtttccatggctctctcaggtcctcgtttccaagaaggaacaactgttgtgtctaaaagggctactgccttatgcagcctatttgctgcatgaactgtgcatgatgtatgcccagggacatttctgaaacaagtaccttgggcacctatgtgcttccaaagctgtatgtgaagctacataactacatgagttgtgccattcgcagaaaggtagtcaagaatcgaacttgtaaagcctgcaaggaccaaacatgtctacctgacttagacttttgagtgctgccccatgacctccaccaaagtccgtataaggagccgactccttaaggactgaagaaaaactatcttctggaaaaagataaagtggagattatact

SEQ ID NO: 414242 - DNA, 942 bp, Homo sapiens
tgctggcgccagacggcaccggccgctggtagagcgcgtgccgcgagatgcggcctcaggacagcaccggggtcgcggagctccaggagcccgggctgccgctaacggacgatgcacccccgggcgccactgaggagccggcggccgccgaggcagctggggcgccagaccgcggtaggtgctggctctgcctttcctcgccgtgttgctcccgcaccgagccggccacattgctgtgaggaagcctgggctacatggagaagcccacatgaagaggcccatgtggagaggaactgaggccctgacacttggccccatctgcactaccagctgatagccagcatgagcctgccagccagagtctgcagaccatacttaaattcccacatctccatgattgaagggaatataaagatgaaactgaagttcacctttttaataggactatatcctccaagatcctagaaagcgttgtgtggccctgattcagatgtctgctttcctatggcaccaaaacaatttttacttggaaaggacactaacatttattgaataaacctcatcccagccaagagcttcttaatctttgtctcattccctcaccaaccttgggagatagactgattgggaactgaagttcaaagaggttgaatggggttacctacctgctaaattctagtcccctcactagtaaatgatgaggttgggccatgaggtctgcctgactccaaagaccttgccctttccaatacttcatgctgcctccataattgagggtggtagaatgcagaacagggagtcatttgtcactgtggtggagaaagagttggtttttgactttgggatttagggatacatatgtcctccttcctccttcccctcctagagcaagagctagaagcgaaagaatagaaggtgatgacaacactgcatatatttcag

SEQ ID NO: 414243 - DNA, 566 bp, Homo sapiens
tgctggcgccagacggcaccggccgctggtagagcgcgtgccgcgagatgcggcctcaggacagcaccggggtcgcggagctccaggagcccgggctgccgctaacggacgatgcacccccgggcgccactgaggagccggcggccgccgaggcagctggggcgccagaccgcgccacattgctgtgaggaagcctgggctacatggagaagcccacatgaagaggcccatgtggagaggaactgaggccctgacacttggccccatctgcactaccagctgatagccagcatgagcctgccagccagaactgtaaaatagcctcaggcaggtccttcaggaggtatggacaagaaggcattgctatcacaggagacgacagctccatgcatgttcctgtccctgaaggccttccagtcagtcaagatgtggaggcggaagacagtgatataaatgatcctgaccctggtaggctaatgtgtgtatttgtgtcttagtttttaagaaaaaagtttaaaaggtaaataaaataaaaaatattaaaaatagaaaaaaagcttacagaa

SEQ ID NO: 414244 - DNA, 1820 bp, Homo sapiens
tgctggcgccagacggcaccggccgctggtagagcgcgtgccgcgagatgcggcctcaggacagcaccggggtcgcggagctccaggagcccgggctgccgctaacggacgatgcacccccgggcgccactgaggagccggcggccgccgaggcagctggggcgccagaccgcgccacattgctgtgaggaagcctgggctacatggagaagcccacatgaagaggcccatgtggagaggaactgaggccctgacacttggccccatctgcactaccagctgatagccagcatgagcctgccagccaggccagcacagtggctcacacctgtaatcccagcatttcgggaggccaaggtggccagatcacttgagtccaggagtttaaggctgcaatgagctacgatcgcgccactgcactccagcctgggtgacagtacgagatacaacagatgaacacacttcctgtttatgtgctttagttcctttgtatgtgcattttagaaaagtcagaagtctttggtactttgcagcatgtgtgcattggtacaacttctaggaagggcaatttggcaccatctatcagatttacttatgtgcaaaatgatatgtacaagtttattccagcctgatttgtaatagcaagaagaaatggaactagcctgaatgtccctcaatagagtactggttaagtaagtcatggtatatacccaaaataaaatgtaatgcaattaaaaataaatttaagaagagcaaggaagctttccatatatgggtgtggaataatgtccaaaattgttaagtgaaaaagcaaaattcatatcatggttgagtatgtgctcatttgtataaaaagagggtaaacagaatattccaggaggatatgcaagaaactgttaacattggttgcctttggcagctgaagggcgaggtgagaggagactttccactgaatccccttttacaccttttgaattttgaaccaggtgggtaaataacttagtcaaaataaaataaaataaaataaaataaaataaaattggtggaacaaaaataaaaaggtgacttgatggaaaagaaaggagaaagaaaaggagtaaaagacatagggagctacatatatacattatgtcatacatacatacatgcatagagagatgtttactgctttaatctgggctgtcaccctgactcaccttacggacttccttttgctccctcctcttttgcctcatagagtctgcagaccatacttaaattcccacatctccatgattgaagggaatataaagatgaaactgaagttcacctttttaataggactatatcctccaagatcctagaaagcgttgtgtggccctgattcagatgtctgctttcctatggcaccaaaacaatttttacttggaaaggacactaacatttattgaataaacctcatcccagccaagagcttcttaatctttgtctcattccctcaccaaccttgggagatagactgattgggaactgaagttcaaagaggttgaatggggttacctacctgctaaattctagtcccctcactagtaaatgatgaggttgggccatgaggtctgcctgactccaaagaccttgccctttccaatacttcatgctgcctccataattgagggtggtagaatgcagaacagggagtcatttgtcactgtggtggagaaagagttggtttttgactttgggatttagggatacatatgtcctccttcctccttcccctcctagagcaagagctagaagcgaaagaatagaaggtgatgacaacactgcatatatttcag

SEQ ID NO: 414245 - DNA, 750 bp, Homo sapiens
tgctggcgccagacggcaccggccgctggtagagcgcgtgccgcgagatgcggcctcaggacagcaccggggtcgcggagctccaggagcccgggctgccgctaacggacgatgcacccccgggcgccactgaggagccggcggccgccgaggcagctggggcgccagaccgcggtaggtgctggctctgcctttcctcgccgtgttgctcccgcaccgagccggccacattgctgtgaggaagcctgggctacatggagaagcccacatgaagaggcccatgtggagaggaactgaggccctgacacttggccccatctgcactaccagctgatagccagcatgagcctgccagccaggtaagaggacatgaattgccttggagttttaccctaaaggttgtggatcaggaaaggtcctaaacaaagcacaggggaatggcactaatctcaccagtaaggtgtgtagccaaaccagctgttccctgttaagaactgtaaaatagcctcaggcaggtccttcaggaggtatggacaagaaggcattgctatcacaggagacgacagctccatgcatgttcctgtccctgaaggccttccagtcagtcaagatgtggaggcggaagacagtgatataaatgatcctgaccctggtaggctaatgtgtgtatttgtgtcttagtttttaagaaaaaagtttaaaaggtaaataaaataaaaaatattaaaaatagaaaaaaagcttacagaa

SEQ ID NO: 414246 - DNA, 4123 bp, Homo sapiens
gagagaagtacacacgcaccccctcactgcctactcctgctttcgggagcctgagtcattcctgccccctcgtagggttccccatttcccggtgcgcgggcaccctgagacagccttgggaattcgttcgcgtccccttccacctgggtccccttccccagtttgcgccccgtaacactcagccaaggacttcctgtgggtcccaggtcaggggccaaggggtcctggaccgctgccacagccccggtgcgcccgggggaggcgcttccttttcctgaactctgggatcctgcgggaggaagtggggaagttgggcgggggtgcagccgagggcgtgccgactgtggaggggccgaccctcgcgcagctctgggccttccttggggaggagctggggtgccagaggcccaggctgaggagcttggcggcgaggtatttggggaagtaaggcctggggtggagaagcgcggaggaatgggccgggcccggctgggaaggcagccctctcccatccacaggtctccctgggttctggcaggagcctgcccctgctgccggcctggcttacttgtccctacttgtcaacaccctggcagcggggtcttcacctggttccagccccttttccccaaggcggcagagaggatggggctgaggagtctgggaaggggccatgggagtccctgctgagctcggggcaggaagtttctgggttgcatcttagccggccccagggagtgcagagccagggagaggggtaccagggacaaaccctagacagacggccctgtccacggttgctcctgctctcctaggaggccccgtgtgggccgcggcccggccctcaccatggagtccatgttcgaggacgacatcagcatcctgacgcaggaggccctggggcctagtgaggtgtggctggacagtcccggagacccctcgcttgggggcgacatgtgctccgcctcccactttgccctcatcactgcttacggagacatcaaggaacggctggggggcctggagagggagaacgccaccctccgacgccgcctcaaagtctacgagatcaagtacccactgatcagtgactttggagaggagcatggcttttctctgtatgaaatcaaggatggctccctgctggaggtggagaaggtcagcctgcagcaacggctcaaccagttccagcatgagttacagaagaacaaggagcaggaagaacagcttggagagatgatccaggcctacgagaaactctgcgtggagaagagtgacttggagacagagctgagggagatgagggccctggtggagacgcacctgcgtcagatctgtggtttggagcagcagctgcggcaacagcaaggcctccaggatgcagccttctccaacctgagcccaccgccagcccccgcccctccctgcactgatttagacctgcactacctggcactgagagggggatctggcttgagtcatgcaggctggccgggctccacacccagtgtgagtgacctggagcggcggcggctagaagaggctttggaggccgcgcagggagaggcccggggggctcagctccgggaggagcagctccaggccgagtgcgagcggctgcagggggagctgaagcagctgcaggagacccgggcccaggatctggcctccaaccagtcggagcgagacatggcgtgggtgaaaagagttggggatgatcaggtgaatttggcgctggcctacaccgagctgacggaggagctgggccggcttcgggagttgagttccctacaggggagaatcttgaggactctgttgcaggaacaggcccggagtggcggccagaggcactcgccgctgtcacaacgccactccccggccccccagtgcccctccccctccccgcctgcccgagcggctcccccgtgccccccgtgccagtcccccgtcccccagcgccgctctcccgtgcccccgtgcccctcgccgcagcagcgccgctctccggcctcaccctcctgcccgtcgcccgtcccgcagcgccgctcgccggtgccgccgtcgtgccagtcccccagcccgcagcgccgttccccggtgccccccagctgcccggccccgcagccccggccaccgccgccgcccccgccgggcgagaggacgctggccgagcgcgcctacgccaagccgcccagccaccacgtgaaggccggcttccagggccgccgcagctactctgagctggcggagggcgcggcctacgcgggcgcctccccgccctggctgcaggccgaagcggccactctccccaagccccgggcctacggcagcgagctctacggccctggcaggcccctcagcccgcggcgcgccttcgagggcatccggctgcgcttcgagaagcagccgtcggaggaggacgagtgggctgtgcccaccagcccgcccagcccggaggtgggcaccatccgctgcgcctccttctgcgcgggcttccccatccccgagtcgcccgccgccaccgcctacgcccacgccgagcacgcgcagtcctggccgtccatcaacttgctgatggagacggtgggctccgacatccgcagctgccccctctgccagctgggtttccctgtcgggtacccggatgatgccctcatcaaacacattgactcccacctggagaacagcaagatctagggcaccagccccacccactggctgtttctccgtcctctcctatcacccccaaacactcactttgaatgctgcatgaatctcgtggggggtccctgcccttgcgacccccagatacctccacttgctaccgagtcaacgtgtgtgccatcttccctggtccaggcaccactcagctctggctcttcctgggaggtcagccgaggctccccccatgctcctggtttctgcttaggaggtggggacttgggctgggatggggacggcatacccctcccaggcctctccctctgcctttctgttcttaatcagggttggatccaagaaggtgtccagtgcttgggcctggggtggggggaaggtgttagaggactccaggagctcctgcacccctccccaaatgtccatctttctcagacggggctctgtctggggagcacccacaggctgcctttggggtcccagagcctgctctgtgcactgaccccagttcctccatcctgtggccagcctagggctcatggcatgggcccccactgggggagggaggcatcttgtttcttgtggttccctgcaggccagtcctgtcctcctttccctgttctgcccactctggggaatagggaggggaggagaggagaggagagggaggatcctggaggactgggaagatctagcctaaagaggcttctctgagggccagggccctacagcatgcccctacggccaggggactgtctgccagcctcccaggcccatgccctcctggtgcccctggcactgaggcacagatcgtcaaggcaggtaccccctcaacccttcttccactggagcccctgacaccacaggtgccctggagcccttgtgtgactcagcctctgttagctgggtgggtgtcatcagcccctgcctcccaggccagaacctgagaacgggcccagggtgctgtggagatcaacttcaaaagagctaaccccttcccacactccacccacccacctacatttcctctgtgaaatctacctcagagttgtaccctcagaaggacgggtaagcaggaggccagggggtccccagggctgaggtggggagccttctacggcgaaagcctgccaccccacaatgaatccaccctgctccactgcgcgcctctcccaggtctcagctctgggtggggagcagtggccgctaccgacagcgcatgtcccgctcttatccaactcttccaggccccacctccctgcacccctcccctctatagagcaggggagtgaaggggtatgtcaggcggggaaggggccaaggacacgtcattgtaccctgagcgtccccagggagtggaaatggggaagggggcctggagaggggaggcaggggcccctgtgctctctgaacaagttgaaagtccaaataaaacttacctgttcca

SEQ ID NO: 414247 - DNA, 395 bp, Homo sapiens
aggggccgcaggaggggcccgggccgacagaggcactcaccccttccccagccgccttccattgcgctcacccgggcgctgggcccagagaggaatgcggaggaaggaggcatttgtggaggccccgtgtgggccgcggcccggccctcaccatggagtccatgttcgaggacgacatcagcatcctgacgcaggaggccctggggcctagtgaggtgtggctggacagtcccggagacccctcgcttgggggcgacatgtgctccgcctcccactttgccctcatcactgcttacggagacatcaaggaacggctggggggcctggagaggggaggcaggggcccctgtgctctctgaacaagttgaaagtccaaataaaacttacctgttcca

SEQ ID NO: 414248 - DNA, 1183 bp, Homo sapiens
ccaccacatgctccaccccaatctgtctggccagtaataagtgctctcgggtctgttcttaatcagggttggatccaagaaggtgtccagtgcttgggcctggggtggggggaaggtgttagaggactccaggagctcctgcacccctccccaaatgtccatctttctcagacggggctctgtctggggagcacccacaggctgcctttggggtcccagagcctgctctgtgcactgaccccagttcctccatcctgtggccagcctagggctcatggcatgggcccccactgggggagggaggcatcttgtttcttgtggttccctgcaggccagtcctgtcctcctttccctgttctgcccactctggggaatagggaggggaggagaggagaggagagggaggatcctggaggactgggaagatctagcctaaagaggcttctctgagggccagggccctacagcatgcccctacggccaggggactgtctgccagcctcccaggcccatgccctcctggtgcccctggcactgaggcacagatcgtcaaggcaggtaccccctcaacccttcttccactggagcccctgacaccacaggtgccctggagcccttgtgtgactcagcctctgttagctgggtgggtgtcatcagcccctgcctcccaggccagaacctgagaacgggcccagggtgctgtggagatcaacttcaaaagagctaaccccttcccacactccacccacccacctacatttcctctgtgaaatctacctcagagttgtaccctcagaaggacgggtaagcaggaggccagggggtccccagggctgaggtggggagccttctacggcgaaagcctgccaccccacaatgaatccaccctgctccactgcgcgcctctcccaggtctcagctctgggtggggagcagtggccgctaccgacagcgcatgtcccgctcttatccaactcttccaggccccacctccctgcacccctcccctctatagagcaggggagtgaaggggtatgtcaggcggggaaggggccaaggacacgtcattgtaccctgagcgtccccagggagtggaaatggggaagggggcctggagaggggaggcaggggcccctgtgctctctgaacaagttgaaagtccaaataaaacttacctgttcca

SEQ ID NO: 414249 - DNA, 356 bp, Homo sapiens
  misc_feature (19)..(19): n is a, c, g, or t
cgcggcccgcgactacggntgctagaagacgacagaagggcaccccacaatgaatccaccctgctccactgcgcgcctctcccaggtctcagctctgggtggggagcagtggccgctaccgacagcgcatgtcccgctcttatccaactcttccaggccccacctccctgcacccctcccctctatagagcaggggagtgaaggggtatgtcaggcggggaaggggccaaggacacgtcattgtaccctgagcgtccccagggagtggaaatggggaagggggcctggagaggggaggcaggggcccctgtgctctctgaacaagttgaaagtccaaataaaacttacctgttcca

SEQ ID NO: 414250 - DNA, 1816 bp, Homo sapiens
tgtgcacaatttaaatttgatgtttttgtttttgccaagctgctttttaagaaggttgtactaatgcacacttttatcttgacactaagattttaaatatgatcagaaaatgggtttctgatagtaaaactgtctacttgtaataattgtggcattagaaaagacctttgtggcttcgttcctcaaactcatttacgaattataaatctgaattccaaatatgaattaactcacacaagataaagctttaacagttagtagcagtactgtaactagagtgcatgttttctgtctccagaaataacattctttttatgccacatttttttaactgaggtgatcattctccaccctcttctttccatgtttttccatgtttgttcaaacttttcattaaatatcttgaggctctaactaaattaagggtggccattaaaattgtatgtgggattccctgaaccaactggtaatgcactaccagcatataaggtgtcctcattaaagcagttggtgattggtacatgggacctcactcatgtatgtttgcatctacttgtgagtcaaaaagttttcttaaagtataggtgggatcatgaaagacatacaattcactggagaaattgtgaaaaagtaaaagattatgaatttaggctcaaagccaatttccctctcatttaattctacatgagcaagtcaaggagtttggtagagctttatgaaatctctaaagattgaaggaaaacaatcactaaaatcgatttgataaagtgcaactaagtagtatgctagcctgttaatggattttcatcttgtcatttaagtttcagcaattgagtaccacactagaacacccacaaatgagattctgttacagagtatcttttttctactacagaacatactgtagacagttattcagtggttaacttgtggaaataatcagaagatgcttttcacttttatgactggatatattttaatatttatcatattaagagaaacttaggttacttacagctcataaacgttgctatgaacatcattcatttattcacttatttatttttatggtgttcctagaaagaatttcctggactaaaggatttatgctttaaaaatattggtagttactgccaagaattgccatccagaaacagtgtagccattcataaactcaacaacaaggtatgagagtgcctgtttcctcatatcctttgtgacaccggattttatcaagcttaaagttttttcattctaggtgggtgaaaatggtattccgttattgataatgtgtggaaatcaagttctaataagtttggggggaggttaattctttatatgtgctgtatgaattaatgccaactgtatgcctttgagagtgaaatcagaataatgtctctccactaaagcaggacttagagcactagttttccaaatgttgtctacagatggaaacactagcatcacctgggtactcgttagaaagtgcagattctctggcggtaccttagacctcctgaattagaaactctgggggtagggttagacatttgtgttttaaacaagccctccaagtggtttcaatgcacattcaaagttgagaaccaatcactgatagagaaaaagcagcttgggtagaaacagttgattatttgcaaatttatattttaaaaagataggattcttaacagtaagctctttataattcaacaatgtgatctttactcctacccccgaaaaactaatatgattttagtgtgtggtagctggatcgaaaacataataaatactcagatatgcaaagaaaaaattttct

SEQ ID NO: 414251 - DNA, 3372 bp, Homo sapiens
  misc_feature (3095)..(3095): n is a, c, g, or t
  misc_feature (3266)..(3266): n is a, c, g, or t
agcgggcgcatgcgcaagggggcgcgccgcctctgccccgcggcgagggtgtctatggagaggcggcggccgcggctgctgaggcggaggctgaggcagtggcgatggcgccctttcctgaagaagtggacgtcttcaccgccccacactggcggatgaagcagctggtggggctctactgcgacaagctttctaaaaccaatttttccaacaacaacgatttccgtgctcttctgcagtctttgtatgctactttcaaggagttcaaaatgcatgagcagattgaaaatgaatacattattggtttgcttcaacaacgcagccagaccatttataatgtacattctgacaataaactctccgagatgcttagcctctttgaaaagggactgaagaatgttaagaatgaatatgaacagttaaattatgcaaaacaactgaaagagagattggaggcttttacaagagattttcttcctcacatgaaagaggaagaggaggtttttcagcccatgttaatggaatattttacctatgaagagcttaaggatattaaaaagaaagtgattgcacaacactgctctcagaaggatactgcagaactccttagaggtcttagcctatggaatcatgctgaagagcgacagaagttttttaaatattccgtggatgaaaagtcagataaagaagcagaagtgtcagaacactccacaggtataacccatcttcctcctgaggtaatgctgtcaattttcagctatcttaatcctcaagagttatgtcgatgcagtcaagtaagcatgaaatggtctcagctgacaaaaacgggatcgctttggaaacatctttaccctgttcattgggccagaggtgactggtatagtggtcccgcaactgaacttgatactgaacctgatgatgaatgggtgaaaaataggaaagatgaaagtcgtgcttttcatgagtgggatgaagatgctgacattgatgaatctgaagagtctgcggaggaatcaattgctatcagcattgcacaaatggaaaaacgtttactccatggcttaattcataacgttctaccatatgttggtacttctgtaaaaaccttagtattagcatacagctctgcagtttccagcaaaatggttaggcagattttagagctttgtcctaacctggagcatctggatcttacccagactgacatttcagattctgcatttgacagttggtcttggcttggttgctgccagagtcttcggcatcttgatctgtctggttgtgagaaaatcacagatgtggccctagagaagatttccagagctcttggaattctgacatctcatcaaagtggctttttgaaaacatctacaagcaaaattacttcaactgcgtggaaaaataaagacattaccatgcagtccaccaagcagtatgcctgtttgcacgatttaactaacaagggcattggagaagaaatagataatgaacacccctggactaagcctgtttcttctgagaatttcacttctccttatgtgtggatgttagatgctgaagatttggctgatattgaagatactgtggaatggagacatagaaatgttgaaagtctttgtgtaatggaaacagcatccaactttagttgttccacctctggttgttttagtaaggacattgttggactaaggactagtgtctgttggcagcagcattgtgcttctccagcctttgcgtattgtggtcactcattttgttgtacaggaacagctttaagaactatgtcatcactcccagaatcttctgcaatgtgtagaaaagcagcaaggactagattgcctaggggaaaagacttaatttactttgggagtgaaaaatctgatcaagagactggacgtgtacttctgtttctcagtttatctggatgttatcagatcacagaccatggtctcagggttttgactctgggaggagggctgccttatttggagcaccttaatctctctggttgtcttactataactggtgcaggcctgcaggatttggtttcagcatgtccttctctgaatgatgaatacttttactactgtgacaacattaacggtcctcatgctgataccgccagtggatgccagaatttgcagtgtggttttcgagcctgctgccgctctggcgaatgacccttgacttctgatctttgtctacttcatttagctgagcaggctttctttcatgcactttactcatagcacatttcttgtgttaaccatccctttttgagcgtgacttgttttggccccatttcttacaacttcagaaatcttaatttaccagtgaattgtaatgttgtttctcttgcaaattatacttttggtttagaaagggattaggtcttttcaaaagggtgagaacagtcttacatttttcttttaaatgaaatgctttaaagaatgttggtaatgccatgtcatttaaagtatttcatagataattttgagttttaaagtccatggaggtgattggttctctttacacattaacactgtaccaagctttgcagatcttttccgacacacatgtctgaagacttattttcaaagacagcacatttttggaaactaatctcttttccgtaatatttcctttatttcaatgattctcagaaggccaattcaaacaaacccacatttaaggttctttaggattatagaataaattggcttctgagtgttagctcagtgagctaggaaagcaccaatcgatatttgtttcctttagggatactttgttctcaccactgtccctatgtcatcaaatttgggagagattttttaaaataccacaatcatttgaagaaatgtataaataaaatctactttgaggactttaccaagtaatactgttgtgttgtgatttttattataaatctcaatccaggtttactttagtatagaataggactacatactttgtctttggacctcccatgaacttattaccctgacaaatagttttagacagatactgaattttattgagctgaattttctttttgaaatgagttattcagtagtcaaaatttgaatccgtaagtntatctactttgctttgttaaaacatcatgagagtggaggcctgccacccagaaaggcacatactagtgccttttagtacaattttatgtcatgtagaagaaaatggcaatgttcctcctattgatacagatacaggcatatgtcatcttattgcgttttgctttattgcantttgcaaataatgcattttttacaaatggaaggtttatggcaactctgcgttgagccagtctattggtgccatgtttccaataaaacttctcctttcaaaaaaaaa

SEQ ID NO: 414252 - DNA, 137 bp, Homo sapiens
ccgatcgtcagaatctgcatttgacagttggtcttggcttggttgctgccagagtcttcggcatcttgatctgtctggttgtgagaaaatcacagatgtggcccaacacggtgcgttggcccaacacagctgcgctg

SEQ ID NO: 414253 - DNA, 2679 bp, Homo sapiens
agcgggcgcatgcgcaagggggcgcgccgcctctgccccgcggcgagggtgtctatggagaggcggcggccgcggctgctgaggcggaggctgaggcagtggcgatggcgccctttcctgaagaagtggacgtcttcaccgccccacactggcggatgaagcagctggtggggctctactgcgacaagaatgaatatgaacagttaaattatgcaaaacaactgaaagagagattggaggcttttacaagagattttcttcctcacatgaaagaggaagaggaggtttttcagcccatgttaatggaatattttacctatgaagagcttaaggatattaaaaagaaagtgattgcacaacactgctctcagaaggatactgcagaactccttagaggtcttagcctatggaatcatgctgaagagcgacagaagttttttaaatattccgtggatgaaaagtcagataaagaagcagaagtgtcagaacactccacaggtataacccatcttcctcctgaggtaatgctgtcaattttcagctatcttaatcctcaagagttatgtcgatgcagtcaagtaagcatgaaatggtctcagctgacaaaaacgggatcgctttggaaacatctttaccctgttcattgggccagaggtgactggtatagtggtcccgcaactgaacttgatactgaacctgatgatgaatgggtgaaaaataggaaagatgaaagtcgtgcttttcatgagtgggatgaagatgctgacattgatgaatctgaagagtctgcggaggaatcaattgctatcagcattgcacaaatggaaaaacgtttactccatggcttaattcataacgttctaccatatgttggtacttctgtaaaaaccttagtattagcatacagctctgcagtttccagcaaaatggttaggcagattttagagctttgtcctaacctggagcatctggatcttacccagactgacatttcagattctgcatttgacagttggtcttggcttggttgctgccagagtcttcggcatcttgatctgtctggttgtgagaaaatcacagatgtggccctagagaagatttccagagctcttggaattctgacatctcatcaaagtggctttttgaaaacatctacaagcaaaattacttcaactgcgtggaaaaataaagacattaccatgcagtccaccaagcagtatgcctgtttgcacgatttaactaacaagggcattggagaagaaatagataatgaacacccctggactaagcctgtttcttctgagaatttcacttctccttatgtgtggatgttagatgctgaagatttggctgatattgaagatactgtggaatggagacatagaaatgttgaaagtctttgtgtaatggaaacagcatccaactttagttgttccacctctggttgttttagtaaggacattgttggactaaggactagtgtctgttggcagcagcattgtgcttctccagcctttgcgtattgtggtcactcattttgttgtacaggaacagctttaagaactatgtcatcactcccagaatcttctgcaatgtgtagaaaagcagcaaggactagattgcctaggggaaaagacttaatttactttgggagtgaaaaatctgatcaagagactggacgtgtacttctgtttctcagtttatctggatgttatcagatcacagaccatggtctcagggttttgactctgggaggagggctgccttatttggagcaccttaatctctctggttgtcttactataactggtgcaggcctgcaggatttggtttcagcatgtccttctctgaatgatgaatacttttactactgtgacaacattaacggtcctcatgctgataccgccagtggatgccagaatttgcagtgtggttttcgagcctgctgccgctctggcgaatgacccttgacttctgatctttgtctacttcatttagctgagcaggctttctttcatgcactttactcatagcacatttcttgtgttaaccatccctttttgagcgtgacttgttttggccccatttcttacaacttcagaaatcttaatttaccagtgaattgtaatgttgtttctcttgcaaattatacttttggtttagaaagggattaggtcttttcaaaagggtgagaacagtcttacatttttcttttaaatgaaatgctttaaagaatgttggtaatgccatgtcatttaaagtatttcatagataattttgagttttaaagtccatggaggtgattggttctctttacacattaacactgtaccaagctttgcagatcttttccgacacacatgtctgaagacttattttcaaagacagcacatttttggaaactaatctcttttccgtaatatttcctttatttcaatgattctcagaaggccaattcaaacaaacccacatttaaggttctttaggattatagaataaattggcttctgagtgttagctcagtgagctaggaaagcaccaatcgatatttgtttcctttagggatactttgttctcaccactgtccctatgtcatcaaatttgggagagattttttaaaataccacaatcatttgaagaaatgtataaataaaatctactttgaggactttaccaagt

SEQ ID NO: 414254 - DNA, 2311 bp, Homo sapiens
gggagatggctcggacatcatagcgatcccggccaccatatcgatccatatcccggcgagggccatcccgatacccatcccgatacccatcccgataccggtctgaatcataacgatctcgatacttgtctccaaagctatcatcacctcttctaggtgggtagtcatcaaagctgtctgtagcaggacgagccctccagtctgtatctgttttgtcagaatcccgatttctatcacggccaaaagaacgatcatccctgtctttaccctgttcattgggccagaggtgactggtatagtggtcccgcaactgaacttgatactgaacctgatgatgaatgggtgaaaaataggaaagatgaaagtcgtgcttttcatgagtgggatgaagatgctgacattgatgaatctgaagagtctgcggaggaatcaattgctatcagcattgcacaaatggaaaaacgtttactccatggcttaattcataacgttctaccatatgttggtacttctgtaaaaaccttagtattagcatacagctctgcagtttccagcaaaatggttaggcagattttagagctttgtcctaacctggagcatctggatcttacccagactgacatttcagattctgcatttgacagttggtcttggcttggttgctgccagagtcttcggcatcttgatctgtctggttgtgagaaaatcacagatgtggccctagagaagatttccagagctcttggaattctgacatctcatcaaagtggctttttgaaaacatctacaagcaaaattacttcaactgcgtggaaaaataaagacattaccatgcagtccaccaagcagtatgcctgtttgcacgatttaactaacaagggcattggagaagaaatagataatgaacacccctggactaagcctgtttcttctgagaatttcacttctccttatgtgtggatgttagatgctgaagatttggctgatattgaagatactgtggaatggagacatagaaatgttgaaagtctttgtgtaatggaaacagcatccaactttagttgttccacctctggttgttttagtaaggacattgttggactaaggactagtgtctgttggcagcagcattgtgcttctccagcctttgcgtattgtggtcactcattttgttgtacaggaacagctttaagaactatgtcatcactcccagaatcttctgcaatgtgtagaaaagcagcaaggactagattgcctaggggaaaagacttaatttactttgggagtgaaaaatctgatcaagagactggacgtgtacttctgtttctcagtttatctggatgttatcagatcacagaccatggtctcagggttttgactctgggaggagggctgccttatttggagcaccttaatctctctggttgtcttactataactggtgcaggcctgcaggatttggtttcagcatgtccttctctgaatgatgaatacttttactactgtgacaacattaacggtcctcatgctgataccgccagtggatgccagaatttgcagtgtggttttcgagcctgctgccgctctggcgaatgacccttgacttctgatctttgtctacttcatttagctgagcaggctttctttcatgcactttactcatagcacatttcttgtgttaaccatccctttttgagcgtgacttgttttggccccatttcttacaacttcagaaatcttaatttaccagtgaattgtaatgttgtttctcttgcaaattatacttttggtttagaaagggattaggtcttttcaaaagggtgagaacagtcttacatttttcttttaaatgaaatgctttaaagaatgttggtaatgccatgtcatttaaagtatttcatagataattttgagttttaaagtccatggaggtgattggttctctttacacattaacactgtaccaagctttgcagatcttttccgacacacatgtctgaagacttattttcaaagacagcacatttttggaaactaatctcttttccgtaatatttcctttatttcaatgattctcagaaggccaattcaaacaaacccacatttaaggttctttaggattatagaataaattggcttctgagtgttagctcagtgagctaggaaagcaccaatcgatatttgtttcctttagggatactttgttctcaccactgtccctatgtcatcaaatttgggagagattttttaaaataccacaatcatttgaagaaatgtataaataaaatctactttgaggactttaccaagt

SEQ ID NO: 414255 - DNA, 3314 bp, Homo sapiens
  misc_feature (3037)..(3037): n is a, c, g, or t
  misc_feature (3208)..(3208): n is a, c, g, or t
agcgggcgcatgcgcaagggggcgcgccgcctctgccccgcggcgagggtgtctatggagaggcggcggccgcggctgctgaggcggaggctgaggcagtggcgatggcgccctttcctgaagaagtggacgtcttcaccgccccacactggcggatgaagcagctggtggggctctactgcgacaagctttctaaaaccaatttttccaacaacaacgatttccgtgctcttctgcagtctttgtatgctactttcaaggagttcaaaatgcatgagcagattgaaaatgaatacattattggtttgcttcaacaacgcagccagaccatttataatgtacattctgacaataaactctccgagatgcttagcctctttgaaaagggactgaagaatgttaagaatgaatatgaacagttaaattatgcaaaacaactgaaagagagattggaggcttttacaagagattttcttcctcacatgaaagaggaagaggaggtttttcagcccatgttaatggaatattttacctatgaagagcttaaggatattaaaaagaaagtgattgcacaacactgctctcagaaggatactgcagaactccttagaggtcttagcctatggaatcatgctgaagagcgacagaagttttttaaatattccgtggatgaaaagtcagataaagaagcagaagtgtcagaacactccacaggtataacccatcttcctcctgaggtaatgctgtcaattttcagctatcttaatcctcaagagttatgtcgatgcagtcaagtaagcatgaaatggtctcagctgacaaaaacgggatcgctttggaaacatctttaccctgttcattgggccagaggtgactggtatagtggtcccgcaactgaacttgatactgaacctgatgatgaatgggtgaaaaataggaaagatgaaagtcgtgcttttcatgagtgggatgaagatgctgacattgatgaatctgaagagtctgcggaggaatcaattgctatcagcattgcacaaatggaaaaacgtttactccatggcttaattcataacgttctaccatatgttggtacttctgtaaaaaccttagtattagcatacagctctgcagtttccagcaaaatggttaggcagattttagagctttgtcctaacctggagcatctggatcttacccagactgacatttcagattctgcatttgacagttggtcttggcttggttgctgccagagtcttcggcatcttgatctgtctggttgtgagaaaatcacagatgtggccctagagaagatttccagagctcttggaattctgacatctcatcaaagtggctttttgaaaacatctacaagcaaaattacttcaactgcgtggaaaaataaagacattaccatgcagtccaccaagcagtatgcctgtttgcacgatttaactaacaagggcattggagaagaaatagataatgaacacccctggactaagcctgtttcttctgagaatttcacttctccttatgtgtggatgttagatgctgaagatttggctgatattgaagatactgtggaatggagacatagaaatgttgaaagtctttgtgtaatggaaacagcatccaactttagttgttccacctctggttgttttagtaaggacattgttggactaaggactagtgtctgttggcagcagcattgtgcttctccagcctttgcgtattgtggtcactcattttgttgtacaggaacagctttaagaactatgtcatcactcccagaatcttctgcaatgtgtagaaaagcagcaaggactagattgcctaggggaaaagacttaatttactttgggattatcagatcacagaccatggtctcagggttttgactctgggaggagggctgccttatttggagcaccttaatctctctggttgtcttactataactggtgcaggcctgcaggatttggtttcagcatgtccttctctgaatgatgaatacttttactactgtgacaacattaacggtcctcatgctgataccgccagtggatgccagaatttgcagtgtggttttcgagcctgctgccgctctggcgaatgacccttgacttctgatctttgtctacttcatttagctgagcaggctttctttcatgcactttactcatagcacatttcttgtgttaaccatccctttttgagcgtgacttgttttggccccatttcttacaacttcagaaatcttaatttaccagtgaattgtaatgttgtttctcttgcaaattatacttttggtttagaaagggattaggtcttttcaaaagggtgagaacagtcttacatttttcttttaaatgaaatgctttaaagaatgttggtaatgccatgtcatttaaagtatttcatagataattttgagttttaaagtccatggaggtgattggttctctttacacattaacactgtaccaagctttgcagatcttttccgacacacatgtctgaagacttattttcaaagacagcacatttttggaaactaatctcttttccgtaatatttcctttatttcaatgattctcagaaggccaattcaaacaaacccacatttaaggttctttaggattatagaataaattggcttctgagtgttagctcagtgagctaggaaagcaccaatcgatatttgtttcctttagggatactttgttctcaccactgtccctatgtcatcaaatttgggagagattttttaaaataccacaatcatttgaagaaatgtataaataaaatctactttgaggactttaccaagtaatactgttgtgttgtgatttttattataaatctcaatccaggtttactttagtatagaataggactacatactttgtctttggacctcccatgaacttattaccctgacaaatagttttagacagatactgaattttattgagctgaattttctttttgaaatgagttattcagtagtcaaaatttgaatccgtaagtntatctactttgctttgttaaaacatcatgagagtggaggcctgccacccagaaaggcacatactagtgccttttagtacaattttatgtcatgtagaagaaaatggcaatgttcctcctattgatacagatacaggcatatgtcatcttattgcgttttgctttattgcantttgcaaataatgcattttttacaaatggaaggtttatggcaactctgcgttgagccagtctattggtgccatgtttccaataaaacttctcctttcaaaaaaaaa

SEQ ID NO: 414256 - DNA, 1074 bp, Homo sapiens
agcgggcgcatgcgcaagggggcgcgccgcctctgccccgcggcgagggtgtctatggagaggcggcggccgcggctgctgaggcggaggctgaggcagtggcgatggcgccctttcctgaagaagtggacgtcttcaccgccccacactggcggatgaagcagctggtggggctctactgcgacaagctttctaaaaccaatttttccaacaacaacgatttccgtgctcttctgcagtctttgtatgctactttcaaggagttcaaaatgcatgagcagattgaaaatgaatacattattggtttgcttcaacaacgcagccagaccatttataatgtacattctgacaataaactctccgagatgcttagcctctttgaaaagggactgaagaatgttaagaatgaatatgaacagttaaattatgcaaaacaactgaaagagagattggaggcttttacaagagattttcttcctcacatgaaagaggaagaggaggtttttcagcccatgttaatggaatattttacctatgaagagcttaaggatattaaaaagaaagtgattgcacaacactgctctcagaaggatactgcagaactccttagaggtcttagcctatggaatcatgctgaagagcgacagaagttttttaaatattccgtggatgaaaagtcagataaagaagcagaagtgtcagaacactccacaggtataacccatcttcctcctgaggtaatgctgtcaattttcagctatcttaatcctcaagagttatgtcgatgcagtcaagtaagcatgaaatggtctcagctgacaaaaacgggatcgctttggaaacatctttaccctgttcattgggccagaggtaggtaaatgggtttttaaaatattttcatgtatttttctagatgaatattcatttacattaatgagcaaggccagagagagaaactctgagaggtcaatcaaaaagtagattttatagttagatgatgttttggtggtatatatttttggaaaactagcagtgatgaaattcatgggtaaattataatgatgtctgtaatta

SEQ ID NO: 414257 - DNA, 2262 bp, Homo sapiens
  misc_feature (1985)..(1985): n is a, c, g, or t
  misc_feature (2156)..(2156): n is a, c, g, or t
agcgggcgcatgcgcaagggggcgcgccgcctctgccccgcggcgagggtgtctatggagaggcggcggccgcggctgctgaggcggaggctgaggcagtggcgatggcgccctttcctgaagaagtggacgtcttcaccgccccacactggcggatgaagcagctggtggggctctactgcgacaagctttctaaaaccaatttttccaacaacaacgatttccgtgctcttctgcagtctttgtatgctactttcaaggagttcaaaatgcatgagcagattgaaaatgaatacattattggtttgcttcaacaacgcagccagaccatttataatgtacattctgacaataaactctccgagatgcttagcctctttgaaaagggactgaagaatgttaagaatgaatatgaacagttaaattatgcaaaacaactgaaagagagattggaggcttttacaagagattttcttcctcacatgaaagaggaagaggaggtttttcagcccatgttaatggaatattttacctatgaagagcttaaggatattaaaaagaaagtgattgcacaacactgctctcagaaggatactgcagaactccttagaggtcttagcctatggaatcatgctgaagagcgacagaagttttttaaatattccgtggatgaaaagtcagataaagaatcttctgcaatgtgtagaaaagcagcaaggactagattgcctaggggaaaagacttaatttactttgggagtgaaaaatctgatcaagagactggacgtgtacttctgtttctcagtttatctggatgttatcagatcacagaccatggtctcagggttttgactctgggaggagggctgccttatttggagcaccttaatctctctggttgtcttactataactggtgcaggcctgcaggatttggtttcagcatgtccttctctgaatgatgaatacttttactactgtgacaacattaacggtcctcatgctgataccgccagtggatgccagaatttgcagtgtggttttcgagcctgctgccgctctggcgaatgacccttgacttctgatctttgtctacttcatttagctgagcaggctttctttcatgcactttactcatagcacatttcttgtgttaaccatccctttttgagcgtgacttgttttggccccatttcttacaacttcagaaatcttaatttaccagtgaattgtaatgttgtttctcttgcaaattatacttttggtttagaaagggattaggtcttttcaaaagggtgagaacagtcttacatttttcttttaaatgaaatgctttaaagaatgttggtaatgccatgtcatttaaagtatttcatagataattttgagttttaaagtccatggaggtgattggttctctttacacattaacactgtaccaagctttgcagatcttttccgacacacatgtctgaagacttattttcaaagacagcacatttttggaaactaatctcttttccgtaatatttcctttatttcaatgattctcagaaggccaattcaaacaaacccacatttaaggttctttaggattatagaataaattggcttctgagtgttagctcagtgagctaggaaagcaccaatcgatatttgtttcctttagggatactttgttctcaccactgtccctatgtcatcaaatttgggagagattttttaaaataccacaatcatttgaagaaatgtataaataaaatctactttgaggactttaccaagtaatactgttgtgttgtgatttttattataaatctcaatccaggtttactttagtatagaataggactacatactttgtctttggacctcccatgaacttattaccctgacaaatagttttagacagatactgaattttattgagctgaattttctttttgaaatgagttattcagtagtcaaaatttgaatccgtaagtntatctactttgctttgttaaaacatcatgagagtggaggcctgccacccagaaaggcacatactagtgccttttagtacaattttatgtcatgtagaagaaaatggcaatgttcctcctattgatacagatacaggcatatgtcatcttattgcgttttgctttattgcantttgcaaataatgcattttttacaaatggaaggtttatggcaactctgcgttgagccagtctattggtgccatgtttccaataaaacttctcctttcaaaaaaaaa

SEQ ID NO: 414258 - DNA, 1101 bp, Homo sapiens
agcgggcgcatgcgcaagggggcgcgccgcctctgccccgcggcgagggtgtctatggagaggcggcggccgcggctgctgaggcggaggctgaggcagtggcgatggcgccctttcctgaagaagtggacgtcttcaccgccccacactggcggatgaagcagctggtggggctctactgcgacaagctttctaaaaccaatttttccaacaacaacgatttccgtgctcttctgcagtctttgtatgctactttcaaggagttcaaaatgcatgagcagattgaaaatgaatacattattggtttgcttcaacaacgcagccagaccatttataatgtacattctgacaataaactctccgagatgcttagcctctttgaaaagggactgaagaatgttaagaatgaatatgaacagttaaattatgcaaaacaactgaaagagagattggaggcttttacaagagattttcttcctcacatgaaagaggaagaggaggtttttcagcccatgttaatggaatattttacctatgaagagcttaaggatattaaaaagaaagtgattgcacaacactgctctcagaaggatactgcagaactccttagaggtcttagcctatggaatcatgctgaagagcgacagaagttttttaaatattccgtggatgaaaagtcagataaagaatcttctgcaatgtgtagaaaagcagcaaggactagattgcctaggggaaaagacttaatttactttgggagtgaaaaatctgatcaagagactggacgtgtacttctgtttctcagtttatctggatgttatcagatcacagaccatggtctcaggtgagttatcagttccagaatattaagaaatagacgtgttctcatttccaaatggaatataaaaattttgatctaagtcattcttttcagttgatttacttagcaaaaaggattaaccaagatctgccctacttcagagttttggagcagtgtaacttctgttatcagtatgaagtttcatttctgtcagttcaaatccattgtgatgtatggaagaacataaattcgaaagtttaataaatacttagtaaatggct

SEQ ID NO: 414259 - DNA, 2895 bp, Homo sapiens
agcgggcgcatgcgcaagggggcgcgccgcctctgccccgcggcgagggtgtctatggagaggcggcggccgcggctgctgaggcggaggctgaggcagtggcgatggcgccctttcctgaagaagtggacgtcttcaccgccccacactggcggatgaagcagctggtggggctctactgcgacaagctttctaaaaccaatttttccaacaacaacgatttccgtgctcttctgcagtctttgtatgctactttcaaggagttcaaaatgcatgagcagattgaaaatgaatacattattggtttgcttcaacaacgcagccagaccatttataatgtacattctgacaataaactctccgagatgcttagcctctttgaaaagggactgaagaatgttaagaatgaatatgaacagttaaattatgcaaaacaactgaaagagagattggaggcttttacaagagattttcttcctcacatgaaagaggaagaggaggtttttcagcccatgttaatggaatattttacctatgaagagcttaaggatattaaaaagaaagtgattgcacaacactgctctcagaaggatactgcagaactccttagaggtcttagcctatggaatcatgctgaagagcgacagaagttttttaaatattccgtggatgaaaagtcagataaagaagcagaagtgtcagaacactccacaggtataacccatcttcctcctgaggtaatgctgtcaattttcagctatcttaatcctcaagagttatgtcgatgcagtcaagtaagcatgaaatggtctcagctgacaaaaacgggatcgctttggaaacatctttaccctgttcattgggccagaggtgactggtatagtggtcccgcaactgaacttgatactgaacctgatgatgaatgggtgaaaaataggaaagatgaaagtcgtgcttttcatgagtgggatgaagatgctgacattgatgaatctgaagagtctgcggaggaatcaattgctatcagcattgcacaaatggaaaaacgtttactccatggcttaattcataacgttctaccatatgttggtacttctgtaaaaaccttagtattagcatacagctctgcagtttccagcaaaatggttaggcagattttagagctttgtcctaacctggagcatctggatcttacccagactgacatttcagattctgcatttgacagttggtcttggcttggttgctgccagagtcttcggcatcttgatctgtctggttgtgagaaaatcacagatgtggccctagagaagatttccagagctcttggaattctgacatctcatcaaagtggctttttgaaaacatctacaagcaaaattacttcaactgcgtggaaaaataaagacattaccatgcagtccaccaagcagtatgcctgtttgcacgatttaactaacaagggcattggagaagaaatagataatgaacacccctggactaagcctgtttcttctgagaatttcacttctccttatgtgtggatgttagatgctgaagatttggctgatattgaagatactgtggaatggagacatagaaatgttgaaagtctttgtgtaatggaaacagcatccaactttagttgttccacctctggttgttttagtaaggacattgttggactaaggactagtgtctgttggcagcagcattgtgcttctccagcctttgcgtattgtggtcactcattttgttgtacaggaacagctttaagaactatgtcatcactcccagaatcttctgcaatgtgtagaaaagcagcaaggactagattgcctaggggaaaagacttaatttactttgggagtgaaaaatctgatcaagagactggacgtgtacttctgtttctcagtttatctggatgttatcagatcacagaccatggtctcagggttttgactctgggaggagggctgccttatttggagcaccttaatctctctggttgtcttactataactggtgcaggcctgcaggatttggtttcagcatgtccttctctgaatgatgaatacttttactactgtgacaacattaacggtcctcatgctgataccgccagtggatgccagaatttgcagtgtggttttcgagcctgctgccgctctggcgaatgacccttgacttctgatctttgtctacttcatttagctgagcaggctttctttcatgcactttactcatagcacatttcttgtgttaaccatccctttttgagcgtgacttgttttggccccatttcttacaacttcagaaatcttaatttaccagtgaattgtaatgttgtttctcttgcaaattatacttttggtttagaaagggattaggtcttttcaaaagggtgagaacagtcttacatttttcttttaaatgaaatgctttaaagaatgttggtaatgccatgtcatttaaagtatttcatagataattttgagttttaaagtccatggaggtgattggttctctttacacattaacactgtaccaagctttgcagatcttttccgacacacatgtctgaagacttattttcaaagacagcacatttttggaaactaatctcttttccgtaatatttcctttatttcaatgattctcagaaggccaattcaaacaaacccacatttaaggttctttaggattatagaataaattggcttctgagtgttagctcagtgagctaggaaagcaccaatcgatatttgtttcctttagggatactttgttctcaccactgtccctatgtcatcaaatttgggagagattttttaaaataccacaatcatttgaagaaatgtataaataaaatctactttgaggactttaccaagt

SEQ ID NO: 414260 - DNA, 2999 bp, Homo sapiens
agcgggcgcatgcgcaagggggcgcgccgcctctgccccgcggcgagggtgtctatggagaggcggcggccgcggctgctgaggcggaggctgaggcagtggcgatggcgccctttcctgaagaagtggacgtcttcaccgccccacactggcggatgaagcagctggtggggctctactgcgacaagctttctaaaaccaatttttccaacaacaacgatttccgtgctcttctgcagtctttgtatgctactttcaaggagttcaaaatgcatgagcagattgaaaatgaatacattattggtttgcttcaacaacgcagccagaccatttataatgtacattctgacaataaactctccgagatgcttagcctctttgaaaagggactgaagaatgttaagcctactactgttgactggaagccttaccaataacataaaacaatcgaataacaattatttcatgtattatatgtaaaatatatatactggattcttacagtaagaatgaatatgaacagttaaattatgcaaaacaactgaaagagagattggaggcttttacaagagattttcttcctcacatgaaagaggaagaggaggtttttcagcccatgttaatggaatattttacctatgaagagcttaaggatattaaaaagaaagtgattgcacaacactgctctcagaaggatactgcagaactccttagaggtcttagcctatggaatcatgctgaagagcgacagaagttttttaaatattccgtggatgaaaagtcagataaagaagcagaagtgtcagaacactccacaggtataacccatcttcctcctgaggtaatgctgtcaattttcagctatcttaatcctcaagagttatgtcgatgcagtcaagtaagcatgaaatggtctcagctgacaaaaacgggatcgctttggaaacatctttaccctgttcattgggccagaggtgactggtatagtggtcccgcaactgaacttgatactgaacctgatgatgaatgggtgaaaaataggaaagatgaaagtcgtgcttttcatgagtgggatgaagatgctgacattgatgaatctgaagagtctgcggaggaatcaattgctatcagcattgcacaaatggaaaaacgtttactccatggcttaattcataacgttctaccatatgttggtacttctgtaaaaaccttagtattagcatacagctctgcagtttccagcaaaatggttaggcagattttagagctttgtcctaacctggagcatctggatcttacccagactgacatttcagattctgcatttgacagttggtcttggcttggttgctgccagagtcttcggcatcttgatctgtctggttgtgagaaaatcacagatgtggccctagagaagatttccagagctcttggaattctgacatctcatcaaagtggctttttgaaaacatctacaagcaaaattacttcaactgcgtggaaaaataaagacattaccatgcagtccaccaagcagtatgcctgtttgcacgatttaactaacaagggcattggagaagaaatagataatgaacacccctggactaagcctgtttcttctgagaatttcacttctccttatgtgtggatgttagatgctgaagatttggctgatattgaagatactgtggaatggagacatagaaatgttgaaagtctttgtgtaatggaaacagcatccaactttagttgttccacctctggttgttttagtaaggacattgttggactaaggactagtgtctgttggcagcagcattgtgcttctccagcctttgcgtattgtggtcactcattttgttgtacaggaacagctttaagaactatgtcatcactcccagaatcttctgcaatgtgtagaaaagcagcaaggactagattgcctaggggaaaagacttaatttactttgggagtgaaaaatctgatcaagagactggacgtgtacttctgtttctcagtttatctggatgttatcagatcacagaccatggtctcagggttttgactctgggaggagggctgccttatttggagcaccttaatctctctggttgtcttactataactggtgcaggcctgcaggatttggtttcagcatgtccttctctgaatgatgaatacttttactactgtgacaacattaacggtcctcatgctgataccgccagtggatgccagaatttgcagtgtggttttcgagcctgctgccgctctggcgaatgacccttgacttctgatctttgtctacttcatttagctgagcaggctttctttcatgcactttactcatagcacatttcttgtgttaaccatccctttttgagcgtgacttgttttggccccatttcttacaacttcagaaatcttaatttaccagtgaattgtaatgttgtttctcttgcaaattatacttttggtttagaaagggattaggtcttttcaaaagggtgagaacagtcttacatttttcttttaaatgaaatgctttaaagaatgttggtaatgccatgtcatttaaagtatttcatagataattttgagttttaaagtccatggaggtgattggttctctttacacattaacactgtaccaagctttgcagatcttttccgacacacatgtctgaagacttattttcaaagacagcacatttttggaaactaatctcttttccgtaatatttcctttatttcaatgattctcagaaggccaattcaaacaaacccacatttaaggttctttaggattatagaataaattggcttctgagtgttagctcagtgagctaggaaagcaccaatcgatatttgtttcctttagggatactttgttctcaccactgtccctatgtcatcaaatttgggagagattttttaaaataccacaatcatttgaagaaatgtataaataaaatctactttgaggactttaccaagt

SEQ ID NO: 414261 - DNA, 2844 bp, Homo sapiens
agcgggcgcatgcgcaagggggcgcgccgcctctgccccgcggcgagggtgtctatggagaggcggcggccgcggctgctgaggcggaggctgaggcagtggcgatggcgccctttcctgaagaagtggacgtcttcaccgccccacactggcggatgaagcagctggtggggctctactgcgacaagtctttgtatgctactttcaaggagttcaaaatgcatgagcagattgaaaatgaatacattattggtttgcttcaacaacgcagccagaccatttataatgtacattctgacaataaactctccgagatgcttagcctctttgaaaagggactgaagaatgttaagaatgaatatgaacagttaaattatgcaaaacaactgaaagagagattggaggcttttacaagagattttcttcctcacatgaaagaggaagaggaggtttttcagcccatgttaatggaatattttacctatgaagagcttaaggatattaaaaagaaagtgattgcacaacactgctctcagaaggatactgcagaactccttagaggtcttagcctatggaatcatgctgaagagcgacagaagttttttaaatattccgtggatgaaaagtcagataaagaagcagaagtgtcagaacactccacaggtataacccatcttcctcctgaggtaatgctgtcaattttcagctatcttaatcctcaagagttatgtcgatgcagtcaagtaagcatgaaatggtctcagctgacaaaaacgggatcgctttggaaacatctttaccctgttcattgggccagaggtgactggtatagtggtcccgcaactgaacttgatactgaacctgatgatgaatgggtgaaaaataggaaagatgaaagtcgtgcttttcatgagtgggatgaagatgctgacattgatgaatctgaagagtctgcggaggaatcaattgctatcagcattgcacaaatggaaaaacgtttactccatggcttaattcataacgttctaccatatgttggtacttctgtaaaaaccttagtattagcatacagctctgcagtttccagcaaaatggttaggcagattttagagctttgtcctaacctggagcatctggatcttacccagactgacatttcagattctgcatttgacagttggtcttggcttggttgctgccagagtcttcggcatcttgatctgtctggttgtgagaaaatcacagatgtggccctagagaagatttccagagctcttggaattctgacatctcatcaaagtggctttttgaaaacatctacaagcaaaattacttcaactgcgtggaaaaataaagacattaccatgcagtccaccaagcagtatgcctgtttgcacgatttaactaacaagggcattggagaagaaatagataatgaacacccctggactaagcctgtttcttctgagaatttcacttctccttatgtgtggatgttagatgctgaagatttggctgatattgaagatactgtggaatggagacatagaaatgttgaaagtctttgtgtaatggaaacagcatccaactttagttgttccacctctggttgttttagtaaggacattgttggactaaggactagtgtctgttggcagcagcattgtgcttctccagcctttgcgtattgtggtcactcattttgttgtacaggaacagctttaagaactatgtcatcactcccagaatcttctgcaatgtgtagaaaagcagcaaggactagattgcctaggggaaaagacttaatttactttgggagtgaaaaatctgatcaagagactggacgtgtacttctgtttctcagtttatctggatgttatcagatcacagaccatggtctcagggttttgactctgggaggagggctgccttatttggagcaccttaatctctctggttgtcttactataactggtgcaggcctgcaggatttggtttcagcatgtccttctctgaatgatgaatacttttactactgtgacaacattaacggtcctcatgctgataccgccagtggatgccagaatttgcagtgtggttttcgagcctgctgccgctctggcgaatgacccttgacttctgatctttgtctacttcatttagctgagcaggctttctttcatgcactttactcatagcacatttcttgtgttaaccatccctttttgagcgtgacttgttttggccccatttcttacaacttcagaaatcttaatttaccagtgaattgtaatgttgtttctcttgcaaattatacttttggtttagaaagggattaggtcttttcaaaagggtgagaacagtcttacatttttcttttaaatgaaatgctttaaagaatgttggtaatgccatgtcatttaaagtatttcatagataattttgagttttaaagtccatggaggtgattggttctctttacacattaacactgtaccaagctttgcagatcttttccgacacacatgtctgaagacttattttcaaagacagcacatttttggaaactaatctcttttccgtaatatttcctttatttcaatgattctcagaaggccaattcaaacaaacccacatttaaggttctttaggattatagaataaattggcttctgagtgttagctcagtgagctaggaaagcaccaatcgatatttgtttcctttagggatactttgttctcaccactgtccctatgtcatcaaatttgggagagattttttaaaataccacaatcatttgaagaaatgtataaataaaatctactttgaggactttaccaagt

SEQ ID NO: 414262 - DNA, 1925 bp, Homo sapiens
agcgggcgcatgcgcaagggggcgcgccgcctctgccccgcggcgagggtgtctatggagaggcggcggccgcggctgctgaggcggaggctgaggcagtggcgatggcgccctttcctgaagaagtggacgtcttcaccgccccacactggcggatgaagcagctggtggggctctactgcgacaagctttctaaaaccaatttttccaacaacaacgatttccgtgctcttctgcagtctttgtatgctactttcaaggagttcaaaatgcatgagcagattgaaaatgaatacattattggtttgcttcaacaacgcagccagaccatttataatgtacattctgacaataaactctccgagatgcttagcctctttgaaaagggactgaagaatgttaagaatgaatatgaacagttaaattatgcaaaacaactgaaagagagattggaggcttttacaagagattttcttcctcacatgaaagaggaagaggaggtttttcagcccatgttaatggaatattttacctatgaagagcttaaggatattaaaaagaaagtgattgcacaacactgctctcagaaggatactgcagaactccttagaggtcttagcctatggaatcatgctgaagagcgacagaagttttttaaatattccgtggatgaaaagtcagataaagaagcagaagtgtcagaacactccacaggtataacccatcttcctcctgaggtaatgctgtcaattttcagctatcttaatcctcaagagttatgtcgatgcagtcaagtaagcatgaaatggtctcagctgacaaaaacgggatcgctttggaaacatctttaccctgttcattgggccagaggtgactggtatagtggtcccgcaactgaacttgatactgaacctgatgatgaatgggtgaaaaataggaaagatgaaagtcgtgcttttcatgagtgggatgaagatgctgacattgatgaatctgaagagtctgcggaggaatcaattgctatcagcattgcacaaatggaaaaacgtttactccatggcttaattcataacgttctaccatatgttggtacttctgtaaaaaccttagtattagcatacagctctgcagtttccagcaaaatggttaggcagattttagagctttgtcctaacctggagcatctggatcttacccagactgacatttcagattctgcatttgacagttggtcttggcttggttgctgccagagtcttcggcatcttgatctgtctggttgtgagaaaatcacagatgtggccctagagaagatttccagagctcttggaattctgacatctcatcaaagtggctttttgaaaacatctacaagcaaaattacttcaactgcgtggaaaaataaagacattaccatgcagtccaccaagcagtatgcctgtttgcacgatttaactaacaagggcattggagaagaaatagataatgaacacccctggactaagcctgtttcttctgagaatttcacttctccttatgtgtggatgttagatgctgaagatttggctgatattgaagatactgtggaatggagacatagaaatgttgaaagtctttgtgtaatggaaacagcatccaactttagttgttccacctctggttgttttagtaaggacattgttggactaaggactagtgtctgttggcagcagcattgtgcttctccagcctttgcgtattgtggtcactcattttgttgtacaggaacagctttaagaactatgtcatcactcccagaatcttctgcaatgtgtagaaaagcagcaaggactagattgcctaggggaaaagacttaatttactttgggattgggaagtggaaaaaaaattttgattcaaagaaaaacttgggaccgcgggaccct

SEQ ID NO: 414263 - DNA, 1864 bp, Homo sapiens
agcgggcgcatgcgcaagggggcgcgccgcctctgccccgcggcgagggtgtctatggagaggcggcggccgcggctgctgaggcggaggctgaggcagtggcgatggcgccctttcctgaagaagtggacgtcttcaccgccccacactggcggatgaagcagctggtggggctctactgcgacaagctttctaaaaccaatttttccaacaacaacgatttccgtgctcttctgcagtctttgtatgctactttcaaggagttcaaaatgcatgagcagattgaaaatgaatacattattggtttgcttcaacaacgcagccagaccatttataatgtacattctgacaataaactctccgagatgcttagcctctttgaaaagggactgaagaatgttaagaatgaatatgaacagttaaattatgcaaaacaactgaaagagagattggaggcttttacaagagattttcttcctcacatgaaagaggaagaggaggtttttcagcccatgttaatggaatattttacctatgaagagcttaaggatattaaaaagaaagtgattgcacaacactgctctcagaaggatactgcagaactccttagaggtcttagcctatggaatcatgctgaagagcgacagaagttttttaaatattccgtggatgaaaagtcagataaagaagcagaagtgtcagaacactccacaggtataacccatcttcctcctgaggtaatgctgtcaattttcagctatcttaatcctcaagagttatgtcgatgcagtcaagtaagcatgaaatggtctcagctgacaaaaacgggatcgctttggaaacatctttaccctgttcattgggccagaggtgactggtatagtggtcccgcaactgaacttgatactgaacctgatgatgaatgggtgaaaaataggaaagatgaaagtcgtgcttttcatgagtgggatgaagatgctgacattgatgaatctgaagagtctgcggaggaatcaattgctatcagcattgcacaaatggaaaaacgtttactccatggcttaattcataacgttctaccatatgttggtacttctgtaaaaaccttagtattagcatacagctctgcagtttccagcaaaatggttaggcagattttagagctttgtcctaacctggagcatctggatcttacccagactgacatttcagattctgcatttgacagttggtcttggcttggttgctgccagagtcttcggcatcttgatctgtctggttgtgagaaaatcacagatgtggccctagagaagatttccagagctcttggaattctgacatctcatcaaagtggctttttgaaaacatctacaagcaaaattacttcaactgcgtggaaaaataaagacattaccatgcagtccaccaagcagtatgcctgtttgcacgatttaactaacaagggcattggagaagaaatagataatgaacacccctggactaagcctgtttcttctgagaatttcacttctccttatgtgtggatgttagatgctgaagatttggctgatattgaagatactgtggaatggagacatagaaatgttgaaagtctttgtgtaatggaaacagcatccaactttagttgttccacctctggttgttttagtaaggacattgttggactaaggactagtgtctgttggcagcagcattgtgcttctccagcctttgcgtattgtggtcactcattttgttgtacaggaacagctttaagaactatgtcatcactcccagaatcttctgcaatgtgtagaaaattctgggaggtggatacatcccgaattccagaccgtacaggacc

SEQ ID NO: 414264 - DNA, 1377 bp, Homo sapiens
  misc_feature (1100)..(1100): n is a, c, g, or t
  misc_feature (1271)..(1271): n is a, c, g, or t
agcgggcgcatgcgcaagggggcgcgccgcctctgccccgcggcgagggtgtctatggagaggcggcggccgcggctgctgaggcggaggctgaggcagtggcgatggcgccctttcctgaagaagtggacgtcttcaccgccccacactggcggatgaagcagctggtggggctctactgcgacaagctttctaaaaccaatttttccaacaacaacgatttccgtgctcttctgcagtctttgtatgctactttcaaggagttcaaaatgcatgagcagattgaaaatgaatacattattggtttgcttcaacaacgcagccagaccatttataatgtacattctgacaataaactctccgagatgcttagcctctttgaaaagggactgaagaatgttaagaaagggtgagaacagtcttacatttttcttttaaatgaaatgctttaaagaatgttggtaatgccatgtcatttaaagtatttcatagataattttgagttttaaagtccatggaggtgattggttctctttacacattaacactgtaccaagctttgcagatcttttccgacacacatgtctgaagacttattttcaaagacagcacatttttggaaactaatctcttttccgtaatatttcctttatttcaatgattctcagaaggccaattcaaacaaacccacatttaaggttctttaggattatagaataaattggcttctgagtgttagctcagtgagctaggaaagcaccaatcgatatttgtttcctttagggatactttgttctcaccactgtccctatgtcatcaaatttgggagagattttttaaaataccacaatcatttgaagaaatgtataaataaaatctactttgaggactttaccaagtaatactgttgtgttgtgatttttattataaatctcaatccaggtttactttagtatagaataggactacatactttgtctttggacctcccatgaacttattaccctgacaaatagttttagacagatactgaattttattgagctgaattttctttttgaaatgagttattcagtagtcaaaatttgaatccgtaagtntatctactttgctttgttaaaacatcatgagagtggaggcctgccacccagaaaggcacatactagtgccttttagtacaattttatgtcatgtagaagaaaatggcaatgttcctcctattgatacagatacaggcatatgtcatcttattgcgttttgctttattgcantttgcaaataatgcattttttacaaatggaaggtttatggcaactctgcgttgagccagtctattggtgccatgtttccaataaaacttctcctttcaaaaaaaaa

SEQ ID NO: 414265 - DNA, 4090 bp, Homo sapiens
ttaacaagtgatcgctgctgtctaggattttgtttcttttcgggggaaccttgacttcctttcccaggcaatccctcctgtgctgaactccagaggaaccaggagtcttggggtcttctctggggcagccccaacccccacccccaggctccagccgcgaggactctgtgcacccctcgggccaggcaacagaacttgttccgtggatatttggagcctccacctgccaaacccgagtgattccttttaccaccccccgccccccacccaggatcattcttcccctcctccagctgttgcagcttgagggggaaaaacaagccagccggtggattttctttatttttatttttcgccccgccggggaacggtgaagtgcttcttctgcatgattttggctgaagaatgctctgcatttccttgatttctatggagacctcagagctggttttgcttctgctgacacctcatctagcaccttctctacctcccagggtctttgcctctatctgtggtttggcattgtacctgggtacaggaagcctttgatgaacttaaaaggagagcctggagaatcatcctgatagactttgagtagaaatggctggacatacttcaaaccacatcttaacatggttcgagccatcactagaaggcaagtgctaacagtaaaggcttatttgcattttatttacatttaatggactgagcattggccaatttccatggcagaaaaatatatttcattttctaggcacaacttctggctgtcagacacttgctgcctttgaatcttgcagcaacatcactaaccacatcccagacatatttccaaatttcaacatctacccccaaaacataggtgtctgagagactccagcattttcggacttcttagtcttgagagtgccaggctatttatctcgaccagccaagctctggagagcaatgttgaatccctgagaagagagagcatggggcgtgctgatttaaaaacagaaaatgcaaagttggactgaaaatatccttagtcttccaagcaatctgcttaagggttccaaacttaccttaatttggtgagaaaagaagctgccctatttttctttcttcttcttctacaactggaaccagccatttccgaaaaccaccaccatggaggttgcaatggtgagtgcggagagctcagggtgcaacagtcacatgccttatggttatgctgcccaggcccgggcccgggagcgggagaggcttgctcactccagggcagctgcagcagctgctgttgcagcggccacagctgctgtcgaaggtagcgggggttctggtgggggctcccaccaccaccaccagtcacgcggggcctgtacctcccatgaccctcagagcagccggggtagtcggaggaggaggcgacagcggtctgagaagaagaaagcccactaccggcagagcagcttccctcattgctctgacctgatgcccagtggctctgaggagaagatcctgagggagctgagtgaggaggaggaagatgaggaggaggaggaagaggaggaagaggagggaaggttttactatagtgaagatgaccatggtgatgagtgttcctacacggatctgctgcctcaggatgagggcggtggcggctacagttcagtccgctacagtgactgttgtgaacgtgtggtgataaatgtgtcaggcctacgctttgagacccaaatgaaaactctggcccagtttccagagactttgttgggagaccctgaaaagaggactcagtactttgaccctttgcgcaatgagtatttttttgacaggaaccgccccagctttgatgccatcttgtattattatcaatcaggaggccgcctgaagaggccagtcaatgtcccctttgatatcttcactgaggaggtgaagttctatcagttgggggaggaggccctgttgaagtttcgggaggacgagggctttgtgagagaagaggaagacagggccctccccgagaatgaatttaaaaagcagatttggctcctctttgaatatccagagagctccagtcctgcaaggggcatagccattgtgtccgtcctggtcatcttaatctccattgtcatcttttgcctggaaaccttgcctgagtttagggacgacagggatctcgtcatggcactgagtgctggcgggcatggtgggttgttgaatgatacttcagcaccccatctggagaactcagggcacacaatattcaatgaccccttcttcatcgtggaaacagtctgtattgtatggttttcctttgagtttgtggttcgctgctttgcttgtcccagccaagcactcttcttcaaaaacatcatgaacatcattgacattgtctccattttgccttacttcatcacactgggcactgacctggcccagcaacaggggggtggcaatggtcagcagcagcaggccatgtcctttgccatcctcagaatcattcgtctggtccgagtattccggatcttcaaactctccaggcactccaaaggcctgcagatcctgggccacaccctcagagccagcatgcgggaactgggccttctgatcttcttcctcttcattggggtcatcctcttttctagtgctgtgtattttgcagaggcggatgaacctactacccatttccaaagcatcccagatgcattttggtgggctgtggtgaccatgacaactgtgggctatggggacatgaagcccatcactgtagggggcaagattgtcgggtccctgtgtgccattgcgggtgtcttaaccattgctttgccagtgccagtgattgtctctaactttaactatttctaccacagagagactgaaaatgaggaacagacacagctaacgcagaatgcagtcagttgtccatacctcccctctaatttgctcaagaaatttcggagctctacttcttcttccctgggggacaagtcagagtatctagagatggaagaaggagttaaggaatctctgtgtgcaaaggaggagaagtgtcagggaaagggggatgacagtgagacagataaaaacaactgttctaatgcaaaggctgtggagactgatgtgtgaatctttttccacctgccactgctcccccctcagcatctccaaatatatttatgcatagagagtgcagttatgaaaatgaaatatgcaaatgatccaatgcatacagtagtacactatttaatggttatacatggcataattgttactaaacttgtattacatatcaaataaatgatacatcttggagaagagggaggaataggagcaaatctatctttatatttttattagaatgcaagaattttgcacattaactggaaaagatgttaacagtaaagatggagagagagagtgtgtgcgtgtgtgtgtatatgtgtgtgtgtgtgaagtaaattgtcaatgttagtaattgtgcagtgaagggaaaagttggcattttgaagtatttactatgtaagaactaatgaatctgagcagtcatttatcagtgctttaacagcatatcgtatgtctttggattctgtagttgttttttaaaaattgtaagaaatactgtgtagagaaaaaagaaagtaaattatttaatagactataggtcacaattttatcttggatttaattaaaatttatttttaactggaaattaacttttaaaaaggctgcaagggcctttagaaattgattatattttgttattaattttgggaagacttaacagcaaatgtctaacattatagaataagtgaaattggagaatatgtaataagttttgtttgcaggtaacaggactggatttttttttctttgcactactttatatgctggagattgagagagacttcaaactgtgaatgtttactaatgtaacagttcaatgacaatcattggaagaatgatttctttagtcttattttattgtttttttttcattgtgtgagactaatgatcatgcagataacatcacaggattctctcctcttttaaaatctaaataactgattgacaaaggaattatgaagtaaaatttagcaactga

SEQ ID NO: 414266 - DNA, 173 bp, Homo sapiens
tgtacagtgggaccagcacactgaagtcagctgcccagaggccaccccagagaagggactacagtcaaagaatgcagcatagacagtggggcacagagttttggtatttttaaaactccaaaatcaagatgatgactcaattattcaaaatatgtgattaaaacacttcctga

SEQ ID NO: 414267 - DNA, 2263 bp, Homo sapiens
gacagcaaatacttccgtaaaacagaccatcaagctttccacttagagcccagtgtggccccaatacctttccttgtcgctcctgcgtgccagtccgcctccgcgtggtccggccgctgcgccacgcccccgctcgccccgcccctggatttgctccctcaaagctgaagtgaggccgggctgaggctcttacagtggtccctgctggcccttggtgacgggtcgcctcagttccgacccggacccgtacgctgctgcgctgacgtggctcccggaagtagggctggcgtagggccgccatgttgcagcaggatagtaatgatgacactgaagatgtttcactgtttgatgcggaagaggagacgactaatagaccaagaaaagccaaaatcagacatccagtagcatcgtttttccacttattctttcgagtcagtgcaatcatcgtctatcttctctgtgagttgctcagcagcagctttattacctgtatggtgacaattatcttgttgttgtcgtgtgacttttgggcagtgaagaatgtcacaggtagactaatggttggcctacgttggtggaatcacattgatgaagatggaaagagccattgggtgtttgaatctagaaaggagtcctctcaagagaataaaactgtgtcagaggctgaatcaagaatcttttggttgggacttattgcctgtccagtactgtgggtgatatttgcctttagtgcactcttctccttcagagtaaagtggttggcggtggttatcatgggtgtggtgctacaaggtgccaacctgtatggttacatcaggtgtaaggtgcgcagcagaaagcatttaaccagcatggctacttcatattttggaaagcagtttttaagacaaaacactggagatgatcagacttcctgaatagagaaagcttatgtgctttgttacattggggaacaactgaagagattcttgactcaaccttttagagcttagtccatgttgcaacgaggagtgttggctttgtttttccacttaaaaactttatttataaaaaggaaaagtagttttcatattaagtttttatttcctttccagcagttggggctagaaagtatgtgttggcactagaaacattgtcaagatttgttctgtggtgtaggtatgcacattccataggtatgcacacggccatgtaatatcagtatatcccaagttaatgaaagtgttcatttacataggtaatggagacctttgcattttgatccatagaacataggaggatgttcttagtctgtctcaaagctctatatgtttacatattatttctgtagattgttttcaggagaaagttttgcttctatggtaagagtgagcactttggcttatgtataagttagaaataattgttagtttttaatatgcacttcgtggggaaatttcttagacgtatgcaagcaagtgaaaacaattagggccagtggtattaactactttataaaattttatttttgtttgtaagaagtcatctacttaaggcccagttaatataagtggaatcatcatagtttaaggaatacccagagattgctgctgttctatttattttacagaaagggtagctagattgaaagctcttcagtggaccttgagctaatagatcttttaccactaaaagagcattattctcatgtcataatgagaataataatttacatacttggcataataaatgcctaaaagacattttattttctgaatctatttttttcttgctataatggggatattgtaaattatgcatttgtattaatggtatttcttaaagcaatctatgtaactgtaaattaaaccaatctacaaactattgtaggcatctgtaaattctgttgtaggtattataaactttgttgaagtcttaatcagcagattatgttgtgaatatatttgtacattgttaaaatagtttttaagattatttgtttaattgaataagtgtcttattggagtgatagctttgaaggtgcaaaactttatatttgtataaaattctactatttacaaggcaaaaaaaaaaaaaaaaaaaaaggggcgggcaaaaatatcctggaggggcaaataacggtaccgttttggaaaggggccaaagggggaaaaacaagaacggcgcgtcaaagcggcgggaaacgccttggcttgggggacctcgggggcattcgcaccacgaaaacggaaaatagtagggacgctcgcagggtcgtaaatgg

SEQ ID NO: 414268 - DNA, 2060 bp, Homo sapiens
  misc_feature (2020)..(2020): n is a, c, g, or t
gacagcaaatacttccgtaaaacagaccatcaagctttccacttagagcccagtgtggccccaatacctttccttgtcgctcctgcgtgccagtccgcctccgcgtggtccggccgctgcgccacgcccccgctcgccccgcccctggatttgctccctcaaagctgaagtgaggccgggctgaggctcttacagtggtccctgctggcccttggtgacgggtcgcctcagttccgacccggacccgtacgctgctgcgctgacgtggctcccggaagtagggctggcgtagggccgccatgttgcagcaggatagtaatgatgacactgaagatgtttcactgtttgatgcggaagaggagacgactaatagaccaagaaaagccaaaatcagacatccagtagcatcgtttttccacttattctttcgagtcagtgcaatcatcgtctatcttctctgtgagttgctcagcagcagctttattacctgtatggtgacaattatcttgttgttgtcgtgtgacttttgggcagtgaagaatgtcacaggtagactaatggttggcctacgttggtggaatcacattgatgaagatggaaagagccattgggtgtttgaatctagaaaggagtcctctcaagagaataaaactgtgtcagaggctgaatcaagaatcttttggttgggacttattgcctgtccagtactgtgggtgatatttgcctttagtgcactcttctccttcagagtaaagtggttggcggtggttatcatgggtgtggtgctacaaggtgccaacctgtatggttacatcaggtgtaaggtgcgcagcagaaagcatttaaccagcatggctacttcatattttggaaagcagtttttaagacaaaacactggagatgatcagacttcctgaatagagaaagcttatgtgctttgttacattggggaacaactgaagagattcttgactcaaccttttagagcttagtccatgttgcaacgaggagtgttggctttgtttttccacttaaaaactttatttataaaaaggaaaagtagttttcatattaagtttttatttcctttccagcagttggggctagaaagtatgtgttggcactagaaacattgtcaagatttgttctgtggtgtaggtatgcacattccataggtatgcacacggccatgtaatatcagtatatcccaagttaatgaaagtgttcatttacataggtaatggagacctttgcattttgatccatagaacataggaggatgttcttagtctgtctcaaagctctatatgtttacatattatttctgtagattgttttcaggagaaagttttgcttctatggtaagagtgagcactttggcttatgtataagttagaaataattgttagtttttaatatgcacttcgtggggaaatttcttagacgtatgcaagcaagtgaaaacaattagggccagtggtattaactactttataaaattttatttttgtttgtaagaagtcatctacttaaggcccagttaatataagtggaatcatcatagtttaaggaatacccagagattgctgctgttctatttattttacagaaagggtagctagattgaaagctcttcagtggaccttgagctaatagatcttttaccactaaaagagcattattctcatgtcataatgagaataataatttacatacttggcataataaatgcctaaaagacattttattttctgaatctatttttttcttgctataatggggatattgtaaattatgcatttgtattaatggtatttcttaaagcaatctatgtaactgtaaattaaaccaatctacaaactattgtaggcatctgtaaattctgttgtaggtattataaactttgttgaagtcttaatcagcagattatgttgtgaatatatttgtacattgttaaaatagtttttaagattatttgtttaattgaataagtgtcttattggagtgatagttgaatacncaggtcatatttatatcacttcggggggggggagtggcgg

SEQ ID NO: 414269 - DNA, 2118 bp, Homo sapiens
gacagcaaatacttccgtaaaacagaccatcaagctttccacttagagcccagtgtggccccaatacctttccttgtcgctcctgcgtgccagtccgcctccgcgtggtccggccgctgcgccacgcccccgctcgccccgcccctggatttgctccctcaaagctgaagtgaggccgggctgaggctcttacagtggtccctgctggcccttggtgacgggtcgcctcagttccgacccggacccgtacgctgctgcgctgacgtggctcccggaagtagggctggcgtagggccgccatgttgcagcaggatagtaatgatgacactgaagatgtttcactgtttgatgcggaagaggagacgactaatagaccaagaaaagccaaaatcagaatgtcacaggtagactaatggttggcctacgttggtggaatcacattgatgaagatggaaagagccattgggtgtttgaatctagaaaggagtcctctcaagagaataaaactgtgtcagaggctgaatcaagaatcttttggttgggacttattgcctgtccagtactgtgggtgatatttgcctttagtgcactcttctccttcagagtaaagtggttggcggtggttatcatgggtgtggtgctacaaggtgccaacctgtatggttacatcaggtgtaaggtgcgcagcagaaagcatttaaccagcatggctacttcatattttggaaagcagtttttaagacaaaacactggagatgatcagacttcctgaatagagaaagcttatgtgctttgttacattggggaacaactgaagagattcttgactcaaccttttagagcttagtccatgttgcaacgaggagtgttggctttgtttttccacttaaaaactttatttataaaaaggaaaagtagttttcatattaagtttttatttcctttccagcagttggggctagaaagtatgtgttggcactagaaacattgtcaagatttgttctgtggtgtaggtatgcacattccataggtatgcacacggccatgtaatatcagtatatcccaagttaatgaaagtgttcatttacataggtaatggagacctttgcattttgatccatagaacataggaggatgttcttagtctgtctcaaagctctatatgtttacatattatttctgtagattgttttcaggagaaagttttgcttctatggtaagagtgagcactttggcttatgtataagttagaaataattgttagtttttaatatgcacttcgtggggaaatttcttagacgtatgcaagcaagtgaaaacaattagggccagtggtattaactactttataaaattttatttttgtttgtaagaagtcatctacttaaggcccagttaatataagtggaatcatcatagtttaaggaatacccagagattgctgctgttctatttattttacagaaagggtagctagattgaaagctcttcagtggaccttgagctaatagatcttttaccactaaaagagcattattctcatgtcataatgagaataataatttacatacttggcataataaatgcctaaaagacattttattttctgaatctatttttttcttgctataatggggatattgtaaattatgcatttgtattaatggtatttcttaaagcaatctatgtaactgtaaattaaaccaatctacaaactattgtaggcatctgtaaattctgttgtaggtattataaactttgttgaagtcttaatcagcagattatgttgtgaatatatttgtacattgttaaaatagtttttaagattatttgtttaattgaataagtgtcttattggagtgatagctttgaaggtgcaaaactttatatttgtataaaattctactatttacaaggcaaaaaaaaaaaaaaaaaaaaaggggcgggcaaaaatatcctggaggggcaaataacggtaccgttttggaaaggggccaaagggggaaaaacaagaacggcgcgtcaaagcggcgggaaacgccttggcttgggggacctcgggggcattcgcaccacgaaaacggaaaatagtagggacgctcgcagggtcgtaaatgg

SEQ ID NO: 414270 - DNA, 298 bp, Homo sapiens
cttaaagcaatctatgtaactgtaaattaaaccaatctacaaactattgtaggcatctgtaaattctgttgtaggtattataaactttgttgaagtcttaatcagcagattatgttgtgaatatatttgtacattgttaaaatagtttttaagattatttgtttaattgaataagtgtcttattggagtgatagctttgaaggtgcaaaactttatatttgtataaaattctactatttacaaggcatttgacatgtgtaatctcatttaaccctcatgataaatatgtaatacttta

SEQ ID NO: 414271 - DNA, 2064 bp, Homo sapiens
gacagcaaatacttccgtaaaacagaccatcaagctttccacttagagcccagtgtggccccaatacctttccttgtcgctcctgcgtgccagtccgcctccgcgtggtccggccgctgcgccacgcccccgctcgccccgcccctggatttgctccctcaaagctgaagtgaggccgggctgaggctcttacagtggtccctgctggcccttggtgacgggtcgcctcagttccgacccggacccgtacgctgctgcgctgacgtggctcccggaagtagggctggcgtagggccgccatgttgcagcaggatagtaatgatgacactgaagatgtttcactgtttgatgcggaagaggagacgactaatagaccaagaaaagccaaaatcagacatccagtagcatcgtttttccacttattctttcgagtcagtgcaatcatcgtctatcttctctgtgagttgctcagcagcagctttattacctgtatggtgacaattatcttgttgttgtcgtgtgacttttgggcagtgaagaatgtcacaggtagactaatggttggcctacgttggtggaatcacattgatgaagatggaaagagccattgggtgtttgaatctagaaaggagtcctctcaagagaataaaactgtgtcagaggctgaatcaagaatcttttggttgggacttattgcctgtccagtactgtgggtgatatttgcctttagtgcactcttctccttcagagtaaagtggttggcggtggttatcatgggtgtggtgctacaaggtgccaacctgtatggttacatcaggtgtaaggtgcgcagcagaaagcatttaaccagcatggctacttcatattttggaaagcagtttttaagacaaaacactggagatgatcagacttcctgaatagagaaagcttatgtgctttgttacattggggaacaactgaagagattcttgactcaaccttttagagcttagtccatgttgcaacgaggagtgttggctttgtttttccacttaaaaactttatttataaaaaggaaaagtagttttcatattaagtttttatttcctttccagcagttggggctagaaagtatgtgttggcactagaaacattgtcaagatttgttctgtggtgtaggtatgcacattccataggtatgcacacggccatgtaatatcagtatatcccaagttaatgaaagtgttcatttacataggtaatggagacctttgcattttgatccatagaacataggaggatgttcttagtctgtctcaaagctctatatgtttacatattatttctgtagattgttttcaggagaaagttttgcttctatggtaagagtgagcactttggcttatgtataagttagaaataattgttagtttttaatatgcacttcgtggggaaatttcttagacgtatgcaagcaagtgaaaacaattagggccagtggtattaactactttataaaattttatttttgtttgtaagaagtcatctacttaaggcccagttaatataagtggaatcatcatagtttaaggaatacccagagattgctgctgttctatttattttacagaaagggtagctagattgaaagctcttcagtggaccttgagctaatagatcttttaccactaaaagagcattattctcatgtcataatgagaataataatttacatacttggcataataaatgcctaaaagacattttattttctgaatctatttttttcttgctataatggggatattgtaaattatgcatttgtattaatggtatttcttaaagcaatctatgtaactgtaaattaaaccaatctacaaactattgtaggcatctgtaaattctgttgtaggtattataaactttgttgaagtcttaatcagcagattatgttgtgaatatatttgtacattgttaaaatagtttttaagattatttgtttaattgaataagtgtcttattggagtgatagctttgaaggtgcaaaactttatatttgtataaaattctactatttacaaggca

SEQ ID NO: 414272 - DNA, 2209 bp, Homo sapiens
gacagcaaatacttccgtaaaacagaccatcaagctttccacttagagcccagtgtggccccaatacctttccttgtcgctcctgcgtgccagtccgcctccgcgtggtccggccgctgcgccacgcccccgctcgccccgcccctggatttgctccctcaaagctgaagtgaggccgggctgaggctcttacagtggtccctgctggcccttggtgacgggtcgcctcagttccgacccggacccgtacgctgctgcgctgacgtggctcccggaagtagggctggcgtagggccgccatgttgcagcaggatagtaatgatgacactgaagatgtttcactgtttgatgcggaagaggagacgactaatagaccaagaaaagccaaaatcagacatccagtagcatcgtttttccacttattctttcgagtcagtgcaatcatcgtctatcttctctgtgagttgctcagcagcagctttattacctgtatggtgacaattatcttgttgttgtcgtgtgacttttgggcagtgaagaatgtcacaggtagactaatggttggcctacgttggtggaatcacattgatgaagatggaaagagccattgggtgtttgaatctagaaaggagtcctctcaagagaataaaactgtgtcagaggctgaatcaagaatcttttggttgggacttattgcctgtccagtactgtgggtgatatttgcctttagtgcactcttctccttcagagtaaagtggttggcggtggttatcatgggtgtggtgctacaaggtgccaacctgtatggttacatcaggtgtaaggtgcgcagcagaaagcatttaaccagcatggctacttcatattttggaaagcagtttttaagacaaaacactggagatgatcagacttcctgaatagagaaagcttatgtgctttgttacattggggaacaactgaagagattcttgactcaaccttttagagcttagtccatgttgcaacgaggagtgttggctttgtttttccacttaaaaactttatttataaaaaggaatatgtgttggcactagaaacattgtcaagatttgttctgtggtgtaggtatgcacattccataggtatgcacacggccatgtaatatcagtatatcccaagttaatgaaagtgttcatttacataggtaatggagacctttgcattttgatccatagaacataggaggatgttcttagtctgtctcaaagctctatatgtttacatattatttctgtagattgttttcaggagaaagttttgcttctatggtaagagtgagcactttggcttatgtataagttagaaataattgttagtttttaatatgcacttcgtggggaaatttcttagacgtatgcaagcaagtgaaaacaattagggccagtggtattaactactttataaaattttatttttgtttgtaagaagtcatctacttaaggcccagttaatataagtggaatcatcatagtttaaggaatacccagagattgctgctgttctatttattttacagaaagggtagctagattgaaagctcttcagtggaccttgagctaatagatcttttaccactaaaagagcattattctcatgtcataatgagaataataatttacatacttggcataataaatgcctaaaagacattttattttctgaatctatttttttcttgctataatggggatattgtaaattatgcatttgtattaatggtatttcttaaagcaatctatgtaactgtaaattaaaccaatctacaaactattgtaggcatctgtaaattctgttgtaggtattataaactttgttgaagtcttaatcagcagattatgttgtgaatatatttgtacattgttaaaatagtttttaagattatttgtttaattgaataagtgtcttattggagtgatagctttgaaggtgcaaaactttatatttgtataaaattctactatttacaaggcaaaaaaaaaaaaaaaaaaaaaggggcgggcaaaaatatcctggaggggcaaataacggtaccgttttggaaaggggccaaagggggaaaaacaagaacggcgcgtcaaagcggcgggaaacgccttggcttgggggacctcgggggcattcgcaccacgaaaacggaaaatagtagggacgctcgcagggtcgtaaatgg

SEQ ID NO: 414273 - DNA, 872 bp, Homo sapiens
ccacgccaccgtgcattctggggaaggagcagcaccaaatccaagatggcggccagcaggaggctgatgaaggagcttgaagaaatccgcaaatgtgggatgaaaaacttccgtaacatccaggttgatgaagctaatttattgacttggcaagggcttattgttcctgacaaccctccatatgataagggagccttcagaatcgaaatcaactttccagcagagtacccattcaaaccaccgaagatcacatttaaaacaaagatctatcacccaaacatcgacgaaaaggggcaggtctgtctgccagtaattagtgccgaaaactggaagccagcaaccaaaaccgaccaagtaatccagtccctcatagcactggtgaatgacccccagcctgagcacccgcttcgggctgacctagctgaagaatactctaaggaccgtaaaaaattctgtaagaatgctgaagagtttacaaagaaatatggggaaaagcgacctgtggactaaaatctgccacgattggttccagcaagtgtgagcagagaccccgtgcagtgcattcagacaccccgcaaagcaggactctgtggaaattgacacgtgccaccgcctggcgttcgcttgtggcagttactaactttctacagttttcttaatcaaaagtggtctaggtaacctgtaaagaaaggattaaaaatttaagatgttcctcttagaagaaaattcaacccctctacagaaaaacacttttggcgcgccgcggcctccgaggagagctttcgaaacacctcgtgtggagggcggggcaccagaggtaaggaacaggtgcccacgtgtcccggagaacgcgggcgagcccggtggggacc

SEQ ID NO: 414274 - DNA, 652 bp, Homo sapiens
  misc_feature (1)..(1): n is a, c, g, or t
  misc_feature (54)..(54): n is a, c, g, or t
nggatccccgggcttcaagaattcggcacgagcaaatccaagatggcggccagnggaggctgatgagagcttgaagaaatccgcaaatgtgggatgaaaaacttccgtaacatccaggttgatgaagctaatttattgacttggcaagggcttattgttcctgacaaccctccatatgataagggagccttcagaatcgaaatcaactttccagcagagtacccattcaaaccaccgaagatcacatttaaaacaaagatctatcacccaaacatcgacgaaaaggggcaggtctgtctgccagtaattagtgccgaaaactggaagccagcaaccaaaaccgaccaagtaatccagtccctcatagcactggtgaatgacccccagcctgagcacccgcttcgggctgacctagctgaagaatactctaaggaccgtaaaaaattctgtaagaatgctgaagagtttacaaagaaatatggggaaaagcgacctgtggactaaaatctgccacgattggttccagcaagtgtgagcagagaccccgtgcagtgcattcagacaccccgcaaagcaggactctgtggaaattgacttaatcaaaagtggtctaggtaacctgtaaagaaaggattaaaaatttaagatgttc

SEQ ID NO: 414275 - DNA, 433 bp, Homo sapiens
gaattcggcacgaggttttggttgctggcttcagttttcggcactaattactggcagacagacctgcccgaccaagtaatccagtccctcatagcactggtgaatgacccccagcctgagcacccgcttcgggctgacctagctgaagaatactctaaggaccgtaaaaaattctgtaagaatgctgaagagtttacaaagaaatatggggaaaagcgacctgtggactaaaatctgccacgattggttccagcaagtgtgagcagagaccccgtgcagtgcattcagacaccccgcaaagcaggactctgtggaaattgacacgtgccaccgcctggcgttcgcttgtggcagttactaactttctacagttttcttaatcaaaagtggtctaggtaacctgtaaagaaaggattaaaaatttaagatgttc

SEQ ID NO: 414276 - DNA, 2735 bp, Homo sapiens
ccacgccaccgtgcattctggggaaggagcagcaccaaatccaagatggcggccagcaggaggctgatgaaggagcttgaagaaatccgcaaatgtgggatgaaaaacttccgtaacatccaggttgatgaagctaatttattgacttggcaagggcttattgttcctgacaaccctccatatgataagggagccttcagaatcgaaatcaactttccagcagagtacccattcaaaccaccgaagatcacatttaaaacaaagatctatcacccaaacatcgacgaaaaggggcaggtctgtctgccagtaattagtgccgaaaactggaagccagcaaccaaaaccgaccaagtaatccagtccctcatagcactggtgaatgacccccagcctgagcacccgcttcgggctgacctagctgaagaatactctaaggaccgtaaaaaattctgtaagaatgctgaagagtttacaaagaaatatggggaaaagcgacctgtggactaaaatctgccacgattggttccagcaagtgtgagcagagaccccgtgcagtgcattcagacaccccgcaaagcaggactctgtggaaattgacacgtgccaccgcctggcgttcgcttgtggcagttactaactttctacagttttcttaatcaaaagtggtctaggtaacctgtaaagaaaggattaaaaatttaagatgttctagttctgctctctttgttttaaaaatcactgcttcaatctacttcaaaagaatggtgtttcttttcttgtccaattttatccaaaatcttcaagttacatttaacccataaggtttaaaaaaaaggaaaaaaaacggttgtggttccctttcttccctacccttgccactcccactttctggcaccgagtttatttttcacttacttacttccccagaccccgggctcgcctccacaaaggagaagagactgccctggcggtcctggtggcttttcttagcatgtgtggcactgttgcccagtgtgggagttggtttaaattctcctgactccagtttataacatccttttaaaaaatttaaaaacaaacagccacacccctcctccagtccttctcctcagttcttgtgtgaaactccagctgatgttaccacagtaacatcagttaattgggcaagccctgatgtcagtgtgtgtaactgacctctggcctggcctgcacagagaagccctataatcacaggtctgtggtggccccgaaatggggggcctgctagtcaggaggatgctgtgcacactgtgtgtgatgaatctcgccagaaaggctcctgaggtcccaggttggcacttctccctgcagccattgtagaagatctgctggtccttgcaggcaaagctacagccagaatgtccgtttgaaactcctagctcatctgtcaccgagcttcatccgaatgtgccacggagcttgctctccacttcctccgtgcagtggccctgccacagccctccctcggcacactttgaccctttgtaggattggaattagcaggactcggctatttaaagcaccagtctggggtcgcctgggcccctgctgaccccctcctccagagcagccagcccagcccgggaacaagacggacttcctctcccttcggactcacagcctttgcagagtcaagctccacttgaagctcactcagtaatatcctttcaatgtgttttatattgttttgactgcctttttttgtagaaataaaaattgaccttagaatttatcgtcagataaacttgtaaagatttgaatattaatgtcttttcaaggcaaatgggattgtccccgcactagtagagaatccatgtcgctctgacaccccaaggaagccgacgatccaaatgccgtgtgtcaccaaccccgcttctgccactggcggcttcccttcttggctcttgggggggactagatcctgtggagaagatgacttaaactttgctttttgttttaattttaattctataacttgagatctttccggggcctacaggcgtgtaagacagcttggtctggtctgtgcagaagtggggagtgatgggcaggttcggcagcctaacattgttcaggcgcatggcccctgcggtgtgtacacgaactcggcttcttttgtcctaggtacgccaagggcaggtttctggagactcccttgtgcccgggatggcaagggcaccgggctggcgtttccacatctgtcttcattagcagaaaagtgatgatggattttatttcactcacactccagtttgtaataaaatgccaaattctgtcagctatccaaacaagccaccatttgttcttgttgcttctctggatccagaaatgttgccattcttggaaactgtcccattgcttcgtatttctgccaacgtagctctgcctgcctgtcaacccctcactgcactctgctcatcacgggaggatacctgtgtgccggcagcccctcagggactctcagccctggcactggcaccccagggttggccccgtcagcagaggaggggcgagctgtggagcagccacccactgctgccccaagctcactcaggaattcacacccgcctggtttcttgaagtgtgctgggtccttccctctgctccctactccccaccacggcagagaataggctttctaagatgctgcgatcccgttctgctgcccgtaataaaaatgctctcagacactg

SEQ ID NO: 414277 - DNA, 2057 bp, Homo sapiens
ccacgccaccgtgcattctggggaaggagcagcaccaaatccaagatggcggccagcaggaggctgatgaaggagcttgaagaaatccgcaaatgtgggatgaaaaacttccgtaacatccaggttgatgaagctaatttattgacttggcaagggcttattgttcctgacaaccctccatatgataagggagccttcagaatcgaaatcaactttccagcagagtacccattcaaaccaccgaagatcacatttaaaacaaagatctatcacccaaacatcgacgaaaaggggcaggtctgtctgccagtaattagtgccgaaaactggaagccagcaaccaaaaccgaccaagtaatccagtccctcatagcactggtgaatgacccccagcctgagcacccgcttcgggctgacctagctgaagaatactctaaggaccgtaaaaaattctgtaagaatgctgaagagtttacaaagaaatatggggaaaagcgacctgtggactaaaatctgccacgattggttccagcaagtgtgagcagagaccccgtgcagtgcattcagacaccccgcaaagcaggactctgtggaaattgacacgtgccaccgcctggcgttcgcttgtggcagttactaactttctacagttttcttaatcaaaagtggtctaggtaacctgtaaagaaaggattaaaaatttaagatgttctagttctgctctctttgttttaaaaatcactgcttcaatctacttcaaaagaatggtgtttcttttcttgtccaattttatccaaaatcttcaagttacatttaacccataaggtttaaaaaaaaggaaaaaaaacggttgtggttccctttcttccctacccttgccactcccactttctggcaccgagtttatttttcacttacttacttccccagaccccgggctcgcctccacaaaggagaagagactgccctggcggtcctggtggcttttcttagcatgtgtggcactgttgcccagtgtgggagttggtttaaattctcctgactccagtttataacatccttttaaaaaatttaaaaacaaacagccacacccctcctccagtccttctcctcagttcttgtgtgaaactccagctgatgttaccacagtaacatcagttaattgggcaagccctgatgtcagtgtgtgtaactgacctctggcctggcctgcacagagaagccctataatcacaggtctgtggtggccccgaaatggggggcctgctagtcaggaggatgctgtgcacactgtgtgtgatgaatctcgccagaaaggctcctgaggtcccaggttggcacttctccctgcagccattgtagaagatctgctggtccttgcaggcaaagctacagccagaatgtccgtttgaaactcctagctcatctgtcaccgagcttcatccgaatgtgccacggagcttgctctccacttcctccgtgcagtggccctgccacagccctccctcggcacactttgaccctttgtaggattggaattagcaggactcggctatttaaagcaccagtctggggtcgcctgggcccctgctgaccccctcctccagagcagccagcccagcccgggaacaagacggacttcctctcccttcggactcacagcctttgcagagtcaagctccacttgaagctcactcagtaatatcctttcaatgtgttttatattgttttgactgcctttttttgtagaaataaaaattgaccttagaatttatcgtcagataaacttgtaaagatttgaatattaatgtcttttcaaggcaaatgggattgtccccgcactagtagagaatccatgtcgctctgacaccccaaggaagccgacgatccaaatgccgtgtgtcaccaaccccgcttctgccactggcggcttcccttcttggctcttgggggggactagatccgcggagttgtatgacggtgaacagcgcccaaggggttttccccgattgcaatacaagagatgtttccggggcaaaacaggccgagttacccgt

SEQ ID NO: 414278 - DNA, 1327 bp, Homo sapiens
ccacgccaccgtgcattctggggaaggagcagcaccaaatccaagatggcggccagcaggaggctgatgaaggagcttgaagaaatccgcaaatgtgggatgaaaaacttccgtaacatccaggttgatgaagctaatttattgacttggcaagggcttattgttcctgacaaccctccatatgataagggagccttcagaatcgaaatcaactttccagcagagtacccattcaaaccaccgaagatcacatttaaaacaaagatctatcacccaaacatcgacgaaaaggggcaggtctgtctgccagtaattagtgccgaaaactggaagccagcaaccaaaaccgaccaagtaatccagtccctcatagcactggtgaatgacccccagcctgagcacccgcttcgggctgacctagctgaagaatactctaaggaccgtaaaaaattctgtaagaatgctgaagagtttacaaagaaatatggggaaaagcgacctgtggactaaaatctgccacgattggttccagcaagtgtgagcagagaccccgtgcagtgcattcagacaccccgcaaagcaggactctgtggaaattgacacgtgccaccgcctggcgttcgcttgtggcagttactaactttctacagttttcttaatcaaaagtggtctaggtaacctgtaaagaaaggattaaaaatttaagatgttctagttctgctctctttgttttaaaaatcactgcttcaatctacttcaaaagaatggtgtttcttttcttgtccaattttatccaaaatcttcaagttacatttaacccataaggtttaaaaaaaaggaaaaaaaacggttgtggttccctttcttccctacccttgccactcccactttctggcaccgagtttatttttcacttacttacttccccagaccccgggctcgcctccacaaaggagaagagactgccctggcggtcctggtggcttttcttagcatgtgtggcactgttgcccagtgtgggagttggtttaaattctcctgactccagtttataacatccttttaaaaaatttaaaaacaaacagccacacccctcctccagtccttctcctcagttcttgtgtgaaactccagctgatgttaccacagtaacatcagttaattgggcaagccctgatgtcagtgtgtgtaactgacctctggcctggcctgcacagagcagaatgagccctcaccctggctggggtcctagcacaggctgtatctgcagagggtcccagaggaacgctggaccaagagaagtcctgggaagcaggggtgccgtggt

SEQ ID NO: 414279 - DNA, 2869 bp, Homo sapiens
  misc_feature (1)..(1): n is a, c, g, or t
  misc_feature (54)..(54): n is a, c, g, or t
nggatccccgggcttcaagaattcggcacgagcaaatccaagatggcggccagnggaggctgatgagagcttgaagaaatccgcaaatgtgggatgaaaaacttccgtaacatccaggttgatgaagctaatttattgacttggcaagggcttattgttcctgacaaccctccatatgataagggagccttcagaatcgaaatcaactttccagcagagtacccattcaaaccaccgaagatcacatttaaaacaaagatctatcacccaaacatcgacgaaaaggggcaggtctgtctgccagtaattagtgccgaaaactggaagccagcaaccaaaaccgaccaagtaatccagtccctcatagcactggtgaatgacccccagcctgagcacccgcttcgggctgacctagctgaagaatactctaaggaccgtaaaaaattctgtaagaatgctgaagagtttacaaagaaatatggggaaaagcgacctgtggactaaaatctgccacgattggttccagcaagtgtgagcagagaccccgtgcagtgcattcagacaccccgcaaagcaggactctgtggaaattgacacgtgccaccgcctggcgttcgcttgtggcagttactaactttctacagttttcttaatcaaaagtggtctaggtaacctgtaaagaaaggattaaaaatttaagatgttctagttctgctctctttgttttaaaaatcactgcttcaatctacttcaaaagaatggtgtttcttttcttgtccaattttatccaaaatcttcaagttacatttaacccataaggtttaaaaaaaaggaaaaaaaacggttgtggttccctttcttccctacccttgccactcccactttctggcaccgagtttatttttcacttacttacttccccagaccccgggctcgcctccacaaaggagaagagactgccctggcggtcctggtggcttttcttagcatgtgtggcactgttgcccagtgtgggagttggtttaaattctcctgactccagtttataacatccttttaaaaaatttaaaaacaaacagccacacccctcctccagtccttctcctcagttcttgtgtgaaactccagctgatgttaccacagtaacatcagttaattgggcaagccctgatgtcagtgtgtgtaactgacctctggcctggcctgcacagagaagccctataatcacaggtctgtggtggccccgaaatggggggcctgctagtcaggaggatgctgtgcacactgtgtgtgatgaatctcgccagaaaggctcctgaggtcccaggttggcacttctccctgcagccattgtagaagatctgctggtccttgcaggcaaagctacagccagaatgtccgtttgaaactcctagctcatctgtcaccgagcttcatccgaatgtgccacggagcttgctctccacttcctccgtgcagtggccctgccacagccctccctcggcacactttgaccctttgtaggattggaattagcaggactcggctatttaaagcaccagtctggggtcgcctgggcccctgctgaccccctcctccagagcagccagcccagcccgggaacaagacggacttcctctcccttcggactcacagcctttgcagagtcaagctccacttgaagctcactcagtaatatcctttcaatgtgttttatattgttttgactgcctttttttgtagaaataaaaattgaccttagaatttatcgtcagataaacttgtaaagatttgaatattaatgtcttttcaaggcaaatgggattgtccccgcactagtagagaatccatgtcgctctgacaccccaaggaagccgacgatccaaatgccgtgtgtcaccaaccccgcttctgccactggcggcttcccttcttggctcttgggggggactagatcctgtggagaagatgacttaaactttgctttttgttttaattttaattctataacttgagatctttccggggcctacaggcgtgtaagacagcttggtctggtctgtgcagaagtggggagtgatgggcaggttcggcagcctaacattgttcaggcgcatggcccctgcggtgtgtacacgaactcggcttcttttgtcctaggtacgccaagggcaggtttctggagactcccttgtgcccgggatggcaagggcaccgggctggcgtttccacatctgtcttcattagcagaaaagtgatgatggattttatttcactcacactccagtttgtaataaaatgccaaattctgtcagctatccaaacaagccaccatttgttcttgttgcttctctggatccagaaatgttgccattcttggaaactgtcccattgcttcgtatttctgccaacgtagctctgcctgcctgtcaacccctcactgcactctgctcatcacgggaggatacctgtgtgccggcagcccctcagggactctcagccctggcactggcaccccagggttggccccgtcagcagaggcttggctttcgagccagtgggtgtctctcctttgggcctgggcggcttgctcctgccagccatgccttcagggtaggctctgagcaagctggcgaacagccctggctgctccaaaaccaaaaagctgggtcctctggaggaggggcgagctgtggagcagccacccactgctgccccaagctcactcaggaattcacacccgcctggtttcttgaagtgtgctgggtccttccctctgctccctactccccaccacggcagagaataggctttctaagatgctgcgatcccgttctgctgcccgtaataaaaatgctctcagacactg

SEQ ID NO: 414280 - DNA, 2844 bp, Homo sapiens
  misc_feature (12)..(12): n is a, c, g, or t
atttcggcaccngggtgggagcggccacaggaggctgatgagagcttgaagaaatccgcaaatgtgggatgaaaaacttccgtaacatccaggttgatgaagctaatttattgacttggcaagggcttattgttcctgacaaccctccatatgataagggagccttcagaatcgaaatcaactttccagcagagtacccattcaaaccaccgaagatcacatttaaaacaaagatctatcacccaaacatcgacgaaaaggggcaggtctgtctgccagtaattagtgccgaaaactggaagccagcaaccaaaaccgaccaagtaatccagtccctcatagcactggtgaatgacccccagcctgagcacccgcttcgggctgacctagctgaagaatactctaaggaccgtaaaaaattctgtaagaatgctgaagagtttacaaagaaatatggggaaaagcgacctgtggactaaaatctgccacgattggttccagcaagtgtgagcagagaccccgtgcagtgcattcagacaccccgcaaagcaggactctgtggaaattgacacgtgccaccgcctggcgttcgcttgtggcagttactaactttctacagttttcttaatcaaaagtggtctaggtaacctgtaaagaaaggattaaaaatttaagatgttctagttctgctctctttgttttaaaaatcactgcttcaatctacttcaaaagaatggtgtttcttttcttgtccaattttatccaaaatcttcaagttacatttaacccataaggtttaaaaaaaaggaaaaaaaacggttgtggttccctttcttccctacccttgccactcccactttctggcaccgagtttatttttcacttacttacttccccagaccccgggctcgcctccacaaaggagaagagactgccctggcggtcctggtggcttttcttagcatgtgtggcactgttgcccagtgtgggagttggtttaaattctcctgactccagtttataacatccttttaaaaaatttaaaaacaaacagccacacccctcctccagtccttctcctcagttcttgtgtgaaactccagctgatgttaccacagtaacatcagttaattgggcaagccctgatgtcagtgtgtgtaactgacctctggcctggcctgcacagagaagccctataatcacaggtctgtggtggccccgaaatggggggcctgctagtcaggaggatgctgtgcacactgtgtgtgatgaatctcgccagaaaggctcctgaggtcccaggttggcacttctccctgcagccattgtagaagatctgctggtccttgcaggcaaagctacagccagaatgtccgtttgaaactcctagctcatctgtcaccgagcttcatccgaatgtgccacggagcttgctctccacttcctccgtgcagtggccctgccacagccctccctcggcacactttgaccctttgtaggattggaattagcaggactcggctatttaaagcaccagtctggggtcgcctgggcccctgctgaccccctcctccagagcagccagcccagcccgggaacaagacggacttcctctcccttcggactcacagcctttgcagagtcaagctccacttgaagctcactcagtaatatcctttcaatgtgttttatattgttttgactgcctttttttgtagaaataaaaattgaccttagaatttatcgtcagataaacttgtaaagatttgaatattaatgtcttttcaaggcaaatgggattgtccccgcactagtagagaatccatgtcgctctgacaccccaaggaagccgacgatccaaatgccgtgtgtcaccaaccccgcttctgccactggcggcttcccttcttggctcttgggggggactagatcctgtggagaagatgacttaaactttgctttttgttttaattttaattctataacttgagatctttccggggcctacaggcgtgtaagacagcttggtctggtctgtgcagaagtggggagtgatgggcaggttcggcagcctaacattgttcaggcgcatggcccctgcggtgtgtacacgaactcggcttcttttgtcctaggtacgccaagggcaggtttctggagactcccttgtgcccgggatggcaagggcaccgggctggcgtttccacatctgtcttcattagcagaaaagtgatgatggattttatttcactcacactccagtttgtaataaaatgccaaattctgtcagctatccaaacaagccaccatttgttcttgttgcttctctggatccagaaatgttgccattcttggaaactgtcccattgcttcgtatttctgccaacgtagctctgcctgcctgtcaacccctcactgcactctgctcatcacgggaggatacctgtgtgccggcagcccctcagggactctcagccctggcactggcaccccagggttggccccgtcagcagaggcttggctttcgagccagtgggtgtctctcctttgggcctgggcggcttgctcctgccagccatgccttcagggtaggctctgagcaagctggcgaacagccctggctgctccaaaaccaaaaagctgggtcctctggaggaggggcgagctgtggagcagccacccactgctgccccaagctcactcaggaattcacacccgcctggtttcttgaagtgtgctgggtccttccctctgctccctactccccaccacggcagagaataggctttctaagatgctgcgatcccgttctgctgcccgtaataaaaatgctctcagacactg

SEQ ID NO: 414281 - DNA, 2763 bp, Homo sapiens
gctgccgcctactactactaaattcgcggccgctcgaccaagggcttattgttcctgacaaccctccatatgataagggagccttcagaatcgaaatcaactttccagcagagtacccattcaaaccaccgaagatcacatttaaaacaaagatctatcacccaaacatcgacgaaaaggggcaggtctgtctgccagtaattagtgccgaaaactggaagccagcaaccaaaaccgaccaagtaatccagtccctcatagcactggtgaatgacccccagcctgagcacccgcttcgggctgacctagctgaagaatactctaaggaccgtaaaaaattctgtaagaatgctgaagagtttacaaagaaatatggggaaaagcgacctgtggactaaaatctgccacgattggttccagcaagtgtgagcagagaccccgtgcagtgcattcagacaccccgcaaagcaggactctgtggaaattgacacgtgccaccgcctggcgttcgcttgtggcagttactaactttctacagttttcttaatcaaaagtggtctaggtaacctgtaaagaaaggattaaaaatttaagatgttctagttctgctctctttgttttaaaaatcactgcttcaatctacttcaaaagaatggtgtttcttttcttgtccaattttatccaaaatcttcaagttacatttaacccataaggtttaaaaaaaaggaaaaaaaacggttgtggttccctttcttccctacccttgccactcccactttctggcaccgagtttatttttcacttacttacttccccagaccccgggctcgcctccacaaaggagaagagactgccctggcggtcctggtggcttttcttagcatgtgtggcactgttgcccagtgtgggagttggtttaaattctcctgactccagtttataacatccttttaaaaaatttaaaaacaaacagccacacccctcctccagtccttctcctcagttcttgtgtgaaactccagctgatgttaccacagtaacatcagttaattgggcaagccctgatgtcagtgtgtgtaactgacctctggcctggcctgcacagagaagccctataatcacaggtctgtggtggccccgaaatggggggcctgctagtcaggaggatgctgtgcacactgtgtgtgatgaatctcgccagaaaggctcctgaggtcccaggttggcacttctccctgcagccattgtagaagatctgctggtccttgcaggcaaagctacagccagaatgtccgtttgaaactcctagctcatctgtcaccgagcttcatccgaatgtgccacggagcttgctctccacttcctccgtgcagtggccctgccacagccctccctcggcacactttgaccctttgtaggattggaattagcaggactcggctatttaaagcaccagtctggggtcgcctgggcccctgctgaccccctcctccagagcagccagcccagcccgggaacaagacggacttcctctcccttcggactcacagcctttgcagagtcaagctccacttgaagctcactcagtaatatcctttcaatgtgttttatattgttttgactgcctttttttgtagaaataaaaattgaccttagaatttatcgtcagataaacttgtaaagatttgaatattaatgtcttttcaaggcaaatgggattgtccccgcactagtagagaatccatgtcgctctgacaccccaaggaagccgacgatccaaatgccgtgtgtcaccaaccccgcttctgccactggcggcttcccttcttggctcttgggggggactagatcctgtggagaagatgacttaaactttgctttttgttttaattttaattctataacttgagatctttccggggcctacaggcgtgtaagacagcttggtctggtctgtgcagaagtggggagtgatgggcaggttcggcagcctaacattgttcaggcgcatggcccctgcggtgtgtacacgaactcggcttcttttgtcctaggtacgccaagggcaggtttctggagactcccttgtgcccgggatggcaagggcaccgggctggcgtttccacatctgtcttcattagcagaaaagtgatgatggattttatttcactcacactccagtttgtaataaaatgccaaattctgtcagctatccaaacaagccaccatttgttcttgttgcttctctggatccagaaatgttgccattcttggaaactgtcccattgcttcgtatttctgccaacgtagctctgcctgcctgtcaacccctcactgcactctgctcatcacgggaggatacctgtgtgccggcagcccctcagggactctcagccctggcactggcaccccagggttggccccgtcagcagaggcttggctttcgagccagtgggtgtctctcctttgggcctgggcggcttgctcctgccagccatgccttcagggtaggctctgagcaagctggcgaacagccctggctgctccaaaaccaaaaagctgggtcctctggaggaggggcgagctgtggagcagccacccactgctgccccaagctcactcaggaattcacacccgcctggtttcttgaagtgtgctgggtccttccctctgctccctactccccaccacggcagagaataggctttctaagatgctgcgatcccgttctgctgcccgtaataaaaatgctctcagacactg

SEQ ID NO: 414282 - DNA, 2596 bp, Homo sapiens
gaattcggcacgaggttttggttgctggcttcagttttcggcactaattactggcagacagacctgcccgaccaagtaatccagtccctcatagcactggtgaatgacccccagcctgagcacccgcttcgggctgacctagctgaagaatactctaaggaccgtaaaaaattctgtaagaatgctgaagagtttacaaagaaatatggggaaaagcgacctgtggactaaaatctgccacgattggttccagcaagtgtgagcagagaccccgtgcagtgcattcagacaccccgcaaagcaggactctgtggaaattgacacgtgccaccgcctggcgttcgcttgtggcagttactaactttctacagttttcttaatcaaaagtggtctaggtaacctgtaaagaaaggattaaaaatttaagatgttctagttctgctctctttgttttaaaaatcactgcttcaatctacttcaaaagaatggtgtttcttttcttgtccaattttatccaaaatcttcaagttacatttaacccataaggtttaaaaaaaaggaaaaaaaacggttgtggttccctttcttccctacccttgccactcccactttctggcaccgagtttatttttcacttacttacttccccagaccccgggctcgcctccacaaaggagaagagactgccctggcggtcctggtggcttttcttagcatgtgtggcactgttgcccagtgtgggagttggtttaaattctcctgactccagtttataacatccttttaaaaaatttaaaaacaaacagccacacccctcctccagtccttctcctcagttcttgtgtgaaactccagctgatgttaccacagtaacatcagttaattgggcaagccctgatgtcagtgtgtgtaactgacctctggcctggcctgcacagagaagccctataatcacaggtctgtggtggccccgaaatggggggcctgctagtcaggaggatgctgtgcacactgtgtgtgatgaatctcgccagaaaggctcctgaggtcccaggttggcacttctccctgcagccattgtagaagatctgctggtccttgcaggcaaagctacagccagaatgtccgtttgaaactcctagctcatctgtcaccgagcttcatccgaatgtgccacggagcttgctctccacttcctccgtgcagtggccctgccacagccctccctcggcacactttgaccctttgtaggattggaattagcaggactcggctatttaaagcaccagtctggggtcgcctgggcccctgctgaccccctcctccagagcagccagcccagcccgggaacaagacggacttcctctcccttcggactcacagcctttgcagagtcaagctccacttgaagctcactcagtaatatcctttcaatgtgttttatattgttttgactgcctttttttgtagaaataaaaattgaccttagaatttatcgtcagataaacttgtaaagatttgaatattaatgtcttttcaaggcaaatgggattgtccccgcactagtagagaatccatgtcgctctgacaccccaaggaagccgacgatccaaatgccgtgtgtcaccaaccccgcttctgccactggcggcttcccttcttggctcttgggggggactagatcctgtggagaagatgacttaaactttgctttttgttttaattttaattctataacttgagatctttccggggcctacaggcgtgtaagacagcttggtctggtctgtgcagaagtggggagtgatgggcaggttcggcagcctaacattgttcaggcgcatggcccctgcggtgtgtacacgaactcggcttcttttgtcctaggtacgccaagggcaggtttctggagactcccttgtgcccgggatggcaagggcaccgggctggcgtttccacatctgtcttcattagcagaaaagtgatgatggattttatttcactcacactccagtttgtaataaaatgccaaattctgtcagctatccaaacaagccaccatttgttcttgttgcttctctggatccagaaatgttgccattcttggaaactgtcccattgcttcgtatttctgccaacgtagctctgcctgcctgtcaacccctcactgcactctgctcatcacgggaggatacctgtgtgccggcagcccctcagggactctcagccctggcactggcaccccagggttggccccgtcagcagaggcttggctttcgagccagtgggtgtctctcctttgggcctgggcggcttgctcctgccagccatgccttcagggtaggctctgagcaagctggcgaacagccctggctgctccaaaaccaaaaagctgggtcctctggaggaggggcgagctgtggagcagccacccactgctgccccaagctcactcaggaattcacacccgcctggtttcttgaagtgtgctgggtccttccctctgctccctactccccaccacggcagagaataggctttctaagatgctgcgatcccgttctgctgcccgtaataaaaatgctctcagacactg

SEQ ID NO: 414283 - DNA, 2579 bp, Homo sapiens
cccccccccccccccccccactcccgcccccatcccaccacaaaccacaccgcacaatctaatccagtccctcatagcactggtgaatgacccccagcctgagcacccgcttcgggctgacctagctgaagaatactctaaggaccgtaaaaaattctgtaagaatgctgaagagtttacaaagaaatatggggaaaagcgacctgtggactaaaatctgccacgattggttccagcaagtgtgagcagagaccccgtgcagtgcattcagacaccccgcaaagcaggactctgtggaaattgacacgtgccaccgcctggcgttcgcttgtggcagttactaactttctacagttttcttaatcaaaagtggtctaggtaacctgtaaagaaaggattaaaaatttaagatgttctagttctgctctctttgttttaaaaatcactgcttcaatctacttcaaaagaatggtgtttcttttcttgtccaattttatccaaaatcttcaagttacatttaacccataaggtttaaaaaaaaggaaaaaaaacggttgtggttccctttcttccctacccttgccactcccactttctggcaccgagtttatttttcacttacttacttccccagaccccgggctcgcctccacaaaggagaagagactgccctggcggtcctggtggcttttcttagcatgtgtggcactgttgcccagtgtgggagttggtttaaattctcctgactccagtttataacatccttttaaaaaatttaaaaacaaacagccacacccctcctccagtccttctcctcagttcttgtgtgaaactccagctgatgttaccacagtaacatcagttaattgggcaagccctgatgtcagtgtgtgtaactgacctctggcctggcctgcacagagaagccctataatcacaggtctgtggtggccccgaaatggggggcctgctagtcaggaggatgctgtgcacactgtgtgtgatgaatctcgccagaaaggctcctgaggtcccaggttggcacttctccctgcagccattgtagaagatctgctggtccttgcaggcaaagctacagccagaatgtccgtttgaaactcctagctcatctgtcaccgagcttcatccgaatgtgccacggagcttgctctccacttcctccgtgcagtggccctgccacagccctccctcggcacactttgaccctttgtaggattggaattagcaggactcggctatttaaagcaccagtctggggtcgcctgggcccctgctgaccccctcctccagagcagccagcccagcccgggaacaagacggacttcctctcccttcggactcacagcctttgcagagtcaagctccacttgaagctcactcagtaatatcctttcaatgtgttttatattgttttgactgcctttttttgtagaaataaaaattgaccttagaatttatcgtcagataaacttgtaaagatttgaatattaatgtcttttcaaggcaaatgggattgtccccgcactagtagagaatccatgtcgctctgacaccccaaggaagccgacgatccaaatgccgtgtgtcaccaaccccgcttctgccactggcggcttcccttcttggctcttgggggggactagatcctgtggagaagatgacttaaactttgctttttgttttaattttaattctataacttgagatctttccggggcctacaggcgtgtaagacagcttggtctggtctgtgcagaagtggggagtgatgggcaggttcggcagcctaacattgttcaggcgcatggcccctgcggtgtgtacacgaactcggcttcttttgtcctaggtacgccaagggcaggtttctggagactcccttgtgcccgggatggcaagggcaccgggctggcgtttccacatctgtcttcattagcagaaaagtgatgatggattttatttcactcacactccagtttgtaataaaatgccaaattctgtcagctatccaaacaagccaccatttgttcttgttgcttctctggatccagaaatgttgccattcttggaaactgtcccattgcttcgtatttctgccaacgtagctctgcctgcctgtcaacccctcactgcactctgctcatcacgggaggatacctgtgtgccggcagcccctcagggactctcagccctggcactggcaccccagggttggccccgtcagcagaggcttggctttcgagccagtgggtgtctctcctttgggcctgggcggcttgctcctgccagccatgccttcagggtaggctctgagcaagctggcgaacagccctggctgctccaaaaccaaaaagctgggtcctctggaggaggggcgagctgtggagcagccacccactgctgccccaagctcactcaggaattcacacccgcctggtttcttgaagtgtgctgggtccttccctctgctccctactccccaccacggcagagaataggctttctaagatgctgcgatcccgttctgctgcccgtaataaaaatgctctcagacactg

SEQ ID NO: 414284 - DNA, 2599 bp, Homo sapiens
tggcagaaaaacaaatagaataagagtattccagaaaaacaggagaagaggaatatttcagaaaaataaatagaacaagtaatccagtccctcatagcactggtgaatgacccccagcctgagcacccgcttcgggctgacctagctgaagaatactctaaggaccgtaaaaaattctgtaagaatgctgaagagtttacaaagaaatatggggaaaagcgacctgtggactaaaatctgccacgattggttccagcaagtgtgagcagagaccccgtgcagtgcattcagacaccccgcaaagcaggactctgtggaaattgacacgtgccaccgcctggcgttcgcttgtggcagttactaactttctacagttttcttaatcaaaagtggtctaggtaacctgtaaagaaaggattaaaaatttaagatgttctagttctgctctctttgttttaaaaatcactgcttcaatctacttcaaaagaatggtgtttcttttcttgtccaattttatccaaaatcttcaagttacatttaacccataaggtttaaaaaaaaggaaaaaaaacggttgtggttccctttcttccctacccttgccactcccactttctggcaccgagtttatttttcacttacttacttccccagaccccgggctcgcctccacaaaggagaagagactgccctggcggtcctggtggcttttcttagcatgtgtggcactgttgcccagtgtgggagttggtttaaattctcctgactccagtttataacatccttttaaaaaatttaaaaacaaacagccacacccctcctccagtccttctcctcagttcttgtgtgaaactccagctgatgttaccacagtaacatcagttaattgggcaagccctgatgtcagtgtgtgtaactgacctctggcctggcctgcacagagaagccctataatcacaggtctgtggtggccccgaaatggggggcctgctagtcaggaggatgctgtgcacactgtgtgtgatgaatctcgccagaaaggctcctgaggtcccaggttggcacttctccctgcagccattgtagaagatctgctggtccttgcaggcaaagctacagccagaatgtccgtttgaaactcctagctcatctgtcaccgagcttcatccgaatgtgccacggagcttgctctccacttcctccgtgcagtggccctgccacagccctccctcggcacactttgaccctttgtaggattggaattagcaggactcggctatttaaagcaccagtctggggtcgcctgggcccctgctgaccccctcctccagagcagccagcccagcccgggaacaagacggacttcctctcccttcggactcacagcctttgcagagtcaagctccacttgaagctcactcagtaatatcctttcaatgtgttttatattgttttgactgcctttttttgtagaaataaaaattgaccttagaatttatcgtcagataaacttgtaaagatttgaatattaatgtcttttcaaggcaaatgggattgtccccgcactagtagagaatccatgtcgctctgacaccccaaggaagccgacgatccaaatgccgtgtgtcaccaaccccgcttctgccactggcggcttcccttcttggctcttgggggggactagatcctgtggagaagatgacttaaactttgctttttgttttaattttaattctataacttgagatctttccggggcctacaggcgtgtaagacagcttggtctggtctgtgcagaagtggggagtgatgggcaggttcggcagcctaacattgttcaggcgcatggcccctgcggtgtgtacacgaactcggcttcttttgtcctaggtacgccaagggcaggtttctggagactcccttgtgcccgggatggcaagggcaccgggctggcgtttccacatctgtcttcattagcagaaaagtgatgatggattttatttcactcacactccagtttgtaataaaatgccaaattctgtcagctatccaaacaagccaccatttgttcttgttgcttctctggatccagaaatgttgccattcttggaaactgtcccattgcttcgtatttctgccaacgtagctctgcctgcctgtcaacccctcactgcactctgctcatcacgggaggatacctgtgtgccggcagcccctcagggactctcagccctggcactggcaccccagggttggccccgtcagcagaggcttggctttcgagccagtgggtgtctctcctttgggcctgggcggcttgctcctgccagccatgccttcagggtaggctctgagcaagctggcgaacagccctggctgctccaaaaccaaaaagctgggtcctctggaggaggggcgagctgtggagcagccacccactgctgccccaagctcactcaggaattcacacccgcctggtttcttgaagtgtgctgggtccttccctctgctccctactccccaccacggcagagaataggctttctaagatgctgcgatcccgttctgctgcccgtaataaaaatgctctcagacactg

SEQ ID NO: 414285 - DNA, 844 bp, Homo sapiens
  misc_feature (734)..(734): n is a, c, g, or t
ccacgccaccgtgcattctggggaaggagcagcaccaaatccaagatggcggccagcaggaggctgatgaaggagcttgaagaaatccgcaaatgtgggatgaaaaacttccgtaacatccaggttgatgaagctaatttattgacttggcaagggcttattgttcctgacaaccctccatatgataagggagccttcagaatcgaaatcaactttccagcagagtacccattcaaaccaccgaagatcacatttaaaacaaagatctatcacccaaacatcgacgaaaaggggcaggtctgtctgccagtaattagtgccgaaaactggaagccagcaaccaaaaccgaccaagtaatccagtccctcatagcactggtgaatgacccccagcctgagcacccgcttcgggctgacctagctgaagaatactctaaggaccgtaaaaaattctgtaagaatgctgaagagtttacaaagaaatatggggaaaagcgacctgtggactaaaatctgccacgattggttccagcaagtgtgagcagagaccccgtgcagtgcattcagacaccccgcaaagcaggactctgtggaaattgacacgtgccaccgcctggcgttcgcttgtggcagttactaactttctacagttttcttaatcaaaagtggtctaggtaacctgtaaagaaaggattaaaaatttaagatgttcaaaaaaaaaaaaaaaaaaattnggggggcccggcccgaagagatttaaaacctgcgggggcggggccaggtaggaacgggccacggccaagaacgcgcgaagggggggtccccaaaagcccggggcgggtca

SEQ ID NO: 414286 - DNA, 2806 bp, Homo sapiens
  misc_feature (12)..(12): n is a, c, g, or t
atttcggcaccngggtgggagcggccacaggaggctgatgagagcttgaagaaatccgcaaatgtgggatgaaaaacttccgtaacatccaggttgatgaagctaatttattgacttggcaagggcttattgttcctgacaaccctccatatgataagggagccttcagaatcgaaatcaactttccagcagagtacccattcaaaccaccgaagatcacatttaaaacaaagatctatcacccaaacatcgacgaaaaggggcaggtctgtctgccagtaattagtgccgaaaactggaagccagcaaccaaaaccgaccaagcctgagcacccgcttcgggctgacctagctgaagaatactctaaggaccgtaaaaaattctgtaagaatgctgaagagtttacaaagaaatatggggaaaagcgacctgtggactaaaatctgccacgattggttccagcaagtgtgagcagagaccccgtgcagtgcattcagacaccccgcaaagcaggactctgtggaaattgacacgtgccaccgcctggcgttcgcttgtggcagttactaactttctacagttttcttaatcaaaagtggtctaggtaacctgtaaagaaaggattaaaaatttaagatgttctagttctgctctctttgttttaaaaatcactgcttcaatctacttcaaaagaatggtgtttcttttcttgtccaattttatccaaaatcttcaagttacatttaacccataaggtttaaaaaaaaggaaaaaaaacggttgtggttccctttcttccctacccttgccactcccactttctggcaccgagtttatttttcacttacttacttccccagaccccgggctcgcctccacaaaggagaagagactgccctggcggtcctggtggcttttcttagcatgtgtggcactgttgcccagtgtgggagttggtttaaattctcctgactccagtttataacatccttttaaaaaatttaaaaacaaacagccacacccctcctccagtccttctcctcagttcttgtgtgaaactccagctgatgttaccacagtaacatcagttaattgggcaagccctgatgtcagtgtgtgtaactgacctctggcctggcctgcacagagaagccctataatcacaggtctgtggtggccccgaaatggggggcctgctagtcaggaggatgctgtgcacactgtgtgtgatgaatctcgccagaaaggctcctgaggtcccaggttggcacttctccctgcagccattgtagaagatctgctggtccttgcaggcaaagctacagccagaatgtccgtttgaaactcctagctcatctgtcaccgagcttcatccgaatgtgccacggagcttgctctccacttcctccgtgcagtggccctgccacagccctccctcggcacactttgaccctttgtaggattggaattagcaggactcggctatttaaagcaccagtctggggtcgcctgggcccctgctgaccccctcctccagagcagccagcccagcccgggaacaagacggacttcctctcccttcggactcacagcctttgcagagtcaagctccacttgaagctcactcagtaatatcctttcaatgtgttttatattgttttgactgcctttttttgtagaaataaaaattgaccttagaatttatcgtcagataaacttgtaaagatttgaatattaatgtcttttcaaggcaaatgggattgtccccgcactagtagagaatccatgtcgctctgacaccccaaggaagccgacgatccaaatgccgtgtgtcaccaaccccgcttctgccactggcggcttcccttcttggctcttgggggggactagatcctgtggagaagatgacttaaactttgctttttgttttaattttaattctataacttgagatctttccggggcctacaggcgtgtaagacagcttggtctggtctgtgcagaagtggggagtgatgggcaggttcggcagcctaacattgttcaggcgcatggcccctgcggtgtgtacacgaactcggcttcttttgtcctaggtacgccaagggcaggtttctggagactcccttgtgcccgggatggcaagggcaccgggctggcgtttccacatctgtcttcattagcagaaaagtgatgatggattttatttcactcacactccagtttgtaataaaatgccaaattctgtcagctatccaaacaagccaccatttgttcttgttgcttctctggatccagaaatgttgccattcttggaaactgtcccattgcttcgtatttctgccaacgtagctctgcctgcctgtcaacccctcactgcactctgctcatcacgggaggatacctgtgtgccggcagcccctcagggactctcagccctggcactggcaccccagggttggccccgtcagcagaggcttggctttcgagccagtgggtgtctctcctttgggcctgggcggcttgctcctgccagccatgccttcagggtaggctctgagcaagctggcgaacagccctggctgctccaaaaccaaaaagctgggtcctctggaggaggggcgagctgtggagcagccacccactgctgccccaagctcactcaggaattcacacccgcctggtttcttgaagtgtgctgggtccttccctctgctccctactccccaccacggcagagaataggctttctaagatgctgcgatcccgttctgctgcccgtaataaaaatgctctcagacactg

SEQ ID NO: 414287 - DNA, 821 bp, Homo sapiens
ccacgccaccgtgcattctggggaaggagcagcaccaaatccaagatggcggccagcaggaggctgatgaaggagcttgaagaaatccgcaaatgtgggatgaaaaacttccgtaacatccaggttgatgaagctaatttattgacttggcaagggcttattgttcctgacaaccctccatatgataagggagccttcagaatcgaaatcaactttccagcagagtacccattcaaaccaccgaagatcacatttaaaacaaagatctatcacccaaacatcgacgaaaaggggcaggtctgtctgccagtaattagtgccgaaaactggaagccagcaaccaaaaccgaccaagaaacttcagcgttcccaattatggcttctctcagatccagccttgaagttctttgacctcctcaattcacaacctgtagctgactttagccacccacaagtacagaaaataatccagtccctcatagcactggtgaatgacccccagcctgagcacccgcttcgggctgacctagctgaagaatactctaaggaccgtaaaaaattctgtaagaatgctgaagagtttacaaagaaatatggggaaaagcgacctgtggactaaaatctgccacgattggttccagcaagtgtgagcagagaccccgtgcagtgcattcagacaccccgcaaagcaggactctgtggaaattgacacgtgccaccgcctggcgttcgcttgtggcagttactaactttctacagttttcttaatcaaaagtggtctaggtaacctgtaaagaaaggattaaaaatttaagatgttc

SEQ ID NO: 414288 - DNA, 712 bp, Homo sapiens
ccacgccaccgtgcattctggggaaggagcagcaccaaatccaagatggcggccagcaggaggctgatgaaggagcttgaagaaatccgcaaatgtgggatgaaaaacttccgtaacatccaggttgatgaagctaatttattgacttggcaagggcttattgttcctgacaaccctccatatgataagggagccttcagaatcgaaatcaactttccagcagagtacccattcaaaccaccgaagatcacatttaaaacaaagatctatcacccaaacatcgacgaaaaggggcaggtctgtctgccagtaattagtgccgaaaactggaagccagcaaccaaaaccgaccaagtaatccagtccctcatagcactggtgaatgacccccagcctgagcacccgcttcgggctgacctagctgaagaatactctaaggaccgtaaaaaattctgtaagaatgctgaagagtttacaaagaaatatggggaaaagcgacctgtggactaaaatctgccacgattggttccagcaagtgtgagcagagaccccgtgcagtgcattcagacaccccgcaaagcaggactctgtggaaattgacacgtgccaccgcctggcgttcgcttgtggcagttactaactttctacagttttcttaatcaaaagtggtctaggtaacctgtaaagaaaggattaaaaatttaagatgttc

SEQ ID NO: 414289 - DNA, 2875 bp, Homo sapiens
ccacgccaccgtgcattctggggaaggagcagcaccaaatccaagatggcggccagcaggaggctgatgaaggagcttgaagaaatccgcaaatgtgggatgaaaaacttccgtaacatccaggttgatgaagctaatttattgacttggcaagggcttattgttcctgacaaccctccatatgataagggagccttcagaatcgaaatcaactttccagcagagtacccattcaaaccaccgaagatcacatttaaaacaaagatctatcacccaaacatcgacgaaaaggggcaggtctgtctgccagtaattagtgccgaaaactggaagccagcaaccaaaaccgaccaagtaatccagtccctcatagcactggtgaatgacccccagcctgagcacccgcttcgggctgacctagctgaagaatactctaaggaccgtaaaaaattctgtaagaatgctgaagagtttacaaagaaatatggggaaaagcgacctgtggactaaaatctgccacgattggttccagcaagtgtgagcagagaccccgtgcagtgcattcagacaccccgcaaagcaggactctgtggaaattgacacgtgccaccgcctggcgttcgcttgtggcagttactaactttctacagttttcttaatcaaaagtggtctaggtaacctgtaaagaaaggattaaaaatttaagatgttctagttctgctctctttgttttaaaaatcactgcttcaatctacttcaaaagaatggtgtttcttttcttgtccaattttatccaaaatcttcaagttacatttaacccataaggtttaaaaaaaaggaaaaaaaacggttgtggttccctttcttccctacccttgccactcccactttctggcaccgagtttatttttcacttacttacttccccagaccccgggctcgcctccacaaaggagaagagactgccctggcggtcctggtggcttttcttagcatgtgtggcactgttgcccagtgtgggagttggtttaaattctcctgactccagtttataacatccttttaaaaaatttaaaaacaaacagccacacccctcctccagtccttctcctcagttcttgtgtgaaactccagctgatgttaccacagtaacatcagttaattgggcaagccctgatgtcagtgtgtgtaactgacctctggcctggcctgcacagagaagccctataatcacaggtctgtggtggccccgaaatggggggcctgctagtcaggaggatgctgtgcacactgtgtgtgatgaatctcgccagaaaggctcctgaggtcccaggttggcacttctccctgcagccattgtagaagatctgctggtccttgcaggcaaagctacagccagaatgtccgtttgaaactcctagctcatctgtcaccgagcttcatccgaatgtgccacggagcttgctctccacttcctccgtgcagtggccctgccacagccctccctcggcacactttgaccctttgtaggattggaattagcaggactcggctatttaaagcaccagtctggggtcgcctgggcccctgctgaccccctcctccagagcagccagcccagcccgggaacaagacggacttcctctcccttcggactcacagcctttgcagagtcaagctccacttgaagctcactcagtaatatcctttcaatgtgttttatattgttttgactgcctttttttgtagaaataaaaattgaccttagaatttatcgtcagataaacttgtaaagatttgaatattaatgtcttttcaaggcaaatgggattgtccccgcactagtagagaatccatgtcgctctgacaccccaaggaagccgacgatccaaatgccgtgtgtcaccaaccccgcttctgccactggcggcttcccttcttggctcttgggggggactagatcctgtggagaagatgacttaaactttgctttttgttttaattttaattctataacttgagatctttccggggcctacaggcgtgtaagacagcttggtctggtctgtgcagaagtggggagtgatgggcaggttcggcagcctaacattgttcaggcgcatggcccctgcggtgtgtacacgaactcggcttcttttgtcctaggtacgccaagggcaggtttctggagactcccttgtgcccgggatggcaagggcaccgggctggcgtttccacatctgtcttcattagcagaaaagtgatgatggattttatttcactcacactccagtttgtaataaaatgccaaattctgtcagctatccaaacaagccaccatttgttcttgttgcttctctggatccagaaatgttgccattcttggaaactgtcccattgcttcgtatttctgccaacgtagctctgcctgcctgtcaacccctcactgcactctgctcatcacgggaggatacctgtgtgccggcagcccctcagggactctcagccctggcactggcaccccagggttggccccgtcagcagaggcttggctttcgagccagtgggtgtctctcctttgggcctgggcggcttgctcctgccagccatgccttcagggtaggctctgagcaagctggcgaacagccctggctgctccaaaaccaaaaagctgggtcctctggaggaggggcgagctgtggagcagccacccactgctgccccaagctcactcaggaattcacacccgcctggtttcttgaagtgtgctgggtccttccctctgctccctactccccaccacggcagagaataggctttctaagatgctgcgatcccgttctgctgcccgtaataaaaatgctctcagacactg

SEQ ID NO: 414290 - DNA, 1780 bp, Homo sapiens
ccacgccaccgtgcattctggggaaggagcagcaccaaatccaagatggcggccagcaggaggctgatgaaggagcttgaagaaatccgcaaatgtgggatgaaaaacttccgtaacatccaggttgatgaagctaatttattgacttggcaagggcttattgttcctgacaaccctccatatgataagggagccttcagaatcgaaatcaactttccagcagagtacccattcaaaccaccgaagatcacatttaaaacaaagatctatcacccaaacatcgacgaaaaggggcaggtctgtctgccagtaattagtgccgaaaactggaagccagcaaccaaaaccgaccaagtaatccagtccctcatagcactggtgaatgacccccagcctgagcacccgcttcgggctgacctagctgaagaatactctaaggaccgtaaaaaattctgtaagaatgctgaagagtttacaaagaaatatggggaaaagcgacctgtggactaaaatctgccacgattggttccagcaagtgtgagcagagaccccgtgcagtgcattcagacaccccgcaaagcaggactctgtggaaattgacacgtgccaccgcctggcgttcgcttgtggcagttactaactttctacagttttcttaatcaaaagtggtctaggtaacctgtaaagaaaggattaaaaatttaagatgttctagttctgctctctttgttttaaaaatcactgcttcaatctacttcaaaagaatggtgtttcttttcttgtccaattttatccaaaatcttcaagttacatttaacccataaggtttaaaaaaaaggaaaaaaaacggttgtggttccctttcttccctacccttgccactcccactttctggcaccgagtttatttttcacttacttacttccccagaccccgggctcgcctccacaaaggagaagagactgccctggcggtcctggtggcttttcttagcatgtgtggcactgttgcccagtgtgggagttggtttaaattctcctgactccagtttataacatccttttaaaaaatttaaaaacaaacagccacacccctcctccagtccttctcctcagttcttgtgtgaaactccagctgatgttaccacagtaacatcagttaattgggcaagccctgatgtcagtgtgtgtaactgacctctggcctggcctgcacagagaagccctataatcacaggtctgtggtggccccgaaatggggggcctgctagtcaggaggatgctgtgcacactgtgtgtgatgaatctcgccagaaaggctcctgaggtcccaggttggcacttctccctgcagccattgtagaagatctgctggtccttgcaggcaaagctacagccagaatgtccgtttgaaactcctagctcatctgtcaccgagcttcatccgaatgtgccacggagcttgctctccacttcctccgtgcagtggccctgccacagccctccctcggcacactttgaccctttgtaggattggaattagcaggactcggctatttaaagcaccagtctggggtcgcctgggcccctgctgaccccctcctccagagcagccagcccagcccgggaacaagacggacttcctctcccttcggactcacagcctttgcagagtcaagctccacttgaagctcactcagtaatatcctttcaatgtgttttatattgttttgactgcctttttttgtagaaataaaaattgaccttagaatttatcgtca

SEQ ID NO: 414291 - DNA, 2168 bp, Homo sapiens
ccacgccaccgtgcattctggggaaggagcagcaccaaatccaagatggcggccagcaggaggctgatgaaggagcttgaagaaatccgcaaatgtgggatgaaaaacttccgtaacatccaggttgatgaagctaatttattgacttggcaagggcttattgttcctgacaaccctccatatgataagggagccttcagaatcgaaatcaactttccagcagagtacccattcaaaccaccgaagatcacatttaaaacaaagatctatcacccaaacatcgacgaaaaggggcaggtctgtctgccagtaattagtgccgaaaactggaagccagcaaccaaaaccgaccaagtaatccagtccctcatagcactggtgaatgacccccagcctgagcacccgcttcgggctgacctagctgaagaatactctaaggaccgtaaaaaattctgtaagaatgctgaagagtttacaaagaaatatggggaaaagcgacctgtggactaaaatctgccacgattggttccagcaagtgtgagcagagaccccgtgcagtgcattcagacaccccgcaaagcaggactctgtggaaattgacacgtgccaccgcctggcgttcgcttgtggcagttactaactttctacagttttcttaatcaaaagtggtctaggtaacctgtaaagaaaggattaaaaatttaagatgttctagttctgctctctttgttttaaaaatcactgcttcaatctacttcaaaagaatggtgtttcttttcttgtccaattttatccaaaatcttcaagttacatttaacccataaggtttaaaaaaaaggaaaaaaaacggttgtggttccctttcttccctacccttgccactcccactttctggcaccgagtttatttttcacttacttacttccccagaccccgggctcgcctccacaaaggagaagagactgccctggcggtcctggtggcttttcttagcatgtgtggcactgttgcccagtgtgggagttggtttaaattctcctgactccagtttataacatccttttaaaaaatttaaaaacaaacagccacacccctcctccagtccttctcctcagttcttgtgtgaaactccagctgatgttaccacagtaacatcagttaattgggcaagccctgatgtcagtgtgtgtaactgacctctggcctggcctgcacagagaagccctataatcacaggtctgtggtggccccgaaatggggggcctgctagtcaggaggatgctgtgcacactgtgtgtgatgaatctcgccagaaaggctcctgaggtcccaggttggcacttctccctgcagccattgtagaagatctgctggtccttgcaggcaaagctacagccagaatgtccgtttgaaactcctagctcatctgtcaccgagcttcatccgaatgtgccacggagcttgctctccacttcctccgtgcagtggccctgccacagccctccctcggcacactttgaccctttgtaggattggaattagcaggactcggctatttaaagcaccagtctggggtcgcctgggcccctgctgaccccctcctccagagcagccagcccagcccgggaacaagacggacttcctctcccttcggactcacagcctttgcagagtcaagctccacttgaagctcactcagtaatatcctttcaatgtgttttatattgttttgactgcctttttttgtagaaataaaaattgaccttagaatttatcgtcaaaaaaaaaaaaaaaaaaaaaaaaaaaaaaaaaaaaaaaaaaaaaaaaaaaaaaaaaaaaaaaaaaaaaaaaaaaaaaaaggtgtggggggggggggggccaaggaaagagttttaaaaacattggggtggggcgagacgcgggcaccccaagatatagtgatagagtcgagaacaagtggaggcaacaatgggtggttcctcaagaagaaacgctggggcaagcaaaaccagggggtggggcttcccacaccaaaaaaaaagacgccgccgggggaaaccgaggcgttgtggccaaacacacaccgaagggggaactcggagacgacacagcgggggatcacaaacggggcacaagaagcagccaacaaaaatcccgagcacggggat

SEQ ID NO: 414292 - DNA, 2880 bp, Homo sapiens
  misc_feature (54)..(54): n is a, c, g, or t
  misc_feature (66)..(66): n is a, c, g, or t
cgagtatccacgatgacagttagagcgggatggagctatcaaagtcctcgagtngctgtccagcangaggctgatgagagcttgaagaaatccgcaaatgtgggatgaaaaacttccgtaacatccaggttgatgaagctaatttattgacttggcaagggcttattgttcctgacaaccctccatatgataagggagccttcagaatcgaaatcaactttccagcagagtacccattcaaaccaccgaagatcacatttaaaacaaagatctatcacccaaacatcgacgaaaaggggcaggtctgtctgccagtaattagtgccgaaaactggaagccagcaaccaaaaccgaccaagtaatccagtccctcatagcactggtgaatgacccccagcctgagcacccgcttcgggctgacctagctgaagaatactctaaggaccgtaaaaaattctgtaagaatgctgaagagtttacaaagaaatatggggaaaagcgacctgtggactaaaatctgccacgattggttccagcaagtgtgagcagagaccccgtgcagtgcattcagacaccccgcaaagcaggactctgtggaaattgacacgtgccaccgcctggcgttcgcttgtggcagttactaactttctacagttttcttaatcaaaagtggtctaggtaacctgtaaagaaaggattaaaaatttaagatgttctagttctgctctctttgttttaaaaatcactgcttcaatctacttcaaaagaatggtgtttcttttcttgtccaattttatccaaaatcttcaagttacatttaacccataaggtttaaaaaaaaggaaaaaaaacggttgtggttccctttcttccctacccttgccactcccactttctggcaccgagtttatttttcacttacttacttccccagaccccgggctcgcctccacaaaggagaagagactgccctggcggtcctggtggcttttcttagcatgtgtggcactgttgcccagtgtgggagttggtttaaattctcctgactccagtttataacatccttttaaaaaatttaaaaacaaacagccacacccctcctccagtccttctcctcagttcttgtgtgaaactccagctgatgttaccacagtaacatcagttaattgggcaagccctgatgtcagtgtgtgtaactgacctctggcctggcctgcacagagaagccctataatcacaggtctgtggtggccccgaaatggggggcctgctagtcaggaggatgctgtgcacactgtgtgtgatgaatctcgccagaaaggctcctgaggtcccaggttggcacttctccctgcagccattgtagaagatctgctggtccttgcaggcaaagctacagccagaatgtccgtttgaaactcctagctcatctgtcaccgagcttcatccgaatgtgccacggagcttgctctccacttcctccgtgcagtggccctgccacagccctccctcggcacactttgaccctttgtaggattggaattagcaggactcggctatttaaagcaccagtctggggtcgcctgggcccctgctgaccccctcctccagagcagccagcccagcccgggaacaagacggacttcctctcccttcggactcacagcctttgcagagtcaagctccacttgaagctcactcagtaatatcctttcaatgtgttttatattgttttgactgcctttttttgtagaaataaaaattgaccttagaatttatcgtcagataaacttgtaaagatttgaatattaatgtcttttcaaggcaaatgggattgtccccgcactagtagagaatccatgtcgctctgacaccccaaggaagccgacgatccaaatgccgtgtgtcaccaaccccgcttctgccactggcggcttcccttcttggctcttgggggggactagatcctgtggagaagatgacttaaactttgctttttgttttaattttaattctataacttgagatctttccggggcctacaggcgtgtaagacagcttggtctggtctgtgcagaagtggggagtgatgggcaggttcggcagcctaacattgttcaggcgcatggcccctgcggtgtgtacacgaactcggcttcttttgtcctaggtacgccaagggcaggtttctggagactcccttgtgcccgggatggcaagggcaccgggctggcgtttccacatctgtcttcattagcagaaaagtgatgatggattttatttcactcacactccagtttgtaataaaatgccaaattctgtcagctatccaaacaagccaccatttgttcttgttgcttctctggatccagaaatgttgccattcttggaaactgtcccattgcttcgtatttctgccaacgtagctctgcctgcctgtcaacccctcactgcactctgctcatcacgggaggatacctgtgtgccggcagcccctcagggactctcagccctggcactggcaccccagggttggccccgtcagcagaggcttggctttcgagccagtgggtgtctctcctttgggcctgggcggcttgctcctgccagccatgccttcagggtaggctctgagcaagctggcgaacagccctggctgctccaaaaccaaaaagctgggtcctctggaggaggggcgagctgtggagcagccacccactgctgccccaagctcactcaggaattcacacccgcctggtttcttgaagtgtgctgggtccttccctctgctccctactccccaccacggcagagaataggctttctaagatgctgcgatcccgttctgctgcccgtaataaaaatgctctcagacactg

SEQ ID NO: 414293 - DNA, 2779 bp, Homo sapiens
ccacgccaccgtgcattctggggaaggagcagcaccaaatccaagatggcggccagcaggaggctgatgaaggacaaccctccatatgataagggagccttcagaatcgaaatcaactttccagcagagtacccattcaaaccaccgaagatcacatttaaaacaaagatctatcacccaaacatcgacgaaaaggggcaggtctgtctgccagtaattagtgccgaaaactggaagccagcaaccaaaaccgaccaagtaatccagtccctcatagcactggtgaatgacccccagcctgagcacccgcttcgggctgacctagctgaagaatactctaaggaccgtaaaaaattctgtaagaatgctgaagagtttacaaagaaatatggggaaaagcgacctgtggactaaaatctgccacgattggttccagcaagtgtgagcagagaccccgtgcagtgcattcagacaccccgcaaagcaggactctgtggaaattgacacgtgccaccgcctggcgttcgcttgtggcagttactaactttctacagttttcttaatcaaaagtggtctaggtaacctgtaaagaaaggattaaaaatttaagatgttctagttctgctctctttgttttaaaaatcactgcttcaatctacttcaaaagaatggtgtttcttttcttgtccaattttatccaaaatcttcaagttacatttaacccataaggtttaaaaaaaaggaaaaaaaacggttgtggttccctttcttccctacccttgccactcccactttctggcaccgagtttatttttcacttacttacttccccagaccccgggctcgcctccacaaaggagaagagactgccctggcggtcctggtggcttttcttagcatgtgtggcactgttgcccagtgtgggagttggtttaaattctcctgactccagtttataacatccttttaaaaaatttaaaaacaaacagccacacccctcctccagtccttctcctcagttcttgtgtgaaactccagctgatgttaccacagtaacatcagttaattgggcaagccctgatgtcagtgtgtgtaactgacctctggcctggcctgcacagagaagccctataatcacaggtctgtggtggccccgaaatggggggcctgctagtcaggaggatgctgtgcacactgtgtgtgatgaatctcgccagaaaggctcctgaggtcccaggttggcacttctccctgcagccattgtagaagatctgctggtccttgcaggcaaagctacagccagaatgtccgtttgaaactcctagctcatctgtcaccgagcttcatccgaatgtgccacggagcttgctctccacttcctccgtgcagtggccctgccacagccctccctcggcacactttgaccctttgtaggattggaattagcaggactcggctatttaaagcaccagtctggggtcgcctgggcccctgctgaccccctcctccagagcagccagcccagcccgggaacaagacggacttcctctcccttcggactcacagcctttgcagagtcaagctccacttgaagctcactcagtaatatcctttcaatgtgttttatattgttttgactgcctttttttgtagaaataaaaattgaccttagaatttatcgtcagataaacttgtaaagatttgaatattaatgtcttttcaaggcaaatgggattgtccccgcactagtagagaatccatgtcgctctgacaccccaaggaagccgacgatccaaatgccgtgtgtcaccaaccccgcttctgccactggcggcttcccttcttggctcttgggggggactagatcctgtggagaagatgacttaaactttgctttttgttttaattttaattctataacttgagatctttccggggcctacaggcgtgtaagacagcttggtctggtctgtgcagaagtggggagtgatgggcaggttcggcagcctaacattgttcaggcgcatggcccctgcggtgtgtacacgaactcggcttcttttgtcctaggtacgccaagggcaggtttctggagactcccttgtgcccgggatggcaagggcaccgggctggcgtttccacatctgtcttcattagcagaaaagtgatgatggattttatttcactcacactccagtttgtaataaaatgccaaattctgtcagctatccaaacaagccaccatttgttcttgttgcttctctggatccagaaatgttgccattcttggaaactgtcccattgcttcgtatttctgccaacgtagctctgcctgcctgtcaacccctcactgcactctgctcatcacgggaggatacctgtgtgccggcagcccctcagggactctcagccctggcactggcaccccagggttggccccgtcagcagaggcttggctttcgagccagtgggtgtctctcctttgggcctgggcggcttgctcctgccagccatgccttcagggtaggctctgagcaagctggcgaacagccctggctgctccaaaaccaaaaagctgggtcctctggaggaggggcgagctgtggagcagccacccactgctgccccaagctcactcaggaattcacacccgcctggtttcttgaagtgtgctgggtccttccctctgctccctactccccaccacggcagagaataggctttctaagatgctgcgatcccgttctgctgcccgtaataaaaatgctctcagacactg

SEQ ID NO: 414294 - DNA, 2984 bp, Homo sapiens
ccacgccaccgtgcattctggggaaggagcagcaccaaatccaagatggcggccagcaggaggctgatgaaggagcttgaagaaatccgcaaatgtgggatgaaaaacttccgtaacatccaggttgatgaagctaatttattgacttggcaagggcttattgttcctgacaaccctccatatgataagggagccttcagaatcgaaatcaactttccagcagagtacccattcaaaccaccgaagatcacatttaaaacaaagatctatcacccaaacatcgacgaaaaggggcaggtctgtctgccagtaattagtgccgaaaactggaagccagcaaccaaaaccgaccaagaaacttcagcgttcccaattatggcttctctcagatccagccttgaagttctttgacctcctcaattcacaacctgtagctgactttagccacccacaagtacagaaaataatccagtccctcatagcactggtgaatgacccccagcctgagcacccgcttcgggctgacctagctgaagaatactctaaggaccgtaaaaaattctgtaagaatgctgaagagtttacaaagaaatatggggaaaagcgacctgtggactaaaatctgccacgattggttccagcaagtgtgagcagagaccccgtgcagtgcattcagacaccccgcaaagcaggactctgtggaaattgacacgtgccaccgcctggcgttcgcttgtggcagttactaactttctacagttttcttaatcaaaagtggtctaggtaacctgtaaagaaaggattaaaaatttaagatgttctagttctgctctctttgttttaaaaatcactgcttcaatctacttcaaaagaatggtgtttcttttcttgtccaattttatccaaaatcttcaagttacatttaacccataaggtttaaaaaaaaggaaaaaaaacggttgtggttccctttcttccctacccttgccactcccactttctggcaccgagtttatttttcacttacttacttccccagaccccgggctcgcctccacaaaggagaagagactgccctggcggtcctggtggcttttcttagcatgtgtggcactgttgcccagtgtgggagttggtttaaattctcctgactccagtttataacatccttttaaaaaatttaaaaacaaacagccacacccctcctccagtccttctcctcagttcttgtgtgaaactccagctgatgttaccacagtaacatcagttaattgggcaagccctgatgtcagtgtgtgtaactgacctctggcctggcctgcacagagaagccctataatcacaggtctgtggtggccccgaaatggggggcctgctagtcaggaggatgctgtgcacactgtgtgtgatgaatctcgccagaaaggctcctgaggtcccaggttggcacttctccctgcagccattgtagaagatctgctggtccttgcaggcaaagctacagccagaatgtccgtttgaaactcctagctcatctgtcaccgagcttcatccgaatgtgccacggagcttgctctccacttcctccgtgcagtggccctgccacagccctccctcggcacactttgaccctttgtaggattggaattagcaggactcggctatttaaagcaccagtctggggtcgcctgggcccctgctgaccccctcctccagagcagccagcccagcccgggaacaagacggacttcctctcccttcggactcacagcctttgcagagtcaagctccacttgaagctcactcagtaatatcctttcaatgtgttttatattgttttgactgcctttttttgtagaaataaaaattgaccttagaatttatcgtcagataaacttgtaaagatttgaatattaatgtcttttcaaggcaaatgggattgtccccgcactagtagagaatccatgtcgctctgacaccccaaggaagccgacgatccaaatgccgtgtgtcaccaaccccgcttctgccactggcggcttcccttcttggctcttgggggggactagatcctgtggagaagatgacttaaactttgctttttgttttaattttaattctataacttgagatctttccggggcctacaggcgtgtaagacagcttggtctggtctgtgcagaagtggggagtgatgggcaggttcggcagcctaacattgttcaggcgcatggcccctgcggtgtgtacacgaactcggcttcttttgtcctaggtacgccaagggcaggtttctggagactcccttgtgcccgggatggcaagggcaccgggctggcgtttccacatctgtcttcattagcagaaaagtgatgatggattttatttcactcacactccagtttgtaataaaatgccaaattctgtcagctatccaaacaagccaccatttgttcttgttgcttctctggatccagaaatgttgccattcttggaaactgtcccattgcttcgtatttctgccaacgtagctctgcctgcctgtcaacccctcactgcactctgctcatcacgggaggatacctgtgtgccggcagcccctcagggactctcagccctggcactggcaccccagggttggccccgtcagcagaggcttggctttcgagccagtgggtgtctctcctttgggcctgggcggcttgctcctgccagccatgccttcagggtaggctctgagcaagctggcgaacagccctggctgctccaaaaccaaaaagctgggtcctctggaggaggggcgagctgtggagcagccacccactgctgccccaagctcactcaggaattcacacccgcctggtttcttgaagtgtgctgggtccttccctctgctccctactccccaccacggcagagaataggctttctaagatgctgcgatcccgttctgctgcccgtaataaaaatgctctcagacactg

SEQ ID NO: 414295 - DNA, 2825 bp, Homo sapiens
  misc_feature (54)..(54): n is a, c, g, or t
  misc_feature (66)..(66): n is a, c, g, or t
cgagtatccacgatgacagttagagcgggatggagctatcaaagtcctcgagtngctgtccagcangaggctgatgagagcttgaagaaatccgcaaatgtgggatgaaaaacttccgtaacatccaggttgatgaagctaatttattgacttggcaagggcttattgttcctgacaaccctccatatgataagggagccttcagaatcgaaatcaactttccagcagagtacccattcaaaccaccgaagatcacatttaaaacaaagatctatcacccaaacatcgacgaaaaggggcaggtctgtctgccagtaattagtgccgaaaactggaagccagcaaccaaaaccgaccaagtaatccagtccctcatagcactggtgaatgacccccagcctgagcacccgcttcgggctgacctagctgaagaatactctaaggaccgtaaaaaattctgtaagaatgctgaagagtttacaaagaaatatggggaaaagcgacctgtggaattcagacaccccgcaaagcaggactctgtggaaattgacacgtgccaccgcctggcgttcgcttgtggcagttactaactttctacagttttcttaatcaaaagtggtctaggtaacctgtaaagaaaggattaaaaatttaagatgttctagttctgctctctttgttttaaaaatcactgcttcaatctacttcaaaagaatggtgtttcttttcttgtccaattttatccaaaatcttcaagttacatttaacccataaggtttaaaaaaaaggaaaaaaaacggttgtggttccctttcttccctacccttgccactcccactttctggcaccgagtttatttttcacttacttacttccccagaccccgggctcgcctccacaaaggagaagagactgccctggcggtcctggtggcttttcttagcatgtgtggcactgttgcccagtgtgggagttggtttaaattctcctgactccagtttataacatccttttaaaaaatttaaaaacaaacagccacacccctcctccagtccttctcctcagttcttgtgtgaaactccagctgatgttaccacagtaacatcagttaattgggcaagccctgatgtcagtgtgtgtaactgacctctggcctggcctgcacagagaagccctataatcacaggtctgtggtggccccgaaatggggggcctgctagtcaggaggatgctgtgcacactgtgtgtgatgaatctcgccagaaaggctcctgaggtcccaggttggcacttctccctgcagccattgtagaagatctgctggtccttgcaggcaaagctacagccagaatgtccgtttgaaactcctagctcatctgtcaccgagcttcatccgaatgtgccacggagcttgctctccacttcctccgtgcagtggccctgccacagccctccctcggcacactttgaccctttgtaggattggaattagcaggactcggctatttaaagcaccagtctggggtcgcctgggcccctgctgaccccctcctccagagcagccagcccagcccgggaacaagacggacttcctctcccttcggactcacagcctttgcagagtcaagctccacttgaagctcactcagtaatatcctttcaatgtgttttatattgttttgactgcctttttttgtagaaataaaaattgaccttagaatttatcgtcagataaacttgtaaagatttgaatattaatgtcttttcaaggcaaatgggattgtccccgcactagtagagaatccatgtcgctctgacaccccaaggaagccgacgatccaaatgccgtgtgtcaccaaccccgcttctgccactggcggcttcccttcttggctcttgggggggactagatcctgtggagaagatgacttaaactttgctttttgttttaattttaattctataacttgagatctttccggggcctacaggcgtgtaagacagcttggtctggtctgtgcagaagtggggagtgatgggcaggttcggcagcctaacattgttcaggcgcatggcccctgcggtgtgtacacgaactcggcttcttttgtcctaggtacgccaagggcaggtttctggagactcccttgtgcccgggatggcaagggcaccgggctggcgtttccacatctgtcttcattagcagaaaagtgatgatggattttatttcactcacactccagtttgtaataaaatgccaaattctgtcagctatccaaacaagccaccatttgttcttgttgcttctctggatccagaaatgttgccattcttggaaactgtcccattgcttcgtatttctgccaacgtagctctgcctgcctgtcaacccctcactgcactctgctcatcacgggaggatacctgtgtgccggcagcccctcagggactctcagccctggcactggcaccccagggttggccccgtcagcagaggcttggctttcgagccagtgggtgtctctcctttgggcctgggcggcttgctcctgccagccatgccttcagggtaggctctgagcaagctggcgaacagccctggctgctccaaaaccaaaaagctgggtcctctggaggaggggcgagctgtggagcagccacccactgctgccccaagctcactcaggaattcacacccgcctggtttcttgaagtgtgctgggtccttccctctgctccctactccccaccacggcagagaataggctttctaagatgctgcgatcccgttctgctgcccgtaataaaaatgctctcagacactg

SEQ ID NO: 414296 - DNA, 678 bp, Homo sapiens
ccacgccaccgtgcattctggggaaggagcagcaccaaatccaagatggcggccagcaggaggctgatgaaggagcttgaagaaatccgcaaatgtgggatgaaaaacttccgtaacatccaggttgatgaagctaatttattgacttggcaagggcttattgttcctgacaaccctccatatgataagggagccttcagaatcgaaatcaactttccagcagagtacccattcaaaccaccgaagatcacatttaaaacaaagatctatcacccaaacatcgacgaaaaggggcaggtctgtctgccagtaattagtgccgaaaactggaagccagcaaccaaaaccgaccaagtaatccagtccctcatagcactggtgaatgacccccagcctgagcacccgcttcgggctgacctagctgaagaatactctaaggaccgtaaaaaattctgtaagaatgctgaagagtttacaaagaaatatggggaaaagcgacctgtggactaaaatctgccacgattggttccagcaagtgtgagcagagaccccgtgcagtgcattcagacaccccgcaaagcaggactctgtggaaattgagtaactgccacaagcgaaagccaggcggtggcacgtgtcaatttccacagagtcctgctttgcggggtgtctgaatgg

SEQ ID NO: 414297 - DNA, 244 bp, Homo sapiens
ttttaaaaccacggccaggcccaaactggaaaacccccagggcgcttttaaaggttcccccaaatttttccttcaaggggggggggtgtctcaaaaaaaaaaaaaaaaaaaaaagttaagcagacattgtgtgtaaaatttgtgacagaatttttttttttaagctaagcaagccagaagcaattccagtgcaaagtgtggtgtaagaaaaattaattatagtacagtacttggctcaattgta

SEQ ID NO: 414298 - DNA, 1451 bp, Homo sapiens
caaaaagataaaacctacaaagaaaaagagagtgaagaggagagagaaccgtggatcagatataataaaaaaatagatgggatggtagagtgggaacctatttagctgagtgagccactgcctaactgcgtacagagggggatactgataagcaagccagccagccagcattcttcacctgccttcatcttagaatgcctgcagctagattcgaactcttctgtctggacttcagcaggtccttttctagagagcctactgccatcacagaagggacctgctgataacctgcaattgtggtttccccaagcaaaaagtgagctcaccatctgatcactgttcattgaatttacagttgaacatgacccgtgcacactaagcctcgtttggatggcctgtgttcattagacaacagaaaagctaaaaggaatgaactgaataaaagaactcggaagaaatagatgatacaggcaataggaaagaactaaaaaacaaaacagaaaacatgaataggtctcagatgataagacactggattcactaaacaagaacaacatgcctacaaaggaagcgagagagagaaggaacaaatcgataacaagaaacgatgcttggaaataatatgatagctgaaataaagtagtgcatgagaaggctggaagatgtagttcattcttccagcaagtaaaagaaaaatataaagaaatgtaaagtagaagggaaaattaagaaagttagatgatcaacccaggaagtacaaaatctgcctaaagttacaaaaaagaggacaaaaggcattggaggataataaattatcaaagtaatactacaggaaaatttccctagtaaattatcaaagtaatactaggggaaaatttccctgaactacaaaacaaaacaaaacaaaaaacagtagtctcttggttgaatgaaaaagaacccatactactgagtgaaatttcagactatctggacaagtcacttagctatttaatcggttataccacgagatacttatggagggtattagaacaattaatgatagtttcattaaaaggtaagcaaacaactttgggaggccaaggcaggtggatcacgaggtgagttcaagaccagcctggccaagacggtgaaaccccatttctactaaaattagctgggtgcggttgcaggtgcctgtaatcccagctacttgggaggctgaggcaggagaatcacctgaacccgggtggcagaggttgcagggaggcgagatcgtgccactgcactccagcctgggcaacagagtgagactgtctcaaaaaaaaaaaaaaaaaaaaaagttaagcagacattgtgtgtaaaatttgtgacagaatttttttttttaagctaagcaagccagaagcaattccagtgcaaagtgtggtgtaagaaaaattaattatagtacagtacttggctcaattgta

SEQ ID NO: 414299 - DNA, 1412 bp, Homo sapiens
ccgacggcagtaccccggggtaataggtagcgaggccggggtggcgcgtcttcttcgtcgccagcccgcggcgccatggctcacgtcggctcccgcaagcgctcgaggagtcgcagccggtcccggggacgggggtcggaaaagagaaagaagaagagcaggaaagacacctcgaggaactgctcggcctccacatcccaagagagaagcaagcagaaggcccggaggagaacaagatccagctcctcctcctcttcttccagttcttctagctcctcttcttcctcctcgtcctcctcctcttcctccagtgatggccggaagaagcgggggaagtacaaggacaagaggaggaagaagaagaagaagaggaagaagctgaagaagaagggcaaggagaaggcggaagcacagcaggtggaggctctgccgggcccctcgctggaccagtggcaccgatcagctggggaggaagaggatggcccagtcctgacggatgagcagaagtcccgaatccaggccatgaagcccatgaccaaggaggagtgggatgcccggcagagcatcatccgcaaggtggtggaccctgagacggggcgcaccaggcttattaagggagatggcgaggtcctagaggaaatcgtaaccaaagaacgacacagagagatcaacaagcaagccacccgaggggactgcctggccttccagatgcgagctgggttgcttccctgagggcccccgctggccaaggcctgtggacgacgctggcggcccagcctgggcaggtttcagggtgccagtgggaagcctgatgggtgctggtggcctttcccccgtggattggtctctggcccagcccagtctcttctcaggggcagggggtggaggttggggtcaccggcctgcttggcacccccatctgaaagagcagcacttctcagctattaaaggccccctggatagacccctggtaacttttcacagaaaaaggggggcgcccaaaaaacccccaggggagccccaagtatgcagtacaacgcgttttggtgcaaaagaggcccccaagagagcgctcttaaacagaaccggacgcgcgttctaacaactcgctctgacaacgtaactagcgtcatcgtgtcgaagaccgcccaacaccctgtgctgcgcgagacggggcaatagccacaaacatagcctcccaggaacaagaaacaaacacacagtggagacacaccaccgagctcgtcggagacacgtacctcgacgattacgacaccagcctaaaacggcagagccgagtcgagcgactgcctaacactcacgcaagcgcagcgactgcagcaaggacgcgtcaacaggaagcactgacgacagcacgagctcgcatcgacgcaagggctaactagccagag

SEQ ID NO: 414300 - DNA, 1591 bp, Homo sapiens
gcggctgtcattgtggaagagttgcaacttgggggcccgagattggatgaagcgcacagccacgctttgggttacacatttgaaactcagggggcttccatattgcagtcttgagtttggtctccctgggaaggtggggcaccagccccatgccacgttgcacgtatcagctggagcagaatcctggcttccttccggatgggcctggggtccatgcccgcgctcactgccaagatctttctggcccctacggacacgagtttgcgacctctgagtcactgggtgggcgcgtcggaaagaccagggcgcctcagtctggagctcgcagtcgtatggagagggcaggaccagccggggaggagggcggcgcgcgcgagggtcgccttcttcccagggcaccgggggcgtgggtgctgcgggcgtgcgccgagagggcagccttggaagtgggcgcagcttcggcagacacaggcgtgaggggctgcggagctcgagggccggcgcccctgcttgcctctgcgggaggtgggcgcgcccgggacggaacctggggcgtcagaacgaaaggcagcggcgccgcgcttcccagccggccagcctcccgcgcagcgccccggccggaagcctcctcgccgccgcttcctctcgagaaggcgcggggcgggctgtccggcccgcagggcggtcgagcccgcggcgccatggctcacgtcggctcccgcaagcgctcgaggagtcgcagccggtcccggggacgggggtcggaaaagagaaagaagaagagcaggaaagacacctcgaggaactgctcggcctccacatcccaagagagaagcaagcagaaggcccggaggagaacaagatccagctcctcctcctcttcttccagttcttctagctcctcttcttcctcctcgtcctcctcctcttcctccagtgatggccggaagaagcgggggaagtacaaggacaagaggaggaagaagaagaagaagaggaagaagctgaagaagaagggcaaggagaaggcggaagcacagcaggtggaggctctgccgggcccctcgctggaccagtggcaccgatcagctggggaggaagaggatggcccagtcctgacggatgagcagaagtcccgaatccaggccatgaagcccatgaccaaggaggagtgggatgcccggcagagcatcatccgcaaggtggtggaccctgagacggggcgcaccaggcttattaagggagatggcgaggtcctagaggaaatcgtaaccaaagaacgacacagagagatcaacaagcaagccacccgaggggactgcctggccttccagatgcgagctgggttgcttccctgagggcccccgctggccaaggcctgtggacgacgctggcggcccagcctgggcaggtttcagggtgccagtgggaagcctgatgggtgctggtggcctttcccccgtggattggtctctggcccagcccagtctcttctcaggggcagggggtggaggttggggtcaccggcctgcttggcacccccatctgaaagagcagcacttctcagctattaaaggccccctggatagac

SEQ ID NO: 414301 - DNA, 1624 bp, Homo sapiens
gcggctgtcattgtggaagagttgcaacttgggggcccgagattggatgaagcgcacagccacgctttgggttacacatttgaaactcagggggcttccatattgcagtcttgagtttggtctccctgggaaggtggggcaccagccccatgccacgttgcacgtatcagctggagcagaatcctggcttccttccggatgggcctggggtccatgcccgcgctcactgccaagatctttctggcccctacggacacgagtttgcgacctctgagtcactgggtgggcgcgtcggaaagaccagggcgcctcagtctggagctcgcagtcgtatggagagggcaggaccagccggggaggagggcggcgcgcgcgagggtcgccttcttcccagggcaccgggggcgtgggtgctgcgggcgtgcgccgagagggcagccttggaagtgggcgcagcttcggcagacacaggcgtgaggggctgcggagctcgagggccggcgcccctgcttgcctctgcgggaggtgggcgcgcccgggacggaacctggggcgtcagaacgaaaggcagcggcgccgcgcttcccagccggccagcctcccgcgcagcgccccggccggaagcctcctcgccgccgcttcctctcgagaaggcgcggggcgggctgtccggcccgcagggcggtcgagcccgcggcgccatggctcacgtcggctcccgcaagcgctcgaggagtcgcagccggtcccggggacgggggtcggaaaagagaaagaagaagagcaggaaagacacctcgaggaactgctcggcctccacatcccaaggtcgcaaggccagcacggcccctggggcggaggagagaagcaagcagaaggcccggaggagaacaagatccagctcctcctcctcttcttccagttcttctagctcctcttcttcctcctcgtcctcctcctcttcctccagtgatggccggaagaagcgggggaagtacaaggacaagaggaggaagaagaagaagaagaggaagaagctgaagaagaagggcaaggagaaggcggaagcacagcaggtggaggctctgccgggcccctcgctggaccagtggcaccgatcagctggggaggaagaggatggcccagtcctgacggatgagcagaagtcccgaatccaggccatgaagcccatgaccaaggaggagtgggatgcccggcagagcatcatccgcaaggtggtggaccctgagacggggcgcaccaggcttattaagggagatggcgaggtcctagaggaaatcgtaaccaaagaacgacacagagagatcaacaagcaagccacccgaggggactgcctggccttccagatgcgagctgggttgcttccctgagggcccccgctggccaaggcctgtggacgacgctggcggcccagcctgggcaggtttcagggtgccagtgggaagcctgatgggtgctggtggcctttcccccgtggattggtctctggcccagcccagtctcttctcaggggcagggggtggaggttggggtcaccggcctgcttggcacccccatctgaaagagcagcacttctcagctattaaaggccccctggatagac

SEQ ID NO: 414302 - DNA, 1877 bp, Homo sapiens
aaggctaggtaggaggcgggtgttgaatcggccgagggcttcctctcgagaaggcgcggggcgggctgtccggcccgcagggcggtcgagcccgcggcgccatggctcacgtcggctcccgcaagcgctcgaggagtcgcagccggtcccggggacgggggtcggaaaagagaaagaagaagagcaggaaagacacctcgaggaactgctcggcctccacatcccaaggtcgcaaggccagcacggcccctggggcggaggagagaagcaagcagaaggcccggaggagaacaagatccagctcctcctcctcttcttccagttcttctagctcctcttcttcctcctcgtcctcctcctcttcctccagtgatggccggaagaagcgggggaagtacaaggacaagaggaggaagaagaagaagaagaggaagaagctgaagaagaagggcaaggagaaggcggaagcacagcaggtggaggctctgccgggcccctcgctggaccagtggcaccgatcagctggggaggaagaggatggcccagtcctgacggatgagcagaagtcccgaatccaggccatgaagcccatgaccaaggaggagtgggatgcccggcagagcatcatccgcaaggtggtggaccctgagacggggcgcaccaggcttattaagggagatggcgaggtcctagaggaaatcgtaaccaaagaacgacacagagagatcaacaagcaagccacccgaggggactgcctggccttccagatgcgagctgggttgcttccctgagggcccccgctggccaaggcctgtggacgacgctggcggcccagcctgggcaggtttcagggtgccagtgggaagcctgatgggtgctggtggcctttcccccgtggattggtctctggcccagcccagtctcttctcaggggcagggggtggaggttggggtcaccggcctgcttggcacccccatctgaaagagcagcacttctcagctattaaaggccccctggatagacaaaaaaaaaaaaaaaaaaaaaaaaaaaaaaaaaaaaaaaaaaaaaaaaaaaagagaggggcgcgcgcgcgcccacaaaatattccccccgggggggcgcccacataccgcccgacccccttttttttgaaaaagggggccccctaatagaggaggagcgcgagcttattatatacacggagagagcagcgacggggcgcccgcggattattaaaacaagcgcggcgggaggaggcggggaacaaaccgcgcgcgacaccggcggggaacacctcttgggggagagaaagccaacccctcacctgcgccgggggggcgggcagacaccccaggtggggaccccaccatctccctaaccggagagaattattaaaggcggtcctagggggggaacaaataataaacccttttacagagcgggggataatgcgcggggataaccaatcaccgcggcgataatatgcgcgctggggcgggtgagaaacaatctttgcgtgccacaccagggagcgtcgtgtacttttgtaaaacaatttttattataccacccgcgggggtctccttttttgcttttattaatataccggtgacgaccacaagcaccaggtcgagcggaacaacgcgagacggcagcaccgcacccggaagcgaagcagccgcagaccacgaacaagggagggagaggcggggatgaaaggaaggcggagaaagcaagtagggcgcggagagagaaaagaagacgagagcgggagggaagaagacgtgagcgccgccggagccgggagagagaagcgaaacgaacacaacaacaacaacgacaacactgagcaagacaaacgaaaagcacaacacac

SEQ ID NO: 414303 - DNA, 965 bp, Homo sapiens
ccgacggcagtaccccggggtaataggtagcgaggccggggtggcgcgtcttcttcgtcgccagcccgcggcgccatggctcacgtcggctcccgcaagcgctcgaggagtcgcagccggtcccggggacgggggtcggaaaagagaaagaagaagagcaggaaagacacctcgaggaactgctcggcctccacatcccaagagagaagcaagcagaaggcccggaggagaacaagatccagctcctcctcctcttcttccagttcttctagctcctcttcttcctcctcgtcctcctcctcttcctccagtgatggccggaagaagcgggggaagtacaaggacaagaggaggaagaagaagaagaagaggaagaagctgaagaagaagggcaaggagaaggcggaagcacagcaggtggaggctctgccgggcccctcgctggaccagtggcaccgatcagctggggaggaagaggatggcccagtcctgacggatgagcagaagtcccgaatccaggccatgaagcccatgaccaaggaggagtgggatgcccggcagagcatcatccgcaaggtggtggaccctgagacggggcgcaccaggcttattaagggagatggcgaggtcctagaggaaatcgtaaccaaagaacgacacagagagatcaacaagcaagccacccgaggggactgcctggccttccagatgcgagctgggttgcttccctgagggcccccgctggccaaggcctgtggacgacgctggcggcccagcctgggcaggtttcagggtgccagtgggaagcctgatgggtgctggtggcctttcccccgtggattggtctctggcccagcccagtctcttctcaggggcagggggtggaggttggggtcaccggcctgcttggcacccccatctgaaagagcagcacttctcagctattaaaggccccctggatagac

SEQ ID NO: 414304 - DNA, 1733 bp, Homo sapiens
gcggctgtcattgtggaagagttgcaacttgggggcccgagattggatgaagcgcacagccacgctttgggttacacatttgaaactcagggggcttccatattgcagtcttgagtttggtctccctgggaaggtggggcaccagccccatgccacgttgcacgtatcagctggagcagaatcctggcttccttccggatgggcctggggtccatgcccgcgctcactgccaagatctttctggcccctacggacacgagtttgcgacctctgagtcactgggtgggcgcgtcggaaagaccagggcgcctcagtctggagctcgcagtcgtatggagagggcaggaccagccggggaggagggcggcgcgcgcgagggtcgccttcttcccagggcaccgggggcgtgggtgctgcgggcgtgcgccgagagggcagccttggaagtgggcgcagcttcggcagacacaggcgtgaggggctgcggagctcgagggccggcgcccctgcttgcctctgcgggaggtgggcgcgcccgggacggaacctggggcgtcagaacgaaaggcagcggcgccgcgcttcccagccggccagcctcccgcgcagcgccccggccggaagcctcctcgccgccgcttcctctcgagaaggcgcggggcgggctgtccggcccgcagggcggtcgaggtgggaacggagcagccccgggggcccccttgaggcggcgaggccgcgaagggcgcggggctggagggtaggagagcgcgggaaagcgccccagacgccactcgcggcggacggcggccagttcccaggggtttggagccggcccgcggcgccatggctcacgtcggctcccgcaagcgctcgaggagtcgcagccggtcccggggacgggggtcggaaaagagaaagaagaagagcaggaaagacacctcgaggaactgctcggcctccacatcccaagagagaagcaagcagaaggcccggaggagaacaagatccagctcctcctcctcttcttccagttcttctagctcctcttcttcctcctcgtcctcctcctcttcctccagtgatggccggaagaagcgggggaagtacaaggacaagaggaggaagaagaagaagaagaggaagaagctgaagaagaagggcaaggagaaggcggaagcacagcaggtggaggctctgccgggcccctcgctggaccagtggcaccgatcagctggggaggaagaggatggcccagtcctgacggatgagcagaagtcccgaatccaggccatgaagcccatgaccaaggaggagtgggatgcccggcagagcatcatccgcaaggtggtggaccctgagacggggcgcaccaggcttattaagggagatggcgaggtcctagaggaaatcgtaaccaaagaacgacacagagagatcaacaagcaagccacccgaggggactgcctggccttccagatgcgagctgggttgcttccctgagggcccccgctggccaaggcctgtggacgacgctggcggcccagcctgggcaggtttcagggtgccagtgggaagcctgatgggtgctggtggcctttcccccgtggattggtctctggcccagcccagtctcttctcaggggcagggggtggaggttggggtcaccggcctgcttggcacccccatctgaaagagcagcacttctcagctattaaaggccccctggatagac

SEQ ID NO: 414305 - DNA, 1231 bp, Homo sapiens
gcggctgtcattgtggaagagttgcaacttgggggcccgagattggatgaagcgcacagccacgctttgggttacacatttgaaactcagggggcttccatattgcagtcttgagtttggtctccctgggaaggtggggcaccagccccatgccacgttgcacgtatcagctggagcagaatcctggcttccttccggatgggcctggggtccatgcccgcgctcactgccaagatctttctggcccctacggacacgagtttgcgacctctgagtcactgggtgggcgcgtcggaaagaccagggcgcctcagtctggagctcgcagtccccgcggcgccatggctcacgtcggctcccgcaagcgctcgaggagtcgcagccggtcccggggacgggggtcggaaaagagaaagaagaagagcaggaaagacacctcgaggaactgctcggcctccacatcccaagagagaagcaagcagaaggcccggaggagaacaagatccagctcctcctcctcttcttccagttcttctagctcctcttcttcctcctcgtcctcctcctcttcctccagtgatggccggaagaagcgggggaagtacaaggacaagaggaggaagaagaagaagaagaggaagaagctgaagaagaagggcaaggagaaggcggaagcacagcaggtggaggctctgccgggcccctcgctggaccagtggcaccgatcagctggggaggaagaggatggcccagtcctgacggatgagcagaagtcccgaatccaggccatgaagcccatgaccaaggaggagtgggatgcccggcagagcatcatccgcaaggtggtggaccctgagacggggcgcaccaggcttattaagggagatggcgaggtcctagaggaaatcgtaaccaaagaacgacacagagagatcaacaagcaagccacccgaggggactgcctggccttccagatgcgagctgggttgcttccctgagggcccccgctggccaaggcctgtggacgacgctggcggcccagcctgggcaggtttcagggtgccagtgggaagcctgatgggtgctggtggcctttcccccgtggattggtctctggcccagcccagtctcttctcaggggcagggggtggaggttggggtcaccggcctgcttggcacccccatctgaaagagcagcacttctcagctattaaaggccccctggatagac

SEQ ID NO: 414306 - DNA, 1866 bp, Homo sapiens
gcggctgtcattgtggaagagttgcaacttgggggcccgagattggatgaagcgcacagccacgctttgggttacacatttgaaactcagggggcttccatattgcagtcttgagtttggtctccctgggaaggtggggcaccagccccatgccacgttgcacgtatcagctggagcagaatcctggcttccttccggatgggcctggggtccatgcccgcgctcactgccaagatctttctggcccctacggacacgagtttgcgacctctgagtcactgggtgggcgcgtcggaaagaccagggcgcctcagtctggagctcgcagtcgtatggagagggcaggaccagccggggaggagggcggcgcgcgcgagggtcgccttcttcccagggcaccgggggcgtgggtgctgcgggcgtgcgccgagagggcagccttggaagtgggcgcagcttcggcagacacaggcgtgaggggctgcggagctcgagggccggcgcccctgcttgcctctgcgggaggtgggcgcgcccgggacggaacctggggcgtcagaacgaaaggcagcggcgccgcgcttcccagccggccagcctcccgcgcagcgccccggccggaagcctcctcgccgccgcttcctctcgagaaggcgcggggcgggctgtccggcccgcagggcggtcgaggtgggaacggagcagccccgggggcccccttgaggcggcgaggccgcgaagggcgcggggctggagggtaggagagcgcgggaaagcgccccagacgccactcgcggcggacggcggccagttcccaggggtttggagccgggtgcgcaggcgtggggcctccgggcacggggcgggcccttaacaggcaccgctgcggggactggagtcggcggagaaaaccggggtccccagcgctggggcccgcggcgccatggctcacgtcggctcccgcaagcgctcgaggagtcgcagccggtcccggggacgggggtcggaaaagagaaagaagaagagcaggaaagacacctcgaggaactgctcggcctccacatcccaaggtcgcaaggccagcacggcccctggggcggaggagagaagcaagcagaaggcccggaggagaacaagatccagctcctcctcctcttcttccagttcttctagctcctcttcttcctcctcgtcctcctcctcttcctccagtgatggccggaagaagcgggggaagtacaaggacaagaggaggaagaagaagaagaagaggaagaagctgaagaagaagggcaaggagaaggcggaagcacagcaggtggaggctctgccgggcccctcgctggaccagtggcaccgatcagctggggaggaagaggatggcccagtcctgacggatgagcagaagtcccgaatccaggccatgaagcccatgaccaaggaggagtgggatgcccggcagagcatcatccgcaaggtggtggaccctgagacggggcgcaccaggcttattaagggagatggcgaggtcctagaggaaatcgtaaccaaagaacgacacagagagatcaacaagcaagccacccgaggggactgcctggccttccagatgcgagctgggttgcttccctgagggcccccgctggccaaggcctgtggacgacgctggcggcccagcctgggcaggtttcagggtgccagtgggaagcctgatgggtgctggtggcctttcccccgtggattggtctctggcccagcccagtctcttctcaggggcagggggtggaggttggggtcaccggcctgcttggcacccccatctgaaagagcagcacttctcagctattaaaggccccctggatagac

SEQ ID NO: 414307 - DNA, 1498 bp, Homo sapiens
  misc_feature (1035)..(1035): n is a, c, g, or t
aaggctaggtaggaggcgggtgttgaatcggccgagggcttcctctcgagaaggcgcggggcgggctgtccggcccgcagggcggtcgagcccgcggcgccatggctcacgtcggctcccgcaagcgctcgaggagtcgcagccggtcccggggacgggggtcggaaaagagaaagaagaagagcaggaaagacacctcgaggaactgctcggcctccacatcccaaggtcgcaaggccagcacggcccctggggcggaggagagaagcaagcagaaggcccggaggagaacaagatccagctcctcctcctcttcttccagttcttctagctcctcttcttcctcctcgtcctcctcctcttcctccagtgatggccggaagaagcgggggaagtacaaggacaagaggaggaagaagaagaagaagaggaagaagctgaagaagaagggcaaggagaaggcggaagcacagcaggtggaggctctgccgggcccctcgctggaccagtggcaccgatcagctggggaggaagaggatggcccagtcctgacggatgagcagaagtcccgaatccaggccatgaagcccatgaccaaggaggagtgggatgcccggcagagcatcatccgcaaggtggtggaccctgagacggggcgcaccaggcttattaagggagatggcgaggtcctagaggaaatcgtaaccaaagaacgacacagagagatcaacaagcaagccacccgaggggactgcctggccttccagatgcgagctgggttgcttccctgagggcccccgctggccaaggcctgtggacgacgctggcggcccagcctgggcaggtttcagggtgccagtgggaagcctgatgggtgctggtggcctttcccccgtggattggtctctggcccagcccagtctcttctcaggggcagggggtggaggttggggtcaccggcctgcttggcacccccatctgaaagagcagcacttctcagctattaaaggccccctggatagacaaaataaaatnaatatacaaaaacagggggaaagcatataaagaattaccctaggagggggccacgttacgggtcaccggctttctttaccacgggtgcccatatggaacggcattaataagcaacgactgcgcgctttaacacgctgtgacactgtgaacaactgttaactgagcacttggggacgagcacacatacccgggggggcaacattgtggccaacacccccacagagttttaggcccccagggcaaaattaacctctcagggataagcgggttaaccaacagaccataatcgggcctaaaagactgtaggagccttatatgaattgcgcagccacgataagagatgatcaacaagaatctgcccaggtcgacaccatatctactcgcgcagcgtagctgtcgcgcagagaacacatcacagcaccacccagatcatgacacacgacctacccactgccgatcggag

SEQ ID NO: 414308 - DNA, 1264 bp, Homo sapiens
gcggctgtcattgtggaagagttgcaacttgggggcccgagattggatgaagcgcacagccacgctttgggttacacatttgaaactcagggggcttccatattgcagtcttgagtttggtctccctgggaaggtggggcaccagccccatgccacgttgcacgtatcagctggagcagaatcctggcttccttccggatgggcctggggtccatgcccgcgctcactgccaagatctttctggcccctacggacacgagtttgcgacctctgagtcactgggtgggcgcgtcggaaagaccagggcgcctcagtctggagctcgcagtccccgcggcgccatggctcacgtcggctcccgcaagcgctcgaggagtcgcagccggtcccggggacgggggtcggaaaagagaaagaagaagagcaggaaagacacctcgaggaactgctcggcctccacatcccaaggtcgcaaggccagcacggcccctggggcggaggagagaagcaagcagaaggcccggaggagaacaagatccagctcctcctcctcttcttccagttcttctagctcctcttcttcctcctcgtcctcctcctcttcctccagtgatggccggaagaagcgggggaagtacaaggacaagaggaggaagaagaagaagaagaggaagaagctgaagaagaagggcaaggagaaggcggaagcacagcaggtggaggctctgccgggcccctcgctggaccagtggcaccgatcagctggggaggaagaggatggcccagtcctgacggatgagcagaagtcccgaatccaggccatgaagcccatgaccaaggaggagtgggatgcccggcagagcatcatccgcaaggtggtggaccctgagacggggcgcaccaggcttattaagggagatggcgaggtcctagaggaaatcgtaaccaaagaacgacacagagagatcaacaagcaagccacccgaggggactgcctggccttccagatgcgagctgggttgcttccctgagggcccccgctggccaaggcctgtggacgacgctggcggcccagcctgggcaggtttcagggtgccagtgggaagcctgatgggtgctggtggcctttcccccgtggattggtctctggcccagcccagtctcttctcaggggcagggggtggaggttggggtcaccggcctgcttggcacccccatctgaaagagcagcacttctcagctattaaaggccccctggatagac

SEQ ID NO: 414309 - DNA, 1916 bp, Homo sapiens
gcggctgtcattgtggaagagttgcaacttgggggcccgagattggatgaagcgcacagccacgctttgggttacacatttgaaactcagggggcttccatattgcagtcttgagtttggtctccctgggaaggtggggcaccagccccatgccacgttgcacgtatcagctggagcagaatcctggcttccttccggatgggcctggggtccatgcccgcgctcactgccaagatctttctggcccctacggacacgagtttgcgacctctgagtcactgggtgggcgcgtcggaaagaccagggcgcctcagtctggagctcgcagtcgtatggagagggcaggaccagccggggaggagggcggcgcgcgcgagggtcgccttcttcccagggcaccgggggcgtgggtgctgcgggcgtgcgccgagagggcagccttggaagtgggcgcagcttcggcagacacaggcgtgaggggctgcggagctcgagggccggcgcccctgcttgcctctgcgggaggtgggcgcgcccgggacggaacctggggcgtcagaacgaaaggcagcggcgccgcgcttcccagccggccagcctcccgcgcagcgccccggccggaagcctcctcgccgccgcttcctctcgagaaggcgcggggcgggctgtccggcccgcagggcggtcgagcccgcggcgccatggctcacgtcggctcccgcaagcgctcgaggagtcgcagccggtcccggggacgggggtcggaaaagagaaagaagaagagcaggaaagacacctcgaggaactgctcggcctccacatcccaaggtcgcaaggccagcacggcccctggggcggagggtgaggaccacaggcatcggggagaggaggcgcagttactacccggggaagtcgggcgagcagtggtcggggacgctcagtcatgcctctgtgcagccgggcctgagatgtgagggccaggcgccgcaggagccaggaaggggctcctctgggaagctccatctctgttctggaaagcccctcaggaagcgctcaccctgtagccggtctgtgcctgccccaggccagagcaggggacgaaggtttacctcttcccctcctggctttccagcctcaccttctccctgcatcaagagaagcaagcagaaggcccggaggagaacaagatccagctcctcctcctcttcttccagttcttctagctcctcttcttcctcctcgtcctcctcctcttcctccagtgatggccggaagaagcgggggaagtacaaggacaagaggaggaagaagaagaagaagaggaagaagctgaagaagaagggcaaggagaaggcggaagcacagcaggtggaggctctgccgggcccctcgctggaccagtggcaccgatcagctggggaggaagaggatggcccagtcctgacggatgagcagaagtcccgaatccaggccatgaagcccatgaccaaggaggagtgggatgcccggcagagcatcatccgcaaggtggtggaccctgagacggggcgcaccaggcttattaagggagatggcgaggtcctagaggaaatcgtaaccaaagaacgacacagagagatcaacaagcaagccacccgaggggactgcctggccttccagatgcgagctgggttgcttccctgagggcccccgctggccaaggcctgtggacgacgctggcggcccagcctgggcaggtttcagggtgccagtgggaagcctgatgggtgctggtggcctttcccccgtggattggtctctggcccagcccagtctcttctcaggggcagggggtggaggttggggtcaccggcctgcttggcacccccatctgaaagagcagcacttctcagctattaaaggccccctggatagac

SEQ ID NO: 414310 - DNA, 955 bp, Homo sapiens
aaggctaggtaggaggcgggtgttgaatcggccgagggcttcctctcgagaaggcgcggggcgggctgtccggcccgcagggcggtcgagcccgcggcgccatggctcacgtcggctcccgcaagcgctcgaggagtcgcagccggtcccggggacgggggtcggaaaagagaaagaagaagagcaggaaagacacctcgaggaactgctcggcctccacatcccaaggtcgcaaggccagcacggcccctggggcggaggagagaagcaagcagaaggcccggaggagaacaagatccagctcctcctcctcttcttccagttcttctagctcctcttcttcctcctcgtcctcctcctcttcctccagtgatggccggaagaagcgggggaagtacaaggacaagaggaggaagaagaagaagaagaggaagaagctgaagaagaagggcaaggagaaggcggaagcacagcaggtggaggctctgccgggcccctcgctggaccagtggcaccgatcagctggggaggaagaggatggcccagtcctgacggatgagcagaagtcccgaatccaggccatgaagcccatgaccaaggaggagtgggatgcccggcagagcatcatccgcaaggtggtggaccctgagacggggcgcaccaggcttattaagggagatggcgaggtcctagaggaaatcgtaaccaaagaacgacacagagagatcaacaagcaagccacccgaggggactgcctggccttccagatgcgagctgggttgcttccctgagggcccccgctggccaaggcctgtggacgacgctggcggcccagcctgggcaggtttcagggtgccagtgggaagcctgatgggtgctggtggcctttcccccgtggattggtctctggccagaggcctctctggcccaaagcggcctctctggcccagagagg

SEQ ID NO: 414311 - DNA, 993 bp, Homo sapiens
aaggctaggtaggaggcgggtgttgaatcggccgagggcttcctctcgagaaggcgcggggcgggctgtccggcccgcagggcggtcgagcccgcggcgccatggctcacgtcggctcccgcaagcgctcgaggagtcgcagccggtcccggggacgggggtcggaaaagagaaagaagaagagcaggaaagacacctcgaggaactgctcggcctccacatcccaaggtcgcaaggccagcacggcccctggggcggaggagagaagcaagcagaaggcccggaggagaacaagatccagctcctcctcctcttcttccagttcttctagctcctcttcttcctcctcgtcctcctcctcttcctccagtgatggccggaagaagcgggggaagtacaaggacaagaggaggaagaagaagaagaagaggaagaagctgaagaagaagggcaaggagaaggcggaagcacagcaggtggaggctctgccgggcccctcgctggaccagtggcaccgatcagctggggaggaagaggatggcccagtcctgacggatgagcagaagtcccgaatccaggccatgaagcccatgaccaaggaggagtgggatgcccggcagagcatcatccgcaaggtggtggaccctgagacggggcgcaccaggcttattaagggagatggcgaggtcctagaggaaatcgtaaccaaagaacgacacagagagatcaacaagcaagccacccgaggggactgcctggccttccagatgcgagctgggttgcttccctgagggcccccgctggccaaggcctgtggacgacgctggcggcccagcctgggcaggtttcagggtgccagtgggaagcctgatgggtgctggtggcctttcccccgtggattggtctctggcctgcgaaccagccctggcggaggtgaggggtgtctgaggagtgatgtggagttaagcgccatcctcaccgcaactgtacgcg

SEQ ID NO: 414312 - DNA, 1026 bp, Homo sapiens
aaggctaggtaggaggcgggtgttgaatcggccgagggcttcctctcgagaaggcgcggggcgggctgtccggcccgcagggcggtcgagcccgcggcgccatggctcacgtcggctcccgcaagcgctcgaggagtcgcagccggtcccggggacgggggtcggaaaagagaaagaagaagagcaggaaagacacctcgaggaactgctcggcctccacatcccaaggtcgcaaggccagcacggcccctggggcggaggagagaagcaagcagaaggcccggaggagaacaagatccagctcctcctcctcttcttccagttcttctagctcctcttcttcctcctcgtcctcctcctcttcctccagtgatggccggaagaagcgggggaagtacaaggacaagaggaggaagaagaagaagaagaggaagaagctgaagaagaagggcaaggagaaggcggaagcacagcaggtggaggctctgccgggcccctcgctggaccagtggcaccgatcagctggggaggaagaggatggcccagtcctgacggatgagcagaagtcccgaatccaggccatgaagcccatgaccaaggaggagtgggatgcccggcagagcatcatccgcaaggtggtggaccctgagacggggcgcaccaggcttattaagggagatggcgaggtcctagaggaaatcgtaaccaaagaacgacacagagagatcaacaagcaagccacccgaggggactgcctggccttccagatgcgagctgggttgcttccctgagggcccccgctggccaaggcctgtggacgacgctggcggcccagcctgggcaggtttcagggtgccagtgggaagcctgatgggggagggggaccttcctcctttgttttggtcggggtaaggtccactttcttcccaggggcagcggttttgggaattggttgccctcttgtgtggcacccctttctgattagaagtaggcgttatcagataattaaaggccccatgaaaaaaa

SEQ ID NO: 414313 - DNA, 757 bp, Homo sapiens
gagctcggtacccttgcatatggcaaggccaagcatccctctggagttgaagagacgaggaagatgaaccacgtgacgaaatagaaaaagctacctatggagttgtgccttggccttgccatatgcaattgcatatggcgaggaggaagaagaagaagaagaggaagaagctgaagaagaagggcaaggagaaggcggaagcacagcaggtggaggctctgccgggcccctcgctggaccagtggcaccgatcagctggggaggaagaggatggcccagtcctgacggatgagcagaagtcccgaatccaggccatgaagcccatgaccaaggaggagtgggatgcccggcagagcatcatccgcaaggtggtggaccctgagacggggcgcaccaggcttattaagggagatggcgaggtcctagaggaaatcgtaaccaaagaacgacacagagagatcaacaagcaagccacccgaggggactgcctggccttccagatgcgagctgggttgcttccctgagggcccccgctggccaaggcctgtggacgacgctggcggcccagcctgggcaggtttcagggtgccagtgggaagcctgatgggtgctggtggcctttcccccgtggattggtctctggcccagcccagtctcttctcaggggcagggggtggaggttggggtcaccggcctgcttggcacccccatctgaaagagcagcacttctcagctattaaaggccccctggatagac

SEQ ID NO: 414314 - DNA, 1418 bp, Homo sapiens
gcggctgtcattgtggaagagttgcaacttgggggcccgagattggatgaagcgcacagccacgctttgggttacacatttgaaactcagggggcttccatattgcagtcttgagtttggtctccctgggaaggtggggcaccagccccatgccacgttgcacgtatcagctggagcagaatcctggcttccttccggatgggcctggggtccatgcccgcgctcactgccaagatctttctggcccctacggacacgagtttgcgacctctgagtcactgggtgggcgcgtcggaaagaccagggcgcctcagtctggagctcgcagtcgtatggagagggcaggaccagccggggaggagggcggcgcgcgcgagggtcgccttcttcccagggcaccgggggcgtgggtgctgcgggcgtgcgccgagagggcagccttggaagtgggcgcagcttcggcagacacaggcgtgaggggctgcggagctcgagggccggcgcccctgcttgcctctgcgggaggtgggcgcgcccgggacggaacctggggcgtcagaacgaaaggcagcggcgccgcgcttcccagccggccagcctcccgcgcagcgccccggccggaagcctcctcgccgccgcttcctctcgagaaggcgcggggcgggctgtccggcccgcagggcggtcgagcccgcggcgccatggctcacgtcggctcccgcaagcgctcgaggagtcgcagccggtcccggggacgggggtcggaaaagagaaagaagaagagcaggaaagacacctcgaggaactgctcggcctccacatcccaaggtcgcaaggccagcacggcccctggggcggaggttcttctagctcctcttcttcctcctcgtcctcctcctcttcctccagtgatggccggaagaagcgggggaagtacaaggacaagaggaggaagaagaagaagaagaggaagaagctgaagaagaagggcaaggagaaggcggaagcacagcaggcatcatccgcaaggtggtggaccctgagacggggcgcaccaggcttattaagggagatggcgaggtcctagaggaaatcgtaaccaaagaacgacacagagagatcaacaagcaagccacccgaggggactgcctggccttccagatgcgagctgggttgcttccctgagggcccccgctggccaaggcctgtggacgacgctggcggcccagcctgggcaggtttcagggtgccagtgggaagcctgatgggtgctggtggcctttcccccgtggattggtctctggcccagcccagtctcttctcaggggcagggggtggaggttggggtcaccggcctgcttggcacccccatctgaaagagcagcacttctcagctattaaaggccccctggatagac

SEQ ID NO: 414315 - DNA, 2239 bp, Homo sapiens
gcggctgtcattgtggaagagttgcaacttgggggcccgagattggatgaagcgcacagccacgctttgggttacacatttgaaactcagggggcttccatattgcagtcttgagtttggtctccctgggaaggtggggcaccagccccatgccacgttgcacgtatcagctggagcagaatcctggcttccttccggatgggcctggggtccatgcccgcgctcactgccaagatctttctggcccctacggacacgagtttgcgacctctgagtcactgggtgggcgcgtcggaaagaccagggcgcctcagtctggagctcgcagtcgtatggagagggcaggaccagccggggaggagggcggcgcgcgcgagggtcgccttcttcccagggcaccgggggcgtgggtgctgcgggcgtgcgccgagagggcagccttggaagtgggcgcagcttcggcagacacaggcgtgaggggctgcggagctcgagggccggcgcccctgcttgcctctgcgggaggtgggcgcgcccgggacggaacctggggcgtcagaacgaaaggcagcggcgccgcgcttcccagccggccagcctcccgcgcagcgccccggccggaagcctcctcgccgccgcttcctctcgagaaggcgcggggcgggctgtccggcccgcagggcggtcgaggtgggaacggagcagccccgggggcccccttgaggcggcgaggccgcgaagggcgcggggctggagggtaggagagcgcgggaaagcgccccagacgccactcgcggcggacggcggccagttcccaggggtttggagccgggtgcgcaggcgtggggcctccgggcacggggcgggcccttaacaggcaccgctgcggggactggagtcggcggagaaaaccggggtccccagcgctggggcccgcggcgccatggctcacgtcggctcccgcaagcgctcgaggagtcgcagccggtcccggggacgggggtcggaaaagagaaagaagaagagcaggaaagacacctcgaggaactgctcggcctccacatcccaaggtcgcaaggccagcacggcccctggggcggagggtgaggaccacaggcatcggggagaggaggcgcagttactacccggggaagtcgggcgagcagtggtcggggacgctcagtcatgcctctgtgcagccgggcctgagatgtgagggccaggcgccgcaggagccaggaaggggctcctctgggaagctccatctctgttctggaaagcccctcaggaagcgctcaccctgtagccggtctgtgcctgccccaggccagagcaggggacgaaggtttacctcttcccctcctggctttccagcctcaccttctccctgcatcaagagaagcaagcagaaggcccggaggagaacaagatccagctcctcctcctcttcttccagttcttctagctcctcttcttcctcctcgtcctcctcctcttcctccagtgatggccggaagaagcgggggaagtacaaggacaagaggaggaagaagaagaagaagaggaagaagctgaagaagaagggcaaggagaaggcggaagcacagcaggtggaggctctgccgggcccctcgctggaccagtggcaccgatcagctggggaggaagaggatggcccagtcctgacggatgagcagaagtcccgaatccaggccatgaagcccatgaccaaggaggagtgggatgcccggcagagcatcatccgcaaggtggtggaccctgagacggggcgcaccaggcttattaagggagatggcgaggtcctagaggaaatcgtaaccaaagaacgacacagagagatcaacaaggtgggtgtggcccctctgcctgccatccgcccccagctctgtttgtgatgtacccctcctcctgtgtgctttcttccccagcaagccacccgaggggactgcctggccttccagatgcgagctgggttgcttccctgagggcccccgctggccaaggcctgtggacgacgctggcggcccagcctgggcaggtttcagggtgccagtgggaagcctgatgggtgctggtggcctttcccccgtggattggtctctggcccagcccagtctcttctcaggggcagggggtggaggttggggtcaccggcctgcttggcacccccatctgaaagagcagcacttctcagctattaaaggccccctggatagac

SEQ ID NO: 414316 - DNA, 2099 bp, Homo sapiens
gcggctgtcattgtggaagagttgcaacttgggggcccgagattggatgaagcgcacagccacgctttgggttacacatttgaaactcagggggcttccatattgcagtcttgagtttggtctccctgggaaggtggggcaccagccccatgccacgttgcacgtatcagctggagcagaatcctggcttccttccggatgggcctggggtccatgcccgcgctcactgccaagatctttctggcccctacggacacgagtttgcgacctctgagtcactgggtgggcgcgtcggaaagaccagggcgcctcagtctggagctcgcagtcgtatggagagggcaggaccagccggggaggagggcggcgcgcgcgagggtcgccttcttcccagggcaccgggggcgtgggtgctgcgggcgtgcgccgagagggcagccttggaagtgggcgcagcttcggcagacacaggcgtgaggggctgcggagctcgagggccggcgcccctgcttgcctctgcgggaggtgggcgcgcccgggacggaacctggggcgtcagaacgaaaggcagcggcgccgcgcttcccagccggccagcctcccgcgcagcgccccggccggaagcctcctcgccgccgcttcctctcgagaaggcgcggggcgggctgtccggcccgcagggcggtcgagcccgcggcgccatggctcacgtcggctcccgcaagcgctcgaggagtcgcagccggtcccggggacgggggtcggaaaagagaaagaagaagagcaggaaagacacctcgaggaactgctcggcctccacatcccaaggtcgcaaggccagcacggcccctggggcggaggagagaagcaagcagaaggcccggaggagaacaagatccagctcctcctcctcttcttccagttcttctagctcctcttcttcctcctcgtcctcctcctcttcctccagtgatggccggaagaagcgggggaagtacaaggacaagaggaggaagaagaagaagaagaggaagaagctgaagaagaagggcaaggagaaggcggaagcacagcaggtggaggctctgccgggcccctcgctggaccagtggcaccgatcagctggggaggaagaggatggcccagtcctgacggatgagcagaagtcccgaatccaggccatgaagcccatgaccaaggaggagtgggatgcccggcagagcatcatccgcaaggtggtggaccctgagacggggcgcaccaggtggggagctttcggcctgacttacaccacaggatctgggagtgttggctgaagatgtgtgctctcgggaggagtggggccgggcggggttcctggtgcctgaaaaaggccaaatgtgggcaaaaatacggtcacttggagtaagtagttgcaggggctggaagggcctggaggaggctcttgaaagggctgttgttggccgggctgaggctggcaaggcagagcccagctccactgccttcatcagggagagtgggtgaggccccagggtctgtccactcaaggctgcggggtgggagccctgggacccctctgccggctgcttgtggttctgctcctctggcattaggggacctgcctattccttgctgaacggagaccctcccacccccaggcttattaagggagatggcgaggtcctagaggaaatcgtaaccaaagaacgacacagagagatcaacaaggtgggtgtggcccctctgcctgccatccgcccccagctctgtttgtgatgtacccctcctcctgtgtgctttcttccccagcaagccacccgaggggactgcctggccttccagatgcgagctgggttgcttccctgagggcccccgctggccaaggcctgtggacgacgctggcggcccagcctgggcaggtttcagggtgccagtgggaagcctgatgggtgctggtggcctttcccccgtggattggtctctggcccagcccagtctcttctcaggggcagggggtggaggttggggtcaccggcctgcttggcacccccatctgaaagagcagcacttctcagctattaaaggccccctggatagac

SEQ ID NO: 414317 - DNA, 1479 bp, Homo sapiens
gcggctgtcattgtggaagagttgcaacttgggggcccgagattggatgaagcgcacagccacgctttgggttacacatttgaaactcagggggcttccatattgcagtcttgagtttggtctccctgggaaggtggggcaccagccccatgccacgttgcacgtatcagctggagcagaatcctggcttccttccggatgggcctggggtccatgcccgcgctcactgccaagatctttctggcccctacggacacgagtttgcgacctctgagtcactgggtgggcgcgtcggaaagaccagggcgcctcagtctggagctcgcagtcgtatggagagggcaggaccagccggggaggagggcggcgcgcgcgagggtcgccttcttcccagggcaccgggggcgtgggtgctgcgggcgtgcgccgagagggcagccttggaagtgggcgcagcttcggcagacacaggcgtgaggggctgcggagctcgagggccggcgcccctgcttgcctctgcgggaggtgggcgcgcccgggacggaacctggggcgtcagaacgaaaggcagcggcgccgcgcttcccagccggccagcctcccgcgcagcgccccggccggaagcctcctcgccgccgcttcctctcgagaaggcgcggggcgggctgtccggcccgcagggcggtcgagcccgcggcgccatggctcacgtcggctcccgcaagcgctcgaggagtcgcagccggtcccggggacgggggtcggaaaagagaaagaagaagagcaggaaagacacctcgaggaactgctcggcctccacatcccaaggtcgcaaggccagcacggcccctggggcggaggagagaagcaagcagaaggcccggaggagaacaagatccagctcctcctcctcttcttccagttcttctagctcctcttcttcctcctcgtcctcctcctcttcctccagtgatggccggaagaagcgggggaagtacaaggacaagaggaggaagaagaagaagaagaggaagaagctgaagaagaagggcaaggagaaggcggaagcacagcaggcatcatccgcaaggtggtggaccctgagacggggcgcaccaggcttattaagggagatggcgaggtcctagaggaaatcgtaaccaaagaacgacacagagagatcaacaagcaagccacccgaggggactgcctggccttccagatgcgagctgggttgcttccctgagggcccccgctggccaaggcctgtggacgacgctggcggcccagcctgggcaggtttcagggtgccagtgggaagcctgatgggtgctggtggcctttcccccgtggattggtctctggcccagcccagtctcttctcaggggcagggggtggaggttggggtcaccggcctgcttggcacccccatctgaaagagcagcacttctcagctattaaaggccccctggatagac

SEQ ID NO: 414318 - DNA, 1527 bp, Homo sapiens
gcggctgtcattgtggaagagttgcaacttgggggcccgagattggatgaagcgcacagccacgctttgggttacacatttgaaactcagggggcttccatattgcagtcttgagtttggtctccctgggaaggtggggcaccagccccatgccacgttgcacgtatcagctggagcagaatcctggcttccttccggatgggcctggggtccatgcccgcgctcactgccaagatctttctggcccctacggacacgagtttgcgacctctgagtcactgggtgggcgcgtcggaaagaccagggcgcctcagtctggagctcgcagtcgtatggagagggcaggaccagccggggaggagggcggcgcgcgcgagggtcgccttcttcccagggcaccgggggcgtgggtgctgcgggcgtgcgccgagagggcagccttggaagtgggcgcagcttcggcagacacaggcgtgaggggctgcggagctcgagggccggcgcccctgcttgcctctgcgggaggtgggcgcgcccgggacggaacctggggcgtcagaacgaaaggcagcggcgccgcgcttcccagccggccagcctcccgcgcagcgccccggccggaagcctcctcgccgccgcttcctctcgagaaggcgcggggcgggctgtccggcccgcagggcggtcgagcccgcggcgccatggctcacgtcggctcccgcaagcgctcgaggagtcgcagccggtcccggggacgggggtcggaaaagagaaagaagaagagcaggaaagacacctcgaggaactgctcggcctccacatcccaagagagaagcaagcagaaggcccggaggagaacaagatccagctcctcctcctcttcttccagttcttctagctcctcttcttcctcctcgtcctcctcctcttcctccagtgatggccggaagaagcgggggaagtacaaggacaagaggaggaagaagaagaagaagaggaagaagctgaagaagaagggcaaggagaaggcggaagcacagcaggcatcatccgcaaggtggtggaccctgagacggggcgcaccaggcttattaagggagatggcgaggtcctagaggaaatcgtaaccaaagaacgacacagagagatcaacaaggtgggtgtggcccctctgcctgccatccgcccccagctctgtttgtgatgtacccctcctcctgtgtgctttcttccccagcaagccacccgaggggactgcctggccttccagatgcgagctgggttgcttccctgagggcccccgctggccaaggcctgtggacgacgctggcggcccagcctgggcaggtttcagggtgccagtgggaagcctgatgggtgctggtggcctttcccccgtggattggtctctggcccagcccagtctcttctcaggggcagggggtggaggttggggtcaccggcctgcttggcacccccatctgaaagagcagcacttctcagctattaaaggccccctggatagac

SEQ ID NO: 414319 - DNA, 1548 bp, Homo sapiens
gcggctgtcattgtggaagagttgcaacttgggggcccgagattggatgaagcgcacagccacgctttgggttacacatttgaaactcagggggcttccatattgcagtcttgagtttggtctccctgggaaggtggggcaccagccccatgccacgttgcacgtatcagctggagcagaatcctggcttccttccggatgggcctggggtccatgcccgcgctcactgccaagatctttctggcccctacggacacgagtttgcgacctctgagtcactgggtgggcgcgtcggaaagaccagggcgcctcagtctggagctcgcagtcgtatggagagggcaggaccagccggggaggagggcggcgcgcgcgagggtcgccttcttcccagggcaccgggggcgtgggtgctgcgggcgtgcgccgagagggcagccttggaagtgggcgcagcttcggcagacacaggcgtgaggggctgcggagctcgagggccggcgcccctgcttgcctctgcgggaggtgggcgcgcccgggacggaacctggggcgtcagaacgaaaggcagcggcgccgcgcttcccagccggccagcctcccgcgcagcgccccggccggaagcctcctcgccgccgcttcctctcgagaaggcgcggggcgggctgtccggcccgcagggcggtcgagcccgcggcgccatggctcacgtcggctcccgcaagcgctcgaggagtcgcagccggtcccggggacgggggtcggaaaagagaaagaagaagagcaggaaagacacctcgaggaactgctcggcctccacatcccaagagagaagcaagcagaaggcccggaggagaacaagatccagctcctcctcctcttcttccagttcttctagctcctcttcttcctcctcgtcctcctcctcttcctccagtgatggccggaagaagcgggggaagtacaaggacaagaggaggaagaagaagaagaagaggaagaagctgaagaagaagggcaaggagaaggcggaagcacagcaggtggaggctctgccgggcccctcgctggaccagtggcaccgatcagctggggaggaagaggatggcccagtcctgacggatgagcagaagtcccgaatccaggccatgaagcccatgaccaaggaggagtgggatgcccggcagagcttattaagggagatggcgaggtcctagaggaaatcgtaaccaaagaacgacacagagagatcaacaagcaagccacccgaggggactgcctggccttccagatgcgagctgggttgcttccctgagggcccccgctggccaaggcctgtggacgacgctggcggcccagcctgggcaggtttcagggtgccagtgggaagcctgatgggtgctggtggcctttcccccgtggattggtctctggcccagcccagtctcttctcaggggcagggggtggaggttggggtcaccggcctgcttggcacccccatctgaaagagcagcacttctcagctattaaaggccccctggatagac

SEQ ID NO: 414320 - DNA, 1605 bp, Homo sapiens
gcggctgtcattgtggaagagttgcaacttgggggcccgagattggatgaagcgcacagccacgctttgggttacacatttgaaactcagggggcttccatattgcagtcttgagtttggtctccctgggaaggtggggcaccagccccatgccacgttgcacgtatcagctggagcagaatcctggcttccttccggatgggcctggggtccatgcccgcgctcactgccaagatctttctggcccctacggacacgagtttgcgacctctgagtcactgggtgggcgcgtcggaaagaccagggcgcctcagtctggagctcgcagtcgtatggagagggcaggaccagccggggaggagggcggcgcgcgcgagggtcgccttcttcccagggcaccgggggcgtgggtgctgcgggcgtgcgccgagagggcagccttggaagtgggcgcagcttcggcagacacaggcgtgaggggctgcggagctcgagggccggcgcccctgcttgcctctgcgggaggtgggcgcgcccgggacggaacctggggcgtcagaacgaaaggcagcggcgccgcgcttcccagccggccagcctcccgcgcagcgccccggccggaagcctcctcgccgccgcttcctctcgagaaggcgcggggcgggctgtccggcccgcagggcggtcgaggtgggaacggagcagccccgggggcccccttgaggcggcgaggccgcgaagggcgcggggctggaggcccgcggcgccatggctcacgtcggctcccgcaagcgctcgaggagtcgcagccggtcccggggacgggggtcggaaaagagaaagaagaagagcaggaaagacacctcgaggaactgctcggcctccacatcccaagagagaagcaagcagaaggcccggaggagaacaagatccagctcctcctcctcttcttccagttcttctagctcctcttcttcctcctcgtcctcctcctcttcctccagtgatggccggaagaagcgggggaagtacaaggacaagaggaggaagaagaagaagaagaggaagaagctgaagaagaagggcaaggagaaggcggaagcacagcaggcatcatccgcaaggtggtggaccctgagacggggcgcaccaggcttattaagggagatggcgaggtcctagaggaaatcgtaaccaaagaacgacacagagagatcaacaagcaagccacccgaggggactgcctggccttccagatgcgagctgggttgcttccctgagggcccccgctggccaaggcctgtggacgacgctggcggcccagcctgggcaggtttcagggtgccagtgggaagcctgatgggtgctggtggcctttcccccgtggattggtctctggcccagcccagtctcttctcaggggcagggggtggaggttggggtcaccggcctgcttggcacccccatctgaaagagcagcacttctcagctattaaaggccccctggatagacaaaaacacaaacaacacagaagcaacaaaacaacaaagaaacaaaacaaacaacacacgggagaccaacggccggggggagaaaagacgcga

SEQ ID NO: 414321 - DNA, 1538 bp, Homo sapiens
gcggctgtcattgtggaagagttgcaacttgggggcccgagattggatgaagcgcacagccacgctttgggttacacatttgaaactcagggggcttccatattgcagtcttgagtttggtctccctgggaaggtggggcaccagccccatgccacgttgcacgtatcagctggagcagaatcctggcttccttccggatgggcctggggtccatgcccgcgctcactgccaagatctttctggcccctacggacacgagtttgcgacctctgagtcactgggtgggcgcgtcggaaagaccagggcgcctcagtctggagctcgcagtcgtatggagagggcaggaccagccggggaggagggcggcgcgcgcgagggtcgccttcttcccagggcaccgggggcgtgggtgctgcgggcgtgcgccgagagggcagccttggaagtgggcgcagcttcggcagacacaggcgtgaggggctgcggagctcgagggccggcgcccctgcttgcctctgcgggaggtgggcgcgcccgggacggaacctggggcgtcagaacgaaaggcagcggcgccgcgcttcccagccggccagcctcccgcgcagcgccccggccggaagcctcctcgccgccgcttcctctcgagaaggcgcggggcgggctgtccggcccgcagggcggtcgagcccgcggcgccatggctcacgtcggctcccgcaagcgctcgaggagtcgcagccggtcccggggacgggggtcggaaaagagaaagaagaagagcaggaaagacacctcgaggaactgctcggcctccacatcccaagagagaagcaagcagaaggcccggaggagaacaagatccagctcctcctcctcttcttccagttcttctagctcctcttcttcctcctcgtcctcctcctcttcctccagtgatggccggaagaagcgggggaagtacaaggacaagaggaggaagaagaagaagaagaggaagaagctgaagaagaagggcaaggagaaggcggaagcacagcaggcatcatccgcaaggtggtggaccctgagacggggcgcaccaggcttattaagggagatggcgaggtcctagaggaaatcgtaaccaaagaacgacacagagagatcaacaagcaagccacccgaggggactgcctggccttccagatgcgagctgggttgcttccctgagggcccccgctggccaaggcctgtggacgacgctggcggcccagcctgggcaggtttcagggtgccagtgggaagcctgatgggtgctggtggcctttcccccgtggattggtctctggcccagcccagtctcttctcaggggcagggggtggaggttggggtcaccggcctgcttggcacccccatctgaaagagcagcacttctcagctattaaaggccccctggatagacaaaaacacaaacaacacagaagcaacaaaacaacaaagaaacaaaacaaacaacacacgggagaccaacggccggggggagaaaagacgcga

SEQ ID NO: 414322 - DNA, 1029 bp, Homo sapiens
gtcagtagagcgccgtggtgatcggacgaggccgcagggcggtcgagcccgcggcgccatggctcacgtcggctcccgcaagcgctcgaggagtcgcagccggtcccggggacgggggtcggaaaagagaaagaagaagagcaggaaagacacctcgaggaactgctcggcctccacatcccaagagagaagcaagcagaaggcccggaggagaacaagatccagctcctcctcctcttcttccagttcttctagctcctcttcttcctcctcgtcctcctcctcttcctccagtgatggccggaagaagcgggggaagtacaaggacaagaggaggaagaagaagaagaagaggaagaagctgaagaagaagggcaaggagaaggcggaagcacagcaggtggaggctctgccgggcccctcgctggaccagtggcaccgatcagctggggaggaagaggatggcccagtcctgacggatgagcagaagtcccgaatccaggccatgaagcccatgaccaaggaggagtgggatgcccggcagagcatcatccgcaaggtggtggaccctgagacggggcgcaccaggcttattaagggagatggcgaggtcctagaggaaatcgtaaccaaagaacgacacagagagatcaacaaggtgggtgtggcccctctgcctgccatccgcccccagctctgtttgtgatgtacccctcctcctgtgtgctttcttccccagcaagccacccgaggggactgcctggccttccagatgcgagctgggttgcttccctgagggcccccgctggccaaggcctgtggacgacgctggcggcccagcctgggcaggtttcagggtgccagtgggaagcctgatgggtgctggtggcctttcccccgtggattggtctctggcccagcccagtctcttctcaggggcagggggtggaggttggggtcaccggcctgcttggcacccccatctgaaagagcagcacttctcagctattaaaggccccctggatagac

SEQ ID NO: 414323 - DNA, 1024 bp, Homo sapiens
aaggctaggtaggaggcgggtgttgaatcggccgagggcttcctctcgagaaggcgcggggcgggctgtccggcccgcagggcggtcgagcccgcggcgccatggctcacgtcggctcccgcaagcgctcgaggagtcgcagccggtcccggggacgggggtcggaaaagagaaagaagaagagcaggaaagacacctcgaggaactgctcggcctccacatcccaaggtcgcaaggccagcacggcccctggggcggaggagagaagcaagcagaaggcccggaggagaacaagatccagctcctcctcctcttcttccagttcttctagctcctcttcttcctcctcgtcctcctcctcttcctccagtgatggccggaagaagcgggggaagtacaaggacaagaggaggaagaagaagaagaagaggaagaagctgaagaagaagggcaaggagaaggcggaagcacagcaggtggaggctctgccgggcccctcgctggaccagtggcaccgatcagctggggaggaagaggatggcccagtcctgacggatgagcagaagtcccgaatccaggccatgaagcccatgaccaaggaggagtgggatgcccggcagagcatcatccgcaaggtggtggaccctgagacggggcgcaccaggcttattaagggagatggcgaggtcctagaggaaatcgtaaccaaagaacgacacagagagatcaacaagcaagccacccgaggggactgcctggccttccagatgcgagctgggttgcttccctgagggcccccgctggccaaggcctgtggacgacgctggcggcccagcctgggcaggtttcagggtgccagtgggaagcctgatgggtgctggtggcctttcccccgtggattggtctctggcccagcccagtctcttctcaggggcagggggtggaggttggggtcaccggcctgcttggcacccccatctgaaagagcagcacttctcagctattaaaggccccctggatagac

SEQ ID NO: 414324 - DNA, 1658 bp, Homo sapiens
gcggctgtcattgtggaagagttgcaacttgggggcccgagattggatgaagcgcacagccacgctttgggttacacatttgaaactcagggggcttccatattgcagtcttgagtttggtctccctgggaaggtggggcaccagccccatgccacgttgcacgtatcagctggagcagaatcctggcttccttccggatgggcctggggtccatgcccgcgctcactgccaagatctttctggcccctacggacacgagtttgcgacctctgagtcactgggtgggcgcgtcggaaagaccagggcgcctcagtctggagctcgcagtcgtatggagagggcaggaccagccggggaggagggcggcgcgcgcgagggtcgccttcttcccagggcaccgggggcgtgggtgctgcgggcgtgcgccgagagggcagccttggaagtgggcgcagcttcggcagacacaggcgtgaggggctgcggagctcgagggccggcgcccctgcttgcctctgcgggaggtgggcgcgcccgggacggaacctggggcgtcagaacgaaaggcagcggcgccgcgcttcccagccggccagcctcccgcgcagcgccccggccggaagcctcctcgccgccgcttcctctcgagaaggcgcggggcgggctgtccggcccgcagggcggtcgaggtgggaacggagcagccccgggggcccccttgaggcggcgaggccgcgaagggcgcggggctggaggcccgcggcgccatggctcacgtcggctcccgcaagcgctcgaggagtcgcagccggtcccggggacgggggtcggaaaagagaaagaagaagagcaggaaagacacctcgaggaactgctcggcctccacatcccaagagagaagcaagcagaaggcccggaggagaacaagatccagctcctcctcctcttcttccagttcttctagctcctcttcttcctcctcgtcctcctcctcttcctccagtgatggccggaagaagcgggggaagtacaaggacaagaggaggaagaagaagaagaagaggaagaagctgaagaagaagggcaaggagaaggcggaagcacagcaggtggaggctctgccgggcccctcgctggaccagtggcaccgatcagctggggaggaagaggatggcccagtcctgacggatgagcagaagtcccgaatccaggccatgaagcccatgaccaaggaggagtgggatgcccggcagagcatcatccgcaaggtggtggaccctgagacggggcgcaccaggcttattaagggagatggcgaggtcctagaggaaatcgtaaccaaagaacgacacagagagatcaacaagcaagccacccgaggggactgcctggccttccagatgcgagctgggttgcttccctgagggcccccgctggccaaggcctgtggacgacgctggcggcccagcctgggcaggtttcagggtgccagtgggaagcctgatgggtgctggtggcctttcccccgtggattggtctctggcccagcccagtctcttctcaggggcagggggtggaggttggggtcaccggcctgcttggcacccccatctgaaagagcagcacttctcagctattaaaggccccctggatagac

SEQ ID NO: 414325 - DNA, 1691 bp, Homo sapiens
gcggctgtcattgtggaagagttgcaacttgggggcccgagattggatgaagcgcacagccacgctttgggttacacatttgaaactcagggggcttccatattgcagtcttgagtttggtctccctgggaaggtggggcaccagccccatgccacgttgcacgtatcagctggagcagaatcctggcttccttccggatgggcctggggtccatgcccgcgctcactgccaagatctttctggcccctacggacacgagtttgcgacctctgagtcactgggtgggcgcgtcggaaagaccagggcgcctcagtctggagctcgcagtcgtatggagagggcaggaccagccggggaggagggcggcgcgcgcgagggtcgccttcttcccagggcaccgggggcgtgggtgctgcgggcgtgcgccgagagggcagccttggaagtgggcgcagcttcggcagacacaggcgtgaggggctgcggagctcgagggccggcgcccctgcttgcctctgcgggaggtgggcgcgcccgggacggaacctggggcgtcagaacgaaaggcagcggcgccgcgcttcccagccggccagcctcccgcgcagcgccccggccggaagcctcctcgccgccgcttcctctcgagaaggcgcggggcgggctgtccggcccgcagggcggtcgaggtgggaacggagcagccccgggggcccccttgaggcggcgaggccgcgaagggcgcggggctggaggcccgcggcgccatggctcacgtcggctcccgcaagcgctcgaggagtcgcagccggtcccggggacgggggtcggaaaagagaaagaagaagagcaggaaagacacctcgaggaactgctcggcctccacatcccaaggtcgcaaggccagcacggcccctggggcggaggagagaagcaagcagaaggcccggaggagaacaagatccagctcctcctcctcttcttccagttcttctagctcctcttcttcctcctcgtcctcctcctcttcctccagtgatggccggaagaagcgggggaagtacaaggacaagaggaggaagaagaagaagaagaggaagaagctgaagaagaagggcaaggagaaggcggaagcacagcaggtggaggctctgccgggcccctcgctggaccagtggcaccgatcagctggggaggaagaggatggcccagtcctgacggatgagcagaagtcccgaatccaggccatgaagcccatgaccaaggaggagtgggatgcccggcagagcatcatccgcaaggtggtggaccctgagacggggcgcaccaggcttattaagggagatggcgaggtcctagaggaaatcgtaaccaaagaacgacacagagagatcaacaagcaagccacccgaggggactgcctggccttccagatgcgagctgggttgcttccctgagggcccccgctggccaaggcctgtggacgacgctggcggcccagcctgggcaggtttcagggtgccagtgggaagcctgatgggtgctggtggcctttcccccgtggattggtctctggcccagcccagtctcttctcaggggcagggggtggaggttggggtcaccggcctgcttggcacccccatctgaaagagcagcacttctcagctattaaaggccccctggatagac

SEQ ID NO: 414326 - DNA, 948 bp, Homo sapiens
gggctaggtacgaggcctgggtggtgccggcccgcagtgcggtcgagcccgcggcgccatggctcacgtcggctcccgcaagcgctcgaggagtcgcagccggtcccggggacgggggtcggaaaagagaaagaagaagagcaggaaagacacctcgaggaactgctcggcctccacatcccaagagagaagcaagcagaaggcccggaggagaacaagatccagctcctcctcctcttcttccagttcttctagctcctcttcttcctcctcgtcctcctcctcttcctccagtgatggccggaagaagcgggggaagtacaaggacaagaggaggaagaagaagaagaagaggaagaagctgaagaagaagggcaaggagaaggcggaagcacagcaggtggaggctctgccgggcccctcgctggaccagtggcaccgatcagctggggaggaagaggatggcccagtcctgacggatgagcagaagtcccgaatccaggccatgaagcccatgaccaaggaggagtgggatgcccggcagagcatcatccgcaaggtggtggaccctgagacggggcgcaccaggcttattaagggagatggcgaggtcctagaggaaatcgtaaccaaagaacgacacagagagatcaacaagcaagccacccgaggggactgcctggccttccagatgcgagctgggttgcttccctgagggcccccgctggccaaggcctgtggacgacgctggcggcccagcctgggcaggtttcagggtgccagtgggaagcctgatgggtgctggtggcctttcccccgtggattggtctctggcccagcccagtctcttctcaggggcagggggtggaggttggggtcaccggcctgcttggcacccccatctgaaagagcagcacttctcagctattaaaggccccctggatagac

SEQ ID NO: 414327 - DNA, 1025 bp, Homo sapiens
gttaagggatatgtcgaccacgcagtgggaacggagcagccccgggggcccccttgaggcggcgaggccgcgaagggcgcggggctggaggcccgcggcgccatggctcacgtcggctcccgcaagcgctcgaggagtcgcagccggtcccggggacgggggtcggaaaagagaaagaagaagagcaggaaagacacctcgaggaactgctcggcctccacatcccaaggtcgcaaggccagcacggcccctggggcggaggagagaagcaagcagaaggcccggaggagaacaagatccagctcctcctcctcttcttccagttcttctagctcctcttcttcctcctcgtcctcctcctcttcctccagtgatggccggaagaagcgggggaagtacaaggacaagaggaggaagaagaagaagaagaggaagaagctgaagaagaagggcaaggagaaggcggaagcacagcaggtggaggctctgccgggcccctcgctggaccagtggcaccgatcagctggggaggaagaggatggcccagtcctgacggatgagcagaagtcccgaatccaggccatgaagcccatgaccaaggaggagtgggatgcccggcagagcatcatccgcaaggtggtggaccctgagacggggcgcaccaggcttattaagggagatggcgaggtcctagaggaaatcgtaaccaaagaacgacacagagagatcaacaagcaagccacccgaggggactgcctggccttccagatgcgagctgggttgcttccctgagggcccccgctggccaaggcctgtggacgacgctggcggcccagcctgggcaggtttcagggtgccagtgggaagcctgatgggtgctggtggcctttcccccgtggattggtctctggcccagcccagtctcttctcaggggcagggggtggaggttggggtcaccggcctgcttggcacccccatctgaaagagcagcacttctcagctattaaaggccccctggatagac

SEQ ID NO: 414328 - DNA, 1983 bp, Homo sapiens
gcggctgtcattgtggaagagttgcaacttgggggcccgagattggatgaagcgcacagccacgctttgggttacacatttgaaactcagggggcttccatattgcagtcttgagtttggtctccctgggaaggtggggcaccagccccatgccacgttgcacgtatcagctggagcagaatcctggcttccttccggatgggcctggggtccatgcccgcgctcactgccaagatctttctggcccctacggacacgagtttgcgacctctgagtcactgggtgggcgcgtcggaaagaccagggcgcctcagtctggagctcgcagtcgtatggagagggcaggaccagccggggaggagggcggcgcgcgcgagggtcgccttcttcccagggcaccgggggcgtgggtgctgcgggcgtgcgccgagagggcagccttggaagtgggcgcagcttcggcagacacaggcgtgaggggctgcggagctcgagggccggcgcccctgcttgcctctgcgggaggtgggcgcgcccgggacggaacctggggcgtcagaacgaaaggcagcggcgccgcgcttcccagccggccagcctcccgcgcagcgccccggccggaagcctcctcgccgccgcttcctctcgagaaggcgcggggcgggctgtccggcccgcagggcggtcgaggtgggaacggagcagccccgggggcccccttgaggcggcgaggccgcgaagggcgcggggctggaggcccgcggcgccatggctcacgtcggctcccgcaagcgctcgaggagtcgcagccggtcccggggacgggggtcggaaaagagaaagaagaagagcaggaaagacacctcgaggaactgctcggcctccacatcccaaggtcgcaaggccagcacggcccctggggcggagggtgaggaccacaggcatcggggagaggaggcgcagttactacccggggaagtcgggcgagcagtggtcggggacgctcagtcatgcctctgtgcagccgggcctgagatgtgagggccaggcgccgcaggagccaggaaggggctcctctgggaagctccatctctgttctggaaagcccctcaggaagcgctcaccctgtagccggtctgtgcctgccccaggccagagcaggggacgaaggtttacctcttcccctcctggctttccagcctcaccttctccctgcatcaagagaagcaagcagaaggcccggaggagaacaagatccagctcctcctcctcttcttccagttcttctagctcctcttcttcctcctcgtcctcctcctcttcctccagtgatggccggaagaagcgggggaagtacaaggacaagaggaggaagaagaagaagaagaggaagaagctgaagaagaagggcaaggagaaggcggaagcacagcaggtggaggctctgccgggcccctcgctggaccagtggcaccgatcagctggggaggaagaggatggcccagtcctgacggatgagcagaagtcccgaatccaggccatgaagcccatgaccaaggaggagtgggatgcccggcagagcatcatccgcaaggtggtggaccctgagacggggcgcaccaggcttattaagggagatggcgaggtcctagaggaaatcgtaaccaaagaacgacacagagagatcaacaagcaagccacccgaggggactgcctggccttccagatgcgagctgggttgcttccctgagggcccccgctggccaaggcctgtggacgacgctggcggcccagcctgggcaggtttcagggtgccagtgggaagcctgatgggtgctggtggcctttcccccgtggattggtctctggcccagcccagtctcttctcaggggcagggggtggaggttggggtcaccggcctgcttggcacccccatctgaaagagcagcacttctcagctattaaaggccccctggatagac

SEQ ID NO: 414329 - DNA, 2299 bp, Homo sapiens
gcggctgtcattgtggaagagttgcaacttgggggcccgagattggatgaagcgcacagccacgctttgggttacacatttgaaactcagggggcttccatattgcagtcttgagtttggtctccctgggaaggtggggcaccagccccatgccacgttgcacgtatcagctggagcagaatcctggcttccttccggatgggcctggggtccatgcccgcgctcactgccaagatctttctggcccctacggacacgagtttgcgacctctgagtcactgggtgggcgcgtcggaaagaccagggcgcctcagtctggagctcgcagtcgtatggagagggcaggaccagccggggaggagggcggcgcgcgcgagggtcgccttcttcccagggcaccgggggcgtgggtgctgcgggcgtgcgccgagagggcagccttggaagtgggcgcagcttcggcagacacaggcgtgaggggctgcggagctcgagggccggcgcccctgcttgcctctgcgggaggtgggcgcgcccgggacggaacctggggcgtcagaacgaaaggcagcggcgccgcgcttcccagccggccagcctcccgcgcagcgccccggccggaagcctcctcgccgccgcttcctctcgagaaggcgcggggcgggctgtccggcccgcagggcggtcgaggtgggaacggagcagccccgggggcccccttgaggcggcgaggccgcgaagggcgcggggctggagggtaggagagcgcgggaaagcgccccagacgccactcgcggcggacggcggccagttcccaggggtttggagccgggtgcgcaggcgtggggcctccgggcacggggcgggcccttaacaggcaccgctgcggggactggagtcggcggagaaaaccggggtccccagcgctgggggtgggtgagggtcgctcattttcccgggacggtgacgggtactgggcgtcgccaggccccggccccgctagagccacccttggagcccgcccgcggccggccttgggggcttcggctcaagcgcgtcttcttcgtcgccagcccgcggcgccatggctcacgtcggctcccgcaagcgctcgaggagtcgcagccggtcccggggacgggggtcggaaaagagaaagaagaagagcaggaaagacacctcgaggaactgctcggcctccacatcccaaggtcgcaaggccagcacggcccctggggcggagggtgaggaccacaggcatcggggagaggaggcgcagttactacccggggaagtcgggcgagcagtggtcggggacgctcagtcatgcctctgtgcagccgggcctgagatgtgagggccaggcgccgcaggagccaggaaggggctcctctgggaagctccatctctgttctggaaagcccctcaggaagcgctcaccctgtagccggtctgtgcctgccccaggccagagcaggggacgaaggtttacctcttcccctcctggctttccagcctcaccttctccctgcatcaagagaagcaagcagaaggcccggaggagaacaagatccagctcctcctcctcttcttccagttcttctagctcctcttcttcctcctcgtcctcctcctcttcctccagtgatggccggaagaagcgggggaagtacaaggacaagaggaggaagaagaagaagaagaggaagaagctgaagaagaagggcaaggagaaggcggaagcacagcaggtggaggctctgccgggcccctcgctggaccagtggcaccgatcagctggggaggaagaggatggcccagtcctgacggatgagcagaagtcccgaatccaggccatgaagcccatgaccaaggaggagtgggatgcccggcagagcatcatccgcaaggtggtggaccctgagacggggcgcaccaggcttattaagggagatggcgaggtcctagaggaaatcgtaaccaaagaacgacacagagagatcaacaagcaagccacccgaggggactgcctggccttccagatgcgagctgggttgcttccctgagggcccccgctggccaaggcctgtggacgacgctggcggcccagcctgggcaggtttcagggtgccagtgggaagcctgatgggtgctggtggcctttcccccgtggattggtctctggcccagcccagtctcttctcaggggcagggggtggaggttggggtcaccggcctgcttggcacccccatctgaaagagcagcacttctcagctattaaaggccccctggatagac

SEQ ID NO: 414330 - DNA, 1594 bp, Homo sapiens
gcggctgtcattgtggaagagttgcaacttgggggcccgagattggatgaagcgcacagccacgctttgggttacacatttgaaactcagggggcttccatattgcagtcttgagtttggtctccctgggaaggtggggcaccagccccatgccacgttgcacgtatcagctggagcagaatcctggcttccttccggatgggcctggggtccatgcccgcgctcactgccaagatctttctggcccctacggacacgagtttgcgacctctgagtcactgggtgggcgcgtcggaaagaccagggcgcctcagtctggagctcgcagtcgtatggagagggcaggaccagccggggaggagggcggcgcgcgcgagggtcgccttcttcccagggcaccgggggcgtgggtgctgcgggcgtgcgccgagagggcagccttggaagtgggcgcagcttcggcagacacaggcgtgaggggctgcggagctcgagggccggcgcccctgcttgcctctgcgggaggtgggcgcgcccgggacggaacctggggcgtcagaacgaaaggcagcggcgccgcgcttcccagccggccagcctcccgcgcagcgccccggccggaagcctcctcgccgccgcttcctctcgagaaggcgcggggcgggctgtccggcccgcagggcggtcgaggtgggaacggagcagccccgggggcccccttgaggcggcgaggccgcgaagggcgcggggctggaggcccgcggcgccatggctcacgtcggctcccgcaagcgctcgaggagtcgcagccggtcccggggacgggggtcgagagaagcaagcagaaggcccggaggagaacaagatccagctcctcctcctcttcttccagttcttctagctcctcttcttcctcctcgtcctcctcctcttcctccagtgatggccggaagaagcgggggaagtacaaggacaagaggaggaagaagaagaagaagaggaagaagctgaagaagaagggcaaggagaaggcggaagcacagcaggtggaggctctgccgggcccctcgctggaccagtggcaccgatcagctggggaggaagaggatggcccagtcctgacggatgagcagaagtcccgaatccaggccatgaagcccatgaccaaggaggagtgggatgcccggcagagcatcatccgcaaggtggtggaccctgagacggggcgcaccaggcttattaagggagatggcgaggtcctagaggaaatcgtaaccaaagaacgacacagagagatcaacaagcaagccacccgaggggactgcctggccttccagatgcgagctgggttgcttccctgagggcccccgctggccaaggcctgtggacgacgctggcggcccagcctgggcaggtttcagggtgccagtgggaagcctgatgggtgctggtggcctttcccccgtggattggtctctggcccagcccagtctcttctcaggggcagggggtggaggttggggtcaccggcctgcttggcacccccatctgaaagagcagcacttctcagctattaaaggccccctggatagac

SEQ ID NO: 414331 - DNA, 2038 bp, Homo sapiens
gcggctgtcattgtggaagagttgcaacttgggggcccgagattggatgaagcgcacagccacgctttgggttacacatttgaaactcagggggcttccatattgcagtcttgagtttggtctccctgggaaggtggggcaccagccccatgccacgttgcacgtatcagctggagcagaatcctggcttccttccggatgggcctggggtccatgcccgcgctcactgccaagatctttctggcccctacggacacgagtttgcgacctctgagtcactgggtgggcgcgtcggaaagaccagggcgcctcagtctggagctcgcagtcgtatggagagggcaggaccagccggggaggagggcggcgcgcgcgagggtcgccttcttcccagggcaccgggggcgtgggtgctgcgggcgtgcgccgagagggcagccttggaagtgggcgcagcttcggcagacacaggcgtgaggggctgcggagctcgagggccggcgcccctgcttgcctctgcgggaggtgggcgcgcccgggacggaacctggggcgtcagaacgaaaggcagcggcgccgcgcttcccagccggccagcctcccgcgcagcgccccggccggaagcctcctcgccgccgcttcctctcgagaaggcgcggggcgggctgtccggcccgcagggcggtcgagcccgcggcgccatggctcacgtcggctcccgcaagcgctcgaggagtcgcagccggtcccggggacgggggtcggaaaagagaaagaagaagagcaggaaagacacctcgaggaactgctcggcctccacatcccaagagagaagcaagcagaaggcccggaggagaacaagatccagctcctcctcctcttcttccagttcttctagctcctcttcttcctcctcgtcctcctcctcttcctccagtgatggccggaagaagcgggggaagtacaaggacaagaggaggaagaagaagaagaagaggaagaagctgaagaagaagggcaaggagaaggcggaagcacagcaggtggaggctctgccgggcccctcgctggaccagtggcaccgatcagctggggaggaagaggatggcccagtcctgacggatgagcagaagtcccgaatccaggccatgaagcccatgaccaaggaggagtgggatgcccggcagagcatcatccgcaaggtggtggaccctgagacggggcgcaccaggcttattaagggagatggcgaggtcctagaggaaatcgtaaccaaagaacgacacagagagatcaacaagcaagccacccgaggggactgcctggccttccagatgcgagctgggttgcttccctgagggcccccgctggccaaggcctgtggacgacgctggcggcccagcctgggcaggtttcagggtgccagtgggaagcctgatgggtgctggtggcctttcccccgtggattggtctctggcccagcccagtctcttctcaggggcagggggtggaggttggggtcaccggcctgcttggcacccccatctgaaagagcagcacttctcagctattaaaggccccctggatagacccctggtaacttttcacagaaaaaggggggcgcccaaaaaacccccaggggagccccaagtatgcagtacaacgcgttttggtgcaaaagaggcccccaagagagcgctcttaaacagaaccggacgcgcgttctaacaactcgctctgacaacgtaactagcgtcatcgtgtcgaagaccgcccaacaccctgtgctgcgcgagacggggcaatagccacaaacatagcctcccaggaacaagaaacaaacacacagtggagacacaccaccgagctcgtcggagacacgtacctcgacgattacgacaccagcctaaaacggcagagccgagtcgagcgactgcctaacactcacgcaagcgcagcgactgcagcaaggacgcgtcaacaggaagcactgacgacagcacgagctcgcatcgacgcaagggctaactagccagag

SEQ ID NO: 414332 - DNA, 1105 bp, Homo sapiens
aaggctaggtaggaggcgggtgttgaatcggccgagggcttcctctcgagaaggcgcggggcgggctgtccggcccgcagggcggtcgagcccgcggcgccatggctcacgtcggctcccgcaagcgctcgaggagtcgcagccggtcccggggacgggggtcggaaaagagaaagaagaagagcaggaaagacacctcgaggaactgctcggcctccacatcccaaggtcgcaaggccagcacggcccctggggcggaggagagaagcaagcagaaggcccggaggagaacaagatccagctcctcctcctcttcttccagttcttctagctcctcttcttcctcctcgtcctcctcctcttcctccagtgatggccggaagaagcgggggaagtacaaggacaagaggaggaagaagaagaagaagaggaagaagctgaagaagaagggcaaggagaaggcggaagcacagcaggtggaggctctgccgggcccctcgctggaccagtggcaccgatcagctggggaggaagaggatggcccagtcctgacggatgagcagaagtcccgaatccaggccatgaagcccatgaccaaggaggagtgggatgcccggcagagcatcatccgcaaggtggtggaccctgagacggggcgcaccaggcttattaagggagatggcgaggtcctagaggaaatcgtaaccaaagaacgacacagagagatcaacaaggtgggtgtggcccctctgcctgccatccgcccccagctctgtttgtgatgtacccctcctcctgtgtgctttcttccccagcaagccacccgaggggactgcctggccttccagatgcgagctgggttgcttccctgagggcccccgctggccaaggcctgtggacgacgctggcggcccagcctgggcaggtttcagggtgccagtgggaagcctgatgggtgctggtggcctttcccccgtggattggtctctggcccagcccagtctcttctcaggggcagggggtggaggttggggtcaccggcctgcttggcacccccatctgaaagagcagcacttctcagctattaaaggccccctggatagac

SEQ ID NO: 414333 - DNA, 1513 bp, Homo sapiens
gcggctgtcattgtggaagagttgcaacttgggggcccgagattggatgaagcgcacagccacgctttgggttacacatttgaaactcagggggcttccatattgcagtcttgagtttggtctccctgggaaggtggggcaccagccccatgccacgttgcacgtatcagctggagcagaatcctggcttccttccggatgggcctggggtccatgcccgcgctcactgccaagatctttctggcccctacggacacgagtttgcgacctctgagtcactgggtgggcgcgtcggaaagaccagggcgcctcagtctggagctcgcagtcgtatggagagggcaggaccagccggggaggagggcggcgcgcgcgagggtcgccttcttcccagggcaccgggggcgtgggtgctgcgggcgtgcgccgagagggcagccttggaagtgggcgcagcttcggcagacacaggcgtgaggggctgcggagctcgagggccggcgcccctgcttgcctctgcgggaggtgggcgcgcccgggacggaacctggggcgtcagaacgaaaggcagcggcgccgcgcttcccagccggccagcctcccgcgcagcgccccggccggaagcctcctcgccgccgcttcctctcgagaaggcgcggggcgggctgtccggcccgcagggcggtcgaggtgggaacggagcagccccgggggcccccttgaggcggcgaggccgcgaagggcgcggggctggaggcccgcggcgccatggctcacgtcggctcccgcaagcgctcgaggagtcgcagccggtcccggggacgggggtcggaaaagagaaagaagaagagcaggaaagacacctcgaggaactgctcggcctccacatcccaagagagaagcaagcagaaggcccggaggagaacaagatccagctcctcctcctcttcttccagttcttctagctcctcttcttcctcctcgtcctcctcctcttcctccagtgatggccggaagaagcgggggaagtacaaggacaagaggaggaagaagaagaagaagaggaagaagctgaagaagaagggcaaggagaaggcggaagcacagcaggcatcatccgcaaggtggtggaccctgagacggggcgcaccaggcttattaagggagatggcgaggtcctagaggaaatcgtaaccaaagaacgacacagagagatcaacaagcaagccacccgaggggactgcctggccttccagatgcgagctgggttgcttccctgagggcccccgctggccaaggcctgtggacgacgctggcggcccagcctgggcaggtttcagggtgccagtgggaagcctgatgggtgctggtggcctttcccccgtggattggtctctggcccagcccagtctcttctcaggggcagggggtggaggttggggtcaccggcctgcttggcacccccatctgaaagagcagcacttctcagctattaaaggccccctggatagac

SEQ ID NO: 414334 - DNA, 1446 bp, Homo sapiens
gcggctgtcattgtggaagagttgcaacttgggggcccgagattggatgaagcgcacagccacgctttgggttacacatttgaaactcagggggcttccatattgcagtcttgagtttggtctccctgggaaggtggggcaccagccccatgccacgttgcacgtatcagctggagcagaatcctggcttccttccggatgggcctggggtccatgcccgcgctcactgccaagatctttctggcccctacggacacgagtttgcgacctctgagtcactgggtgggcgcgtcggaaagaccagggcgcctcagtctggagctcgcagtcgtatggagagggcaggaccagccggggaggagggcggcgcgcgcgagggtcgccttcttcccagggcaccgggggcgtgggtgctgcgggcgtgcgccgagagggcagccttggaagtgggcgcagcttcggcagacacaggcgtgaggggctgcggagctcgagggccggcgcccctgcttgcctctgcgggaggtgggcgcgcccgggacggaacctggggcgtcagaacgaaaggcagcggcgccgcgcttcccagccggccagcctcccgcgcagcgccccggccggaagcctcctcgccgccgcttcctctcgagaaggcgcggggcgggctgtccggcccgcagggcggtcgagcccgcggcgccatggctcacgtcggctcccgcaagcgctcgaggagtcgcagccggtcccggggacgggggtcggaaaagagaaagaagaagagcaggaaagacacctcgaggaactgctcggcctccacatcccaagagagaagcaagcagaaggcccggaggagaacaagatccagctcctcctcctcttcttccagttcttctagctcctcttcttcctcctcgtcctcctcctcttcctccagtgatggccggaagaagcgggggaagtacaaggacaagaggaggaagaagaagaagaagaggaagaagctgaagaagaagggcaaggagaaggcggaagcacagcaggcatcatccgcaaggtggtggaccctgagacggggcgcaccaggcttattaagggagatggcgaggtcctagaggaaatcgtaaccaaagaacgacacagagagatcaacaagcaagccacccgaggggactgcctggccttccagatgcgagctgggttgcttccctgagggcccccgctggccaaggcctgtggacgacgctggcggcccagcctgggcaggtttcagggtgccagtgggaagcctgatgggtgctggtggcctttcccccgtggattggtctctggcccagcccagtctcttctcaggggcagggggtggaggttggggtcaccggcctgcttggcacccccatctgaaagagcagcacttctcagctattaaaggccccctggatagac

SEQ ID NO: 414335 - DNA, 1583 bp, Homo sapiens
gcggctgtcattgtggaagagttgcaacttgggggcccgagattggatgaagcgcacagccacgctttgggttacacatttgaaactcagggggcttccatattgcagtcttgagtttggtctccctgggaaggtggggcaccagccccatgccacgttgcacgtatcagctggagcagaatcctggcttccttccggatgggcctggggtccatgcccgcgctcactgccaagatctttctggcccctacggacacgagtttgcgacctctgagtcactgggtgggcgcgtcggaaagaccagggcgcctcagtctggagctcgcagtcgtatggagagggcaggaccagccggggaggagggcggcgcgcgcgagggtcgccttcttcccagggcaccgggggcgtgggtgctgcgggcgtgcgccgagagggcagccttggaagtgggcgcagcttcggcagacacaggcgtgaggggctgcggagctcgagggccggcgcccctgcttgcctctgcgggaggtgggcgcgcccgggacggaacctggggcgtcagaacgaaaggcagcggcgccgcgcttcccagccggccagcctcccgcgcagcgccccggccggaagcctcctcgccgccgcttcctctcgagaaggcgcggggcgggctgtccggcccgcagggcggtcgaggtgggaacggagcagccccgggggcccccttgaggcggcgaggccgcgaagggcgcggggctggaggcccgcggcgccatggctcacgtcggctcccgcaagcgctcgaggagtcgcagccggtcccggggacgggggtcggaaaagagaaagaagaagagcaggaaagacacctcgaggaactgctcggcctccacatcccaaggtcgcaaggccagcacggcccctggggcggaggagagaagcaagcagaaggcccggaggagaacaagatccagctcctcctcctcttcttccagttcttctagctcctcttcttcctcctcgtcctcctcctcttcctccagtgatggccggaagaagcgggggaagtacaaggacaagaggaggaagaagaagaagaagaggaagaagctgaagaagaagggcaaggagaaggcggaagcacagcaggtggaggctctgccgggcccctcgctggaccagtggcaccgatcagctggggaggaagaggatggcccagtcctgacggatgagcagaagtcccgaatccaggccatgaagcccatgaccaaggaggagtgggatgcccggcagagcatcatccgcaaggtggtggaccctgagacggggcgcaccaggcttattaagggagatggcgaggtcctagaggaaatcgtaaccaaagaacgacacagagagatcaacaagcaagccacccgagggactgctggcttcaagatgcgagctggtgttctgaggcccgtggcagctggacagctggggcccgggcagtaagcgcacgcacgagggggggctccgaggtttgcaccccctcggcgggggggccgcgggccccaaaagttaccgcaaaaaaccttgggcaaagggcc

SEQ ID NO: 414336 - DNA, 1185 bp, Homo sapiens
gcggctgtcattgtggaagagttgcaacttgggggcccgagattggatgaagcgcacagccacgctttgggttacacatttgaaactcagggggcttccatattgcagtcttgagtttggtctccctgggaaggtggggcaccagccccatgccacgttgcacgtatcagctggagcagaatcctggcttccttccggatgggcctggggtccatgcccgcgctcactgccaagatctttctggcccctacggacacgagtttgcgacctctgagtcactgggtgggcgcgtcggaaagaccagggcgcctcagtctggagctcgcagtcgtatggagagggcaggaccagccggggaggagggcggcgcgcgcgagggtcgccttcttcccagggcaccgggggcgtgggtgctgcgggcgtgcgccgagagggcagccttggaagtgggcgcagcttcggcagacacaggcgtgaggggctgcggagctcgagggccggcgcccctgcttgcctctgcgggaggtgggcgcgcccgggacggaacctggggcgtcagaacgaaaggcagcggcgccgcgcttcccagccggccagcctcccgcgcagcgccccggccggaagcctcctcgccgccgcttcctctcgagaaggcgcggggcgggctgtccggcccgcagggcggtcgagcccgcggcgccatggctcacgtcggctcccgcaagcgctcgaggagtcgcagccggtcccggggacgggggtcggaaaagagaaagaagaaggcatcatccgcaaggtggtggaccctgagacggggcgcaccaggcttattaagggagatggcgaggtcctagaggaaatcgtaaccaaagaacgacacagagagatcaacaagcaagccacccgaggggactgcctggccttccagatgcgagctgggttgcttccctgagggcccccgctggccaaggcctgtggacgacgctggcggcccagcctgggcaggtttcagggtgccagtgggaagcctgatgggtgctggtggcctttcccccgtggattggtctctggcccagcccagtctcttctcaggggcagggggtggaggttggggtcaccggcctgcttggcacccccatctgaaagagcagcacttctcagctattaaaggccccctggatagac

SEQ ID NO: 414337 - DNA, 783 bp, Homo sapiens
  misc_feature (1)..(1): n is a, c, g, or t
ntcggtaccgacgctctctctgtggggccgggcggggttcctggtgcctgaaaaaggccaaatgtgggcaaaaatacggtcacttggagtaagtagttgcaggggctggaagggcctggaggaggctcttgaaagggctgttgttggccgggctgaggctggcaaggcagagcccagctccactgccttcatcagggagagtgggtgaggccccagggtctgtccactcaaggctgcggggtgggagccctgggacccctctgccggctgcttgtggttctgctcctctggcattaggggacctgcctattccttgctgaacggagaccctcccacccccaggcttattaagggagatggcgaggtcctagaggaaatcgtaaccaaagaacgacacagagagatcaacaaggtgggtgtggcccctctgcctgccatccgcccccagctctgtttgtgatgtacccctcctcctgtgtgctttcttccccagcaagccacccgaggggactgcctggccttccagatgcgagctgggttgcttccctgagggcccccgctggccaaggcctgtggacgacgctggcggcccagcctgggcaggtttcagggtgccagtgggaagcctgatgggtgctggtggcctttcccccgtggattggtctctggcccagcccagtctcttctcaggggcagggggtggaggttggggtcaccggcctgcttggcacccccatctgaaagagcagcacttctcagctattaaaggccccctggatagac

SEQ ID NO: 414338 - DNA, 4069 bp, Homo sapiens
aaaaactttgggtgggatgggtgtccctgtccccagcccaccatggcttggggtgggtatctgtggccgttagggtgcgtcccctgctcccccgcccagggccagggaccactcgtctcccactgggggaaaaagggggtcccgggtgggcgactagtacgtgtgaagctgagctcagggccggacctggggagcgggggactccgctcgggcaggaggcagcggccagggctgggccagggcgagagtcggtcctcccggtgctgggctccccgtctgccttgaggggtgtgcatggatggagggtgcctgaggctgcaggcaggggatgaccgggacaggcctgggctggggcagttggaggtatgggcactggtaggggacagagggttagggatcatgttggggggccagggacagtggaggaagggcccatggaagatggggctgtttggtttgaggctggagtgcttcctttgaaatttaattactgttttttaagtggtagggctcacagactgtgtgaagtcctgtgtgaagtgctggtgtggccacctacccaggtgtccctcccttttgttttggaggcctgtgtccttgtccaggggcagccctccttcccaggtgtggccagaagaaccccccatcccaagacttgaaatgtctgttgctcacctctgtccctccagaactcggcttccccatcttcacttgcaaaacaagtgcagccctgcgcccatcagcaccccctccggtgtgcacacaggccagtgagcggtggccgaccagcgcaccccactcccccaacctccacaacccatcaagcggaggccgcctccgctaggggaggaccatgtgctgcaccctggcctggggacctacagggtgtgggttagacgcattcccactgggcggctcctttctgccccgaagcccacccctgtggcgaggccctaggagacctcccgtggggccgcctctacagacagcactcagcctcctgggctgcctccagccaggcccagcacatgcctgccctccagaaaaatacgttgctttccagaaggaggtgggggaccatgggcaggcactgtggacgctaacctcggcccctccacccgttcctcagggcccacgtccagggggaccaagacctgcattcctagggccgcaggtggctcagtggtgcagaggcatccagaccttctgctgaactaagaaccacccagcctagagggagcctttctctgcctcttcctcccctgtcttgggcacaggtggggttggagcccccatggggcccgctgggaacctggaccaagccttcctcggagatgggaggaagccgcggggtggagcaggggcaggtaggtgaggttgagctgcacttgagttccctctggagtttccttcatctgccccacacccaaatttgcactttaatttgaccatccctgggggcctggctgctgacagaagggctctctctgccctccactccaaagtgggtgcccccccacccttggccaggacagggagggagccgctggctgctgccggaggtggtggctgcacagaggacgcctgactgctgttcaggcccgcacaatgtcccgtgccccttcctcactcgtttgtaatcgccgtctgttttgttctgggtaaggaaggcaagagctatagataaaacttaaataataataatttaatgtgaatgggttctgagctctccctgcgccccgggcgggccaggccgagcattttgcactaatgtgtcccacggtgggcgtgagtcgggagtgtctgtggacgtgcgtggctgctgagcggacctgctgtgtgctccctccacgtcctgaatgtaccgtggggcgggggcggcggcccgggctcagaggggccttccagagtgccttagcatcctttgatcatttttcccaaggaaaccaattaagaaagccggacccttccctcctttgtttacaagatgactaattctagaatccggggttgtcctgtcctgtgagtgtgaccctgactcatccagaccctgtagagagagacgagccactcagtatttatgagatgtctgcacctttatccctaagcctgactattagcaatacgcatatcctatatagaatctattacagagctacgttatctccacaccttttgaggaggacagaagggactggaccgtgttggagctgccgcctggcaggtggtgggcctgggatctagccgcctctcctgccctgccttcctcttccccaaggggatgggcccaggaggcagctgggttgcatggagaggtccaggagggaccggaggtgtgacagatactgtgagcccggcgggccgcgcctggctgggtgcctcggtacttgaattctgtcttgttttccgcattgtgtctgtccacccgagttctctgtcgtcacttaactttgcattggatttggttgttgtactttgcccctgaatgtggacaaagctgtgggcaagaggtcagcaggacccgcctgggggtgccggcgttggtgactgcgggtcggggctcctagaacataggagccggctgcctggcctcctttctcctccaggaagagtcattctttggcatttgtgtttagagccaggaggaaggcggaaggtagggagggagggctggtccccctctgagggggctctagtgcctgaccctgacctgtcctcattcgacagctgaaactgttaagcgctggcccagtccccccaccccacccagccgtgtactgcctgggctcccctcaaagggaaatttttacggaaacatcttggcagcaagtggaaaaagatctatggcccatgaaccaactgaaaactccaagaaccctctgtctgcctctgccagcagcgagtcctaagcgcagaatccagagctcgtagctgtcctcagctgtaactactgtttcagaatgttgctgctgcatacatttgtcatgtcagccagccagctccgtgggtgagagtgtgcgtgtgcgcgtgtctgtgtgtatgtgcgtgtgtgtgcgtgtctgtgtgtgtgcacgtctgtgcgtctgtgtgcgcgtctgtgcatgtgtgtgtctgtgcgtgtgtgcgtctgtgtgtgtgcgtctgtgtgcgcgtgtgtgtgcgcgtctgtgtgtatgtgtgcacgcgcgtctgtgtgtgcacgtgcgtgtctctgcacgcgtgtctgtgtatgtgtgcacgcgtgtgtctgtgtgtgtgcacgcgcgtgcacgtcaccaccggagcatttagggtttggtacaagatggttctaaaatggcaaaggtttttcgtgtttgtttgttttgtttctttggaaaaagaaaaggaaaggaaaatcatgcagaatcgcaagcattcagactggacgaccggctcgtattccgatcagtcgcttccattgttagcatcgtacacgattgtgatttttatgtcaaaagaagccaaaacttgcaatactatttttagcagacaaaaaaaagaactaagtataaaatgtataaatatttttgacttgaacatttggatggcactgggtgcaagtagagcatccatccttcggatggaatgtttggaaaaaagagacttttaaaaaggagacggttgttttaaagagtctgtttaggggttaaagtactgtaactcacgactgttaaaaaataaattttcctgtgctgtaaaggaaggtttcacagtaccactgagttagatttcagccacagatgcttagctttttttttttgtcttttttttaaggaggaagcctttgttttgttttcctgagccctcactctgtttttgtgctgttactcggtagagtcaagactgttactttttagccatggctgacattgtatcaataactaaaactgaaacattcaaaagcgaacagggaaaccgagggcttcaagcgtgctcagagccgtttcagacagtggaaatccatgacaaacaaaaggatgtgatcattaattgtaaagcgctttgtaaaattcacatttacaaaataataaagtcagttcaaacctaa

SEQ ID NO: 414339 - DNA, 2093 bp, Homo sapiens
ctccatagtgtgtgcccacgtagaggcgccggggttgtcctgtcctgtgagtgtgaccctgactcatccagaccctgtagagagagacgagccactcagtatttatgagatgtctgcacctttatccctaagcctgactattagcaatacgcatatcctatatagaatctattacagagctacgttatctccacaccttttgaggaggacagaagggactggaccgtgttggagctgccgcctggcaggtggtgggcctgggatctagccgcctctcctgccctgccttcctcttccccaaggggatgggcccaggaggcagctgggttgcatggagaggtccaggagggaccggaggtgtgacagatactgtgagcccggcgggccgcgcctggctgggtgcctcggtacttgaattctgtcttgttttccgcattgtgtctgtccacccgagttctctgtcgtcacttaactttgcattggatttggttgttgtactttgcccctgaatgtggacaaagctgtgggcaagaggtcagcaggacccgcctgggggtgccggcgttggtgactgcgggtcggggctcctagaacataggagccggctgcctggcctcctttctcctccaggaagagtcattctttggcatttgtgtttagagccaggaggaaggcggaaggtagggagggagggctggtccccctctgagggggctctagtgcctgaccctgacctgtcctcattcgacagctgaaactgttaagcgctggcccagtccccccaccccacccagccgtgtactgcctgggctcccctcaaagggaaatttttacggaaacatcttggcagcaagtggaaaaagatctatggcccatgaaccaactgaaaactccaagaaccctctgtctgcctctgccagcagcgagtcctaagcgcagaatccagagctcgtagctgtcctcagctgtaactactgtttcagaatgttgctgctgcatacatttgtcatgtcagccagccagctccgtgggtgagagtgtgcgtgtgcgcgtgtctgtgtgtatgtgcgtgtgtgtgcgtgtctgtgtgtgtgcacgtctgtgcgtctgtgtgcgcgtctgtgcatgtgtgtgtctgtgcgtgtgtgcgtctgtgtgtgtgcgtctgtgtgcgcgtgtgtgtgcgcgtctgtgtgtatgtgtgcacgcgcgtctgtgtgtgcacgtgcgtgtctctgcacgcgtgtctgtgtatgtgtgcacgcgtgtgtctgtgtgtgtgcacgcgcgtgcacgtcaccaccggagcatttagggtttggtacaagatggttctaaaatggcaaaggtttttcgtgtttgtttgttttgtttctttggaaaaagaaaaggaaaggaaaatcatgcagaatcgcaagcattcagactggacgaccggctcgtattccgatcagtcgcttccattgttagcatcgtacacgattgtgatttttatgtcaaaagaagccaaaacttgcaatactatttttagcagacaaaaaaaagaactaagtataaaatgtataaatatttttgacttgaacatttggatggcactgggtgcaagtagagcatccatccttcggatggaatgtttggaaaaaagagacttttaaaaaggagacggttgttttaaagagtctgtttaggggttaaagtactgtaactcacgactgttaaaaaataaattttcctgtgctgtaaaggaaggtttcacagtaccactgagttagatttcagccacagatgcttagctttttttttttgtcttttttttaaggaggaagcctttgttttgttttcctgagccctcactctgtttttgtgctgttactcggtagagtcaagactgttactttttagccatggctgacattgtatcaataactaaaactgaaacattcaaaagcgaacagggaaaccgagggcttcaagcgtgctcagagccgtttcagacagtggaaatccatgacaaacaaaaggatgtgatcattaattgtaaagcgctttgtaaaattcacatttacaaaataataaagtcagttcaaacctaa

SEQ ID NO: 414340 - DNA, 1113 bp, Homo sapiens
taggggcgcgcccgcgcgcccgcgcgcgtcgaggcgcgcacggcagcgccgccgcccggggtggagggcgtggcgcgtgctgggtaggcgtcgtggtgcgtgtctgtgtgtgtgcacgtctgtgcgtctgtgtgcgcgtctgtgcatgtgtgtgtctgtgcgtgtgtgcgtctgtgtgtgtgcgtctgtgtgcgcgtgtgtgtgcgcgtctgtgtgtatgtgtgcacgcgcgtctgtgtgtgcacgtgcgtgtctctgcacgcgtgtctgtgtatgtgtgcacgcgtgtgtctgtgtgtgtgcacgcgcgtgcacgtcaccaccggagcatttagggtttggtacaagatggttctaaaatggcaaaggtttttcgtgtttgtttgttttgtttctttggaaaaagaaaaggaaaggaaaatcatgcagaatcgcaagcattcagactggacgaccggctcgtattccgatcagtcgcttccattgttagcatcgtacacgattgtgatttttatgtcaaaagaagccaaaacttgcaatactatttttagcagacaaaaaaaagaactaagtataaaatgtataaatatttttgacttgaacatttggatggcactgggtgcaagtagagcatccatccttcggatggaatgtttggaaaaaagagacttttaaaaaggagacggttgttttaaagagtctgtttaggggttaaagtactgtaactcacgactgttaaaaaataaattttcctgtgctgtaaaggaaggtttcacagtaccactgagttagatttcagccacagatgcttagctttttttttttgtcttttttttaaggaggaagcctttgttttgttttcctgagccctcactctgtttttgtgctgttactcggtagagtcaagactgttactttttagccatggctgacattgtatcaataactaaaactgaaacattcaaaagcgaacagggaaaccgagggcttcaagcgtgctcagagccgtttcagacagtggaaatccatgacaaacaaaaggatgtgatcattaattgtaaagcgctttgtaaaattcacatttacaaaataataaagtcagttcaaacctaa

SEQ ID NO: 414341 - DNA, 422 bp, Homo sapiens
caatggcagccggcccaatggcagcctactgtaactcacgactgttaaaaaataaattttcctgtgctgtaaaggaaggtttcacagtaccactgagttagatttcagccacagatgcttagctttttttttttgtcttttttttaaggaggaagcctttgttttgttttcctgagccctcactctgtttttgtgctgttactcggtagagtcaagactgttactttttagccatggctgacattgtatcaataactaaaactgaaacattcaaaagcgaacagggaaaccgagggcttcaagcgtgctcagagccgtttcagacagtggaaatccatgacaaacaaaaggatgtgatcattaattgtaaagcgctttgtaaaattcacatttacaaaataataaagtcagttcaaacctaa

SEQ ID NO: 414342 - DNA, 3603 bp, Homo sapiens
aaaaactttgggtgggatgggtgtccctgtccccagcccaccatggcttggggtgggtatctgtggccgttagggtgcgtcccctgctcccccgcccagggccagggaccactcgtctcccactgggggaaaaagggggtcccgggtgggcgactagtacgtgtgaagctgagctcagggccggacctggggagcgggggactccgctcgggcaggaggcagcggccagggctgggccagggcgagagtcggtcctcccggtgctgggctccccgtctgccttgaggggtgtgcatggatggagggtgcctgaggctgcaggcaggggatgaccgggacaggcctgggctggggcagttggaggtatgggcactggtaggggacagagggttagggatcatgttggggggccagggacagtggaggaagggcccatggaagatggggctgtttggtttgaggctggagtgcttcctttgaaatttaattactgttttttaagtggtagggctcacagactgtgtgaagtcctgtgtgaagtgctggtgtggccacctacccaggtgtccctcccttttgttttggaggcctgtgtccttgtccaggggcagccctccttcccaggtgtggccagaagaaccccccatcccaagacttgaaatgtctgttgctcacctctgtccctccagaactcggcttccccatcttcacttgcaaaacaagtgcagccctgcgcccatcagcaccccctccggtgtgcacacaggccagtgagcggtggccgaccagcgcaccccactcccccaacctccacaacccatcaagcggaggccgcctccgctaggggaggaccatgtgctgcaccctggcctggggacctacagggtgtgggttagacgcattcccactgggcggctcctttctgccccgaagcccacccctgtggcgaggccctaggagacctcccgtggggccgcctctacagacagcactcagcctcctgggctgcctccagccaggcccagcacatgcctgccctccagaaaaatacgttgctttccagaaggaggtgggggaccatgggcaggcactgtggacgctaacctcggcccctccacccgttcctcagggcccacgtccagggggaccaagacctgcattcctagggccgcaggtggctcagtggtgcagaggcatccagaccttctgctgaactaagaaccacccagcctagagggagcctttctctgcctcttcctcccctgtcttgggcacaggtggggttggagcccccatggggcccgctgggaacctggaccaagccttcctcggagatgggaggaagccgcggggtggagcaggggcaggtaggtgaggttgagctgcacttgagttccctctggagtttccttcatctgccccacacccaaatttgcactttaatttgaccatccctgggggcctggctgctgacagaagggctctctctgccctccactccaaagtgggtgcccccccacccttggccaggacagggagggagccgctggctgctgccggaggtggtggctgcacagaggacgcctgactgctgttcaggcccgcacaatgtcccgtgccccttcctcactcgtttgtaatcgccgtctgttttgttctgggtaaggaaggcaagagctatagataaaacttaaataataataatttaatgtgaatgggttctgagctctccctgcgccccgggcgggccaggccgagcattttgcactaatgtgtcccacggtgggcgtgagtcgggagtgtctgtggacgtgcgtggctgctgagcggacctgctgtgtgctccctccacgtcctgaatgtaccgtggggcgggggcggcggcccgggctcagaggggccttccagagtgccttagcatcctttgatcatttttcccaaggaaaccaattaagaaagccggacccttccctcctttgtttacaagatgactaattctagaatccggggttgtcctgtcctgtgagtgtgaccctgactcatccagaccctgtagagagagacgagccactcagtatttatgagatgtctgcacctttatccctaagcctgactattagcaatacgcatatcctatatagaatctattacagagctacgttatctccacaccttttgaggaggacagaagggactggaccgtgttggagctgccgcctggcaggtggtgggcctgggatctagccgcctctcctgccctgccttcctcttccccaaggggatgggcccaggaggcagctgggttgcatggagaggtccaggagggaccggaggtgtgacagatactgtgagcccggcgggccgcgcctggctgggtgcctcggtacttgaattctgtcttgttttccgcattgtgtctgtccacccgagttctctgtcgtcacttaactttgcattggatttggttgttgtactttgcccctgaatgtggacaaagctgtgggcaagaggtcagcaggacccgcctgggggtgccggcgttggtgactgcgggtcggggctcctagaacataggagccggctgcctggcctcctttctcctccaggaagagtcattctttggcatttgtgtttagagccaggaggaaggcggaaggtagggagggagggctggtccccctctgagggggctctagtgcctgaccctgacctgtcctcattcgacagctgaaactgttaagcgctggcccagtccccccaccccacccagccgtgtactgcctgggctcccctcaaagggaaatttttacggaaacatcttggcagcaagtggaaaaagatctatggcccatgaaccaactgaaaactccaagaaccctctgtctgcctctgccagcagcgagtcctaagcgcagaatccagagctcgtagctgtcctcagctgtaactactgtttcagaatgttgctgctgcatacatttgtcatgtcagccagccagctccgtgggtgagagtgtgcgtgtgcgcgtgtctgtgtgtatgtgcgtgtgtgtgcgtgtctgtgtgtgtgcacgtctgtgcgtctgtgtgcgcgtctgtgcatgtgtgtgtctgtgcgtgtgtgcgtctgtgtgtgtgcgtctgtgtgcgcgtgtgtgtgcgcgtctgtgtgtatgtgtgcacgcgcgtctgtgtgtgcacgtgcgtgtctctgcacgcgtgtctgtgtatgtgtgcacgcgtgtgtctgtgtgtgtgcacgcgcgtgcacgtcaccaccggagcatttagggtttggtacaagatggttctaaaatggcaaaggtttttcgtgtttgtttgttttgttttcctgagccctcactctgtttttgtgctgttactcggtagagtcaagactgttactttttagccatggctgacattgtatcaataactaaaactgaaacattcaaaagcgaacagggaaaccgagggcttcaagcgtgctcagagccgtttcagacagtggaaatccatgacaaacaaaaggatgtgatcattaattgtaaagcgctttgtaaaattcacatttacaaaataataaagtcagttcaaacctaa

SEQ ID NO: 414343 - DNA, 2000 bp, Homo sapiens
agagagagagaaccacagagagagagagagagagagagagagagagagaggcaatacgcatatcctatatagaatctattacagagctacgttatctccacaccttttgaggaggacagaagggactggaccgtgttggagctgccgcctggcaggtggtgggcctgggatctagccgcctctcctgccctgccttcctcttccccaaggggatgggcccaggaggcagctgggttgcatggagaggtccaggagggaccggaggtgtgacagatactgtgagcccggcgggccgcgcctggctgggtgcctcggtacttgaattctgtcttgttttccgcattgtgtctgtccacccgagttctctgtcgtcacttaactttgcattggatttggttgttgtactttgcccctgaatgtggacaaagctgtgggcaagaggtcagcaggacccgcctgggggtgccggcgttggtgactgcgggtcggggctcctagaacataggagccggctgcctggcctcctttctcctccaggaagagtcattctttggcatttgtgtttagagccaggaggaaggcggaaggtagggagggagggctggtccccctctgagggggctctagtgcctgaccctgacctgtcctcattcgacagctgaaactgttaagcgctggcccagtccccccaccccacccagccgtgtactgcctgggctcccctcaaagggaaatttttacggaaacatcttggcagcaagtggaaaaagatctatggcccatgaaccaactgaaaactccaagaaccctctgtctgcctctgccagcagcgagtcctaagcgcagaatccagagctcgtagctgtcctcagctgtaactactgtttcagaatgttgctgctgcatacatttgtcatgtcagccagccagctccgtgggtgagagtgtgcgtgtgcgcgtgtctgtgtgtatgtgcgtgtgtgtgcgtgtctgtgtgtgtgcacgtctgtgcgtctgtgtgcgcgtctgtgcatgtgtgtgtctgtgcgtgtgtgcgtctgtgtgtgtgcgtctgtgtgcgcgtgtgtgtgcgcgtctgtgtgtatgtgtgcacgcgcgtctgtgtgtgcacgtgcgtgtctctgcacgcgtgtctgtgtatgtgtgcacgcgtgtgtctgtgtgtgtgcacgcgcgtgcacgtcaccaccggagcatttagggtttggtacaagatggttctaaaatggcaaaggtttttcgtgtttgtttgttttgtttctttggaaaaagaaaaggaaaggaaaatcatgcagaatcgcaagcattcagactggacgaccggctcgtattccgatcagtcgcttccattgttagcatcgtacacgattgtgatttttatgtcaaaagaagccaaaacttgcaatactatttttagcagacaaaaaaaagaactaagtataaaatgtataaatatttttgacttgaacatttggatggcactgggtgcaagtagagcatccatccttcggatggaatgtttggaaaaaagagacttttaaaaaggagacggttgttttaaagagtctgtttaggggttaaagtactgtaactcacgactgttaaaaaataaattttcctgtgctgtaaaggaaggtttcacagtaccactgagttagatttcagccacagatgcttagctttttttttttgtcttttttttaaggaggaagcctttgttttgttttcctgagccctcactctgtttttgtgctgttactcggtagagtcaagactgttactttttagccatggctgacattgtatcaataactaaaactgaaacattcaaaagcgaacagggaaaccgagggcttcaagcgtgctcagagccgtttcagacagtggaaatccatgacaaacaaaaggatgtgatcattaattgtaaagcgctttgtaaaattcacatttacaaaataataaagtcagttcaaacctaa

SEQ ID NO: 414344 - DNA, 250 bp, Homo sapiens
cctgcttcagtttggcctgacaggcagccgagctcagcccacagagaccccattgtgcacaccccacaagtccaacgagaagatgggacggaagcgcgtcctcaggctcctgcttctgggccgcagagttggaggccagggccacagccgagcccggcttgtggaggcacaggtcagggctcacacagcagtctgggggacattgcagccgcttcggagaaggccccgggctccctccctgggcttgagc

SEQ ID NO: 414345 - DNA, 589 bp, Homo sapiens
gcgatgggcatccaatccagaggggtccactctagaggccaggccaccagcaccatgggccagtgtgtcaccaagtgtaagaatccctcatcgaccctgggcagcaaaaatggagaccgtgagcccagcaacaagtcacatagcaggaggggtgcaggccaccgtgaggagcaggtaccaccctgtggcaagccaggtggagatatcctcgtcaacgggaccaagaaggccgaggctgccactgaggcctgccagctgccaacgtcctcgggagatgctgggagggagtccaagtccaatgccgaggagtcttccttgcaaagattggaagaactgttcaggcgctacaaggatgagcgggaagatgcaattttggaggaaggcatggagcgcttttgcaatgacctgtgtgttgaccccacagaatttcgagtgctgctcttggcttggaagttccaggctgcaaccatgtgcaaattcaccaggttagtcacaaacactttatgtcaccaggtgagcagtggaggaaagggaacagcattgggcagtggtgcccagctaggataggactgggttggcttcatagggt

SEQ ID NO: 414346 - DNA, 1188 bp, Homo sapiens
ttccaggttggctggctcctctggctgatggcatgttgaggtacatgggccagcggcagcgatgggcatccaatccagaggggtccactctagaggccaggccaccagcaccatgggccagtgtgtcaccaagtgtaagaatccctcatcgaccctgggcagcaaaaatggagaccgtgagcccagcaacaagtcacatagcaggaggggtgcaggccaccgtgaggagcaggtaccaccctgtggcaagccaggtggagatatcctcgtcaacgggaccaagaaggccgaggctgccactgaggcctgccagctgccaacgtcctcgggagatgctgggagggagtccaagtccaatgccgaggagtcttccttgcaaagattggaagaactgttcaggcgctacaaggatgagcgggaagatgcaattttggaggaaggcatggagcgcttttgcaatgacctgtgtgttgaccccacagaatttcgagtgctgctcttggcttggaagttccaggctgcaaccatgtgcaaattcaccaggaaggagttttttgatggctgcaaagcaataagtgcagacagcattgacggaatctgtgcacggttccctagcctcttaacagaagccaaacaagaggataaattcaaggatctctaccggtttacatttcagtttggcctggactctgaagaagggcagcggtcactgcatcgggaaatagccattgccctgtggaaactagtctttacccagaacaatcctccggtattggaccaatggctaaacttcctaacagagaacccctcggggatcaagggcatctcccgggacacttggaacatgttccttaacttcactcaggtgattggccctgacctcagcaactacagtgaagatgaggcctggccaagtctctttgacacctttgtggagtgggaaatggagcgaaggaaaagagaaggggaagggagaggtgcactcagctcagggcctgagggcttgtgtcccgaggagcagacttagtggctctgtcccaggagcagcagcaaggatctgccagctgccctgcagccaactgaggaattggaccattttggaaattactgaagatccggatattttctactttacacctttctctgccttgtatctgaaagggctctaaaatgctgtatcatgtttta

SEQ ID NO: 414347 - DNA, 559 bp, Homo sapiens
tgtcatgttttgatatcagatattctggttgtgttaaaataattttgaggattttcttcttatactgtgttctagagtgggtaaaaaagccctagtctcactatcagtgtttaagtgaacacatcagtgacatcatctggactctcctttgtttttgctggtttggagttaggacatctagaagtttttttctttttttcctttttttgtatggttattgcttgttctttgttttgtgtcaaatttaacctgttttctcttagcaaatcacagctcatgcagattttcaaacacattagccttgttatacaaagtgttctttcatcattctattaaatttccattttcattccagttatagttatttctgctgtgcctttgttaatgaataagtttaaacagtggatgtttagcatcactagccttccccttccatctcccttaatcaggaccttggtataatttatcaggtattttttaaggttctaatttacttatatatattgtttctgtattcttttgtttcttttcttaataaattcttaaacctgtgtaacac

SEQ ID NO: 414348 - DNA, 7539 bp, Homo sapiens
  misc_feature (12)..(12): n is a, c, g, or t
  misc_feature (30)..(30): n is a, c, g, or t
  misc_feature (337)..(337): n is a, c, g, or t
ttcagtctgttnaaggataccccgttgtgnatttctacctgtatgaccagagacacctcaaattcaaaatgtccagaaatgaacacagtatcttcttcccttgagtaactcgccttctgtatataattggggtgaatgttccagcaatgccaacgggctagcatctactcaggcaggtacgccagacatctgaatcttaatacctcgtcgtcccccctcaatctgtcactatgtcctaattttatttcctacctttgcatcccttcctcataattatcagcaccactgccttaatttagatcctatcattccttgtctggattatttcaagtctttngcccctctcaagtctgacctcgtcatagactgtttgtggatgattattttccctgcaacatctccacctcccaatagtctccatcacttattagccatgtgaattatggcaaattgcttaacctacctatgcctcactttccttattgtaaagtggaaataagagtacctatctcatagggttgtgtgattaatcatgcgatgcaattagaacagtgcctaggatatgaaagtgccccaaaatgttacgttattattattattactactattgccttctcatgaacatgctatgtgtatgttcaagctgttatctctactggaaaatccttctccgtttccaatactctttccaaaaccccctcctgggttttactgcacctaccattgtgtactgacgtgattgaatgattggcttatgggactgatcctttctaccagacttaacttcttcagggcaggaactctgatacatagtaaatggtcaataaaagttggctcaactgaaaccctaaggataaactccatccacagcggaaggcgcggccccgcccgattcgggggcggggcggggagccgcgcgcggagggtgggtcgatgggggtggggtgggactctttttcctcgccgtggcggcggaggcgcacggcgtgggcttgcggcgagacgtcgtcgtcggaggctgaaaaagcccaaggtgctgccgttgcccgtacaactcggacttgctgttgctcgagccgcgtctgcacgggtctcggaccgagcggagctcgcagcctcggtcccggagcccaccttcgcctcgcccttgcccagcctgcggtgatggaggcggccaccacactgcacccaggcccgcgcccggcgctgcccctcgggggcccgggcccgctgggcgagttcctgcctccacccgagtgcccggtcttcgaacccagctgggaagagttcgcggaccccttcgctttcatccacaagatccggcccatagccgagcagactggcatctgtaaggtgcggccgccgccggattggcagccaccatttgcatgtgatgttgataaacttcattttacgccacgtatccagagactgaatgaattggaggcccaaactcgtgtaaaattgaatttcttggaccagattgcaaagtactgggagttacagggaagtactctgaaaattccacatgtggagaggaagatcttggacttatttcagcttaataagttagttgcagaagaaggtggatttgcagttgtttgcaaggatagaaaatggaccaaaattgctaccaagatggggtttgctcctggcaaagcagtgggctcacatatcagagggcattatgaacgaattctcaacccctacaacttattcctgtccggagacagcctaaggtgtttgcagaagccaaacctgaccacagacactaaggacaaggagtacaaaccccatgatattccccagaggcagtctgtgcagccttcggaaacgtgccccccagcccgacgagcaaaacgcatgagagcagagagacagagtctcgctgtgttgcccaggctggagtgcagtggcgcgatcttggctcactgcaacctccgcctcctagattccagcaattcttctgcctcagcctcccaagccatgaatattaaaatagaacccgaggagacaacagaagccagaactcataatctgagacgtcgaatgggttgtccaactccaaaatgtgaaaatgagaaagaaatgaagagtagcatcaagcaagaacctattgagaggaaagattatattgtagaaaatgagaaggaaaagcccaagagtcgatctaaaaaagccaccaatgctgtggacctgtatgtctgtcttttatgtggcagtggcaatgatgaagaccggctactgttgtgtgatggctgtgatgacagttaccataccttttgcttgatcccacctctccatgatgttcccaagggagactggaggtgtcctaagtgtttggctcaggaatgtagtaagccacaagaagcatttggctttgaacaagcagccagggactataccctccgtacttttggggaaatggcagatgcgttcaaatctgattacttcaacatgccagtccatatggtccccacagagcttgttgagaaagaattttggagactagtaagcactattgaggaggatgtcacagtggaatatggagctgacattgcctcaaaggaatttggcagtggctttcctgtccgagatgggaaaatcaaactctcacctgaggaagaggagtatcttgatagtggctggaatttgaacaacatgccagtgatggagcagtctgtccttgcacatattactgctgatatatgtggcatgaaacttccttggttgtatgtgggaatgtgcttttcttcattctgttggcacattgaagaccactggagctattcaattaactacttgcactggggtgagccaaaaacctggtatggagtcccagggtatgctgctgagcagctagaaaatgtaatgaagaaactagctccagaactctttgtgtcccagccggatctcctccatcagcttgtgaccatcatgaaccccaataccctgatgactcatgaagtgcctgtttaccgaactaatcagtgtgctggggagtttgtgattacatttccaagagcctaccacagtggttttaaccagggttttaattttgctgaggctgttaacttctgcactgttgattggctgccattaggccgacagtgtgtggagcattatcgcttgcttcatcgatattgtgtgttttcccatgatgagatgatctgcaagatggcttccaaggctgatgtattagatgttgtagtggcttcaactgttcagaaagacatggccattatgattgaggatgagaaagctttaagagaaactgtccgtaaattgggagtgattgattcggaaagaatggattttgagctgttgccagatgatgaacgtcagtgtgtaaaatgcaaaactacatgcttcatgtctgccatctcctgttcttgtaaacctggccttcttgtttgcctgcatcatgtaaaagaattgtgttcctgtcctccttataaatataaattgcggtataggtacacgctggatgatctctaccctatgatgaatgcattgaagcttcgagcagaatcttacaacgaatgggccttgaatgtgaatgaagctttggaggcaaagatcaacaagaagaaaagccttgtcagcttcaaggctttaattgaagaatctgaaatgaagaaattcccagacaatgatcttttgcgacaccttcgcctagtcacacaggatgcagagaagtgtgcctctgttgcgcagcagttgcttaatggcaaaaggcaaactagatatcgatctggtggagggaaatcccaaaatcagttgacagtgaatgagctccggcagtttgtaacacagctgtatgctcttccatgtgtcctcagtcagacaccattactaaaggatctcttgaatcgtgtagaagattttcaacagcatagtcagaaactactctctgaggaaacgcctagtgctgcggagctgcaggacttgctagatgtcagctttgaatttgatgttgaacttccacagcttgctgagatgcgtatccgtttggaacaagcccgttggctagaagaggtgcagcaagcttgcctagaccccagctcccttactttagatgatatgagacgtctcatagacctaggggtagggctggccccgtattcagcagtggagaaagctatggcccggctgcaggaactgctcacagtgtcagagcactgggacgacaaagccaagagtctcctcaaggccaggccacgacattcattgaatagccttgctacggcagtaaaggaaatcgaagagatccctgcatatctgcccaatggtgcggctctgaaagactcagtgcagagagccagagactggcttcaggatgtagagggcctgcaggctggaggacgtgtgccagtgttagacacactcatagaacttgttacacgaggccgatctatcccggtacatctgaattctttgccaagactggaaaccctagtagctgaggttcaggcttggaaagaatgtgctgttaatacattcttgactgagaattctccatattctctcttagaggtgctgtgtcctcgatgtgatattggccttttgggattgaaaaggaagcagagaaagttaaaggagcccttgccaaatggaaagaaaaaaagcaccaaattagagagtctgagtgacctggagagagctttaactgaaagcaaggagactgcttcagctatggcaactcttggggaagctcgcctaagggaaatggaagccttgcagtctctcagactcgccaatgaagggaaattgctgtcgcctctccaagatgtggatataaaaatctgcctatgtcagaaggccccagctgcccctatgattcaatgtgaactctgcagggatgctttccacaccagttgtgtggcggtacccagtatttcacagggcctgcgaatctggctttgtccccattgtcggaggtcagagaaacctccattagagaaaattctgcccctgctcgcctcccttcagcgtatccgagttcgccttcctgagggagatgcacttcgatatatgattgaaagaaccgtgaactggcagcacagagcccagcaactgctttcgtcagggaatcttaaatttgtgcaagatcgagtgggctcaggactgttatatagcagatggcaagcctcagcaggacaggtgtcagacacaaacaaggtatctcaacctcctggcacaacatcattttctttgcctgatgactgggacaacagaacctcatatttgcactcccccttctcaactggacgaagttgtatccccctccatggtgttagtccagaagtgaatgaactattgatggaagcccagctgctccaggtatcccttcctgaaattcaggaactttaccagactttacttgcaaagccaagccctgctcagcagactgaccgaagctcaccagtgagacccagcagtgagaagaatgactgttgccgagggaagcgagatggaattaacagtcttgagagaaaactgaagagacgcctggaaagagagggcctctccagtgagcggtgggaacgagttaagaaaatgcggacccccaaaaagaagaaaatcaaactgagccaccccaaggacatgaacaatttcaagttagagagagagcgtagctatgaattagttcgttctgctgaaactcattccctgccctcagacacatcctattccgaacaggaagactctgaggatgaagatgccatctgcccagctgtgagctgcctgcagccagaaggagatgaggtggactgggtccagtgtgatggcagctgcaatcagtggtttcatcaggtctgtgttggtgtctccccagagatggcagagaaagaagactacatctgtgtgcgctgtactgtgaaggacgcaccaagccgaaagtaaaaacacaaaaacagatacccccctacttaatgtaattcaggactccaaccaagaggatttcttcaaatctcagcaaagctacaggactggtactcaagccagcctgtaaacggtgctatttctattccttatgggatcatttttccaggactctttgaagaaaagaaaaaacaactaaaaaaatttttgacactttttgtattttttccttaagagctatttgtggttgttgaggtttgaaaagctgactgttttttttgcaggggttcccaccaatttggaaggcattgaagcttgcaccttttcatgtacagcattaaaattttacctctctctgggatttaccagcttaagagtccaactcacttccagtgcccaaaagggcacccaccagaaattccagtaaatcctcatttgaggaagctctcccttgtttactctgttaccacattggggaaatttttaagtttttcactttgggagtttttgtttgtttcttcttttcctttatccacttttcttcttcctggtagactaggtttatttatctgagcaataacttctatgttggtttcagtggctggaattaaaacaaaacaaaacaaacttccaaacagtgtgttggtgctttagcgattgattgatgtacagaacacaaatgtctagtttctagtgtcactgatgaactagtgatgtagaaaagagacttctctgtaagtaattgccacagctgtattttggctttctccctgtcccttcctttctcccctattttttggtagcttgtatcaaatgttacagtttatattgtggaataaatccttcgtcctaacataacactaaatgctgattatttagagccattagagcacagcttcttctgcccctctactgttgcacagccagaaggggctgcttgcttttgcctctgcccaaccaggttgcagtagcagtggatgttagcctgcaaacaacattaggggattcttcttttgtgtcctgctctgtttggtgggccatatgcctacagccctcactaacaaagaacccctctgtcttcaaggactagaacctatctttaaagccgtgctcttttaaaataagctttctcagaatgttggcaaatcacttcaatcctcaaatcagtcttccttgtggaatgctgcctttattatatttgaattgacaggggaacttggtttagggttaagacgttggaaggaaatctaaggaaaattaatcctcacagaggtccgggtttagtatatgtcttgagaggagacttgtgaattcccagactctgcctcctggtttcctttctcatttctttctaactgtagctatcattactggctgtggatagcccatagctattttccttgcttttcttttttaaaggggtctgttctgcagtggagaagacattctggtgaccagacttttgcttaccttttcctattctgttgccaatttttgttttccccacattctatagccataaacctgaagatgagtaaaactggtgggtctttaataaaacaacaacaaaaacagcagtttgtgatatagcagaggtttaaatgtaccctccccttttatgcacttcaaataattaaatctctttaagaatga

SEQ ID NO: 414349 - DNA, 7603 bp, Homo sapiens
  misc_feature (12)..(12): n is a, c, g, or t
  misc_feature (30)..(30): n is a, c, g, or t
  misc_feature (337)..(337): n is a, c, g, or t
ttcagtctgttnaaggataccccgttgtgnatttctacctgtatgaccagagacacctcaaattcaaaatgtccagaaatgaacacagtatcttcttcccttgagtaactcgccttctgtatataattggggtgaatgttccagcaatgccaacgggctagcatctactcaggcaggtacgccagacatctgaatcttaatacctcgtcgtcccccctcaatctgtcactatgtcctaattttatttcctacctttgcatcccttcctcataattatcagcaccactgccttaatttagatcctatcattccttgtctggattatttcaagtctttngcccctctcaagtctgacctcgtcatagactgtttgtggatgattattttccctgcaacatctccacctcccaatagtctccatcacttattagccatgtgaattatggcaaattgcttaacctacctatgcctcactttccttattgtaaagtggaaataagagtacctatctcatagggttgtgtgattaatcatgcgatgcaattagaacagtgcctaggatatgaaagtgccccaaaatgttacgttattattattattactactattgccttctcatgaacatgctatgtgtatgttcaagctgttatctctactggaaaatccttctccgtttccaatactctttccaaaaccccctcctgggttttactgcacctaccattgtgtactgacgtgattgaatgattggcttatgggactgatcctttctaccagacttaacttcttcagggcaggaactctgatacatagtaaatggtcaataaaagttggctcaactgaaaccctaaggataaactccatccacagcggaaggcgcggccccgcccgattcgggggcggggcggggagccgcgcgcggagggtgggtcgatgggggtggggtgggactctttttcctcgccgtggcggcggaggcgcacggcgtgggcttgcggcgagacgtcgtcgtcggaggctgaaaaagcccaaggtgctgccgttgcccgtacaactcggacttgctgttgctcgagccgcgtctgcacgggtctcggaccgagcggagctcgcagcctcggtcccggagcccaccttcgcctcgcccttgcccagcctgcggtgatggaggcggccaccacactgcacccaggcccgcgcccggcgctgcccctcgggggcccgggcccgctgggcgagttcctgcctccacccgagtgcccggtcttcgaacccagctgggaagagttcgcggaccccttcgctttcatccacaagatccggcccatagccgagcagactggcatctgtaaggtgcggccgccgccggattggcagccaccatttgcatgtgatgttgataaacttcattttacgccacgtatccagagactgaatgaattggaggcccaaactcgtgtaaaattgaatttcttggaccagattgcaaagtactgggagttacagggaagtactctgaaaattccacatgtggagaggaagatcttggacttatttcagcttaataagttagttgcagaagaaggtggatttgcagttgtttgcaaggatagaaaatggaccaaaattgctaccaagatggggtttgctcctggcaaagcagtgggctcacatatcagagggcattatgaacgaattctcaacccctacaacttattcctgtccggagacagcctaaggtgtttgcagaagccaaacctgaccacagacactaaggacaaggagtacaaaccccatgatattccccagaggcagtctgtgcagccttcggaaacgtgccccccagcccgacgagcaaaacgcatgagagcagagagacagagtctcgctgtgttgcccaggctggagtgcagtggcgcgatcttggctcactgcaacctccgcctcctagattccagcaattcttctgcctcagcctcccaagccatgaatattaaaatagaacccgaggagacaacagaagccagaactcataatctgagacgtcgaatgggttgtccaactccaaaatgtgaaaatgagaaagaaatgaagagtagcatcaagcaagaacctattgagaggaaagattatattgtagaaaatgagaaggaaaagcccaagagtcgatctaaaaaagccaccaatgctgtggacctgtatgtctgtcttttatgtggcagtggcaatgatgaagaccggctactgttgtgtgatggctgtgatgacagttaccataccttttgcttgatcccacctctccatgatgttcccaagggagactggaggtgtcctaagtgtttggctcaggaatgtagtaagccacaagaagcatttggctttgaacaagcagccagggactataccctccgtacttttggggaaatggcagatgcgttcaaatctgattacttcaacatgccagtccatatggtccccacagagcttgttgagaaagaattttggagactagtaagcactattgaggaggatgtcacagtggaatatggagctgacattgcctcaaaggaatttggcagtggctttcctgtccgagatgggaaaatcaaactctcacctgaggaagaggagtatcttgatagtggctggaatttgaacaacatgccagtgatggagcagtctgtccttgcacatattactgctgatatatgtggcatgaaacttccttggttgtatgtgggaatgtgcttttcttcattctgttggcacattgaagaccactggagctattcaattaactacttgcactggggtgagccaaaaacctggtatggagtcccagggtatgctgctgagcagctagaaaatgtaatgaagaaactagctccagaactctttgtgtcccagccggatctcctccatcagcttgtgaccatcatgaaccccaataccctgatgactcatgaagtgcctgtttaccgaactaatcagtgtgctggggagtttgtgattacatttccaagagcctaccacagtggttttaaccagggttttaattttgctgaggctgttaacttctgcactgttgattggctgccattaggccgacagtgtgtggagcattatcgcttgcttcatcgatattgtgtgttttcccatgatgagatgatctgcaagatggcttccaaggctgatgtattagatgttgtagtggcttcaactgttcagaaagacatggccattatgattgaggatgagaaagctttaagagaaactgtccgtaaattgggagtgattgattcggaaagaatggattttgagctgttgccagatgatgaacgtcagtgtgtaaaatgcaaaactacatgcttcatgtctgccatctcctgttcttgtaaacctggccttcttgtttgcctgcatcatgtaaaagaattgtgttcctgtcctccttataaatataaattgcggtataggtacacgctggatgatctctaccctatgatgaatgcattgaagcttcgagcagaatcttacaacgaatgggccttgaatgtgaatgaagctttggaggcaaagatcaacaagaagaaaagccttgtcagcttcaaggctttaattgaagaatctgaaatgaagaaattcccagacaatgatcttttgcgacaccttcgcctagtcacacaggatgcagagaagtgtgcctctgttgcgcagcagttgcttaatggcaaaaggcaaactagatatcgatctggtggagggaaatcccaaaatcagttgacagtgaatgagctccggcagtttgtaacacagctgtatgctcttccatgtgtcctcagtcagacaccattactaaaggatctcttgaatcgtgtagaagattttcaacagcatagtcagaaactactctctgaggaaacgcctagtgctgcggagctgcaggacttgctagatgtcagctttgaatttgatgttgaacttccacagcttgctgagatgcgtatccgtttggaacaagcccgttggctagaagaggtgcagcaagcttgcctagaccccagctcccttactttagatgatatgagacgtctcatagacctaggggtagggctggccccgtattcagcagtggagaaagctatggcccggctgcaggaactgctcacagtgtcagagcactgggacgacaaagccaagagtctcctcaaggccaggccacgacattcattgaatagccttgctacggcagtaaaggaaatcgaagagatccctgcatatctgcccaatggtgcggctctgaaagactcagtgcagagagccagagactggcttcaggatgtagagggcctgcaggctggaggacgtgtgccagtgttagacacactcatagaacttgttacacgaggccgatctatcccggtacatctgaattctttgccaagactggaaaccctagtagctgaggttcaggcttggaaagaatgtgctgttaatacattcttgactgagaattctccatattctctcttagaggtgctgtgtcctcgatgtgatattggccttttgggattgaaaaggaagcagagaaagttaaaggagcccttgccaaatggaaagaaaaaaagcaccaaattagagagtctgagtgacctggagagagctttaactgaaagcaaggagactgcttcagctatggcaactcttggggaagctcgcctaagggaaatggaagccttgcagtctctcagactcgccaatgaagggaaattgctgtcgcctctccaagatgtggatataaaaatctgcctatgtcagaaggccccagctgcccctatgattcaatgtgaactctgcagggatgctttccacaccagttgtgtggcggtacccagtatttcacagggcctgcgaatctggctttgtccccattgtcggaggtcagagaaacctccattagagaaaattctgcccctgctcgcctcccttcagcgtatccgagttcgccttcctgagggagatgcacttcgatatatgattgaaagaaccgtgaactggcagcacagagcccagcaactgctttcgtcagggaatcttaaatttgtgcaagatcgagtgggctcaggactgttatatagcagatggcaagcctcagcaggacaggtgtcagacacaaacaaggtatctcaacctcctggcacaacatcattttctttgcctgatgactgggacaacagaacctcatatttgcactcccccttctcaactggacgaagttgtatccccctccatggtgttagtccagaagtgaatgaactattgatggaagcccagctgctccaggtatcccttcctgaaattcaggaactttaccagactttacttgcaaagccaagccctgctcagcagactgaccgaagctcaccagtgagacccagcagtgagaagaatgactgttgccgagggaagcgagatggaattaacagtcttgagagaaaactgaagagacgcctggaaagagagggcctctccagtgagcggtgggaacgagttaagaaaatgcggacccccaaaaagaagaaaatcaaactgagccaccccaaggacatgaacaatttcaagttagagagagagcgtagctatgaattagttcgttctgctgaaactcattccctgccctcagacacatcctattccgaacaggaagactctgaggatgaagatgccatctgcccagctgtgagctgcctgcagccagaaggagatgaggtggactgggtccagtgtgatggcagctgcaatcagtggtttcatcaggtctgtgttggtgtctccccagagatggcagagaaagaagactacatctgtgtgcgctgtactgtgaaggacgcaccaagccgaaagtaaaaacacaaaaacagatacccccctacttaatgtaattcaggactccaaccaagaggatttcttcaaatctcagcaaagctacaggactggtactcaagccagcctgtaaacggtgctatttctattccttatgggatcatttttccaggactctttgaagaaaagaaaaaacaactaaaaaaatttttgacactttttgtattttttccttaagagctatttgtggttgttgaggtttgaaaagctgactgttttttttgcaggggttcccaccaatttggaaggcattgaagcttgcaccttttcatgtacagcattaaaattttacctctctctgggatttaccagcttaagagtccaactcacttccagtgcccaaaagggcacccaccagaaattccagtaaatcctcatttgaggaagctctcccttgtttactctgttaccacattggggaaatttttaagtttttcactttgggagtttttgtttgtttcttcttttcctttatccacttttcttcttcctggtagactaggtttatttatctgagcaataacttctatgttggtttcagtggctggaattaaaacaaaacaaaacaaacttccaaacagtgtgttggtgctttagcgattgattgatgtacagaacacaaatgtctagtttctagtgtcactgatgaactagtgatgtagaaaagagacttctctgtaagtaattgccacagctgtattttggctttctccctgtcccttcctttctcccctattttttggtagcttgtatcaaatgttacagtttatattgtggaataaatccttcgtcctaacataacactaaatgctgattatttagagccattagagcacagcttcttctgcccctctactgttgcacagccagaaggggctgcttgcttttgcctctgcccaaccaggttgcagtagcagtggatgttagcctgcaaacaacattaggggattcttcttttgtgtcctgctctgtttggtgggccatatgcctacagccctcactaacaaagaacccctctgtcttcaaggactagaacctatctttaaagccgtgctcttttaaaataagctttctcagaatgttggcaaatcacttcaatcctcaaatcagtcttccttgtggaatgctgcctttattatatttgaattgacaggggaacttggtttagggttaagacgttggaaggaaatctaaggaaaattaatcctcacagaggtccgggtttagtatatgtcttgagaggagacttgtgaattcccagactctgcctcctggtttcctttctcatttctttctaactgtagctatcattactggctgtggatagcccatagctattttccttgcttttcttttttaaaggggtctgttctgcagtggagaagacattctggtgaccagacttttgcttaccttttcctattctgttgccaatttttgttttccccacattctatagccataaacctgaagatgagtaaaactggtgggtctttaataaaacaacaacaaaaacagcagtttgtgatatagcagaggtttaaatgtaccctccccttttatgcacttcaaataattaaatctctttaagaatgacttctagttgtctgcagttttctgcagttgttgtgatgtttctcttcgtctgatggtggttctg

SEQ ID NO: 414350 - DNA, 7931 bp, Homo sapiens
  misc_feature (12)..(12): n is a, c, g, or t
  misc_feature (30)..(30): n is a, c, g, or t
  misc_feature (337)..(337): n is a, c, g, or t
  misc_feature (5829)..(5829): n is a, c, g, or t
ttcagtctgttnaaggataccccgttgtgnatttctacctgtatgaccagagacacctcaaattcaaaatgtccagaaatgaacacagtatcttcttcccttgagtaactcgccttctgtatataattggggtgaatgttccagcaatgccaacgggctagcatctactcaggcaggtacgccagacatctgaatcttaatacctcgtcgtcccccctcaatctgtcactatgtcctaattttatttcctacctttgcatcccttcctcataattatcagcaccactgccttaatttagatcctatcattccttgtctggattatttcaagtctttngcccctctcaagtctgacctcgtcatagactgtttgtggatgattattttccctgcaacatctccacctcccaatagtctccatcacttattagccatgtgaattatggcaaattgcttaacctacctatgcctcactttccttattgtaaagtggaaataagagtacctatctcatagggttgtgtgattaatcatgcgatgcaattagaacagtgcctaggatatgaaagtgccccaaaatgttacgttattattattattactactattgccttctcatgaacatgctatgtgtatgttcaagctgttatctctactggaaaatccttctccgtttccaatactctttccaaaaccccctcctgggttttactgcacctaccattgtgtactgacgtgattgaatgattggcttatgggactgatcctttctaccagacttaacttcttcagggcaggaactctgatacatagtaaatggtcaataaaagttggctcaactgaaaccctaaggataaactccatccacagcggaaggcgcggccccgcccgattcgggggcggggcggggagccgcgcgcggagggtgggtcgatgggggtggggtgggactctttttcctcgccgtggcggcggaggcgcacggcgtgggcttgcggcgagacgtcgtcgtcggaggctgaaaaagcccaaggtgctgccgttgcccgtacaactcggacttgctgttgctcgagccgcgtctgcacgggtctcggaccgagcggagctcgcagcctcggtcccggagcccaccttcgcctcgcccttgcccagcctgcggtgatggaggcggccaccacactgcacccaggcccgcgcccggcgctgcccctcgggggcccgggcccgctgggcgagttcctgcctccacccgagtgcccggtcttcgaacccagctgggaagagttcgcggaccccttcgctttcatccacaagatccggcccatagccgagcagactggcatctgtaaggtgcggccgccgccggattggcagccaccatttgcatgtgatgttgataaacttcattttacgccacgtatccagagactgaatgaattggaggcccaaactcgtgtaaaattgaatttcttggaccagattgcaaagtactgggagttacagggaagtactctgaaaattccacatgtggagaggaagatcttggacttatttcagcttaataagttagttgcagaagaaggtggatttgcagttgtttgcaaggatagaaaatggaccaaaattgctaccaagatggggtttgctcctggcaaagcagtgggctcacatatcagagggcattatgaacgaattctcaacccctacaacttattcctgtccggagacagcctaaggtgtttgcagaagccaaacctgaccacagacactaaggacaaggagtacaaaccccatgatattccccagaggcagtctgtgcagccttcggaaacgtgccccccagcccgacgagcaaaacgcatgagagcagaggccatgaatattaaaatagaacccgaggagacaacagaagccagaactcataatctgagacgtcgaatgggttgtccaactccaaaatgtgaaaatgagaaagaaatgaagagtagcatcaagcaagaacctattgagaggaaagattatattgtagaaaatgagaaggaaaagcccaagagtcgatctaaaaaagccaccaatgctgtggacctgtatgtctgtcttttatgtggcagtggcaatgatgaagaccggctactgttgtgtgatggctgtgatgacagttaccataccttttgcttgatcccacctctccatgatgttcccaagggagactggaggtgtcctaagtgtttggctcaggaatgtagtaagccacaagaagcatttggctttgaacaagcagccagggactataccctccgtacttttggggaaatggcagatgcgttcaaatctgattacttcaacatgccagtccatatggtccccacagagcttgttgagaaagaattttggagactagtaagcactattgaggaggatgtcacagtggaatatggagctgacattgcctcaaaggaatttggcagtggctttcctgtccgagatgggaaaatcaaactctcacctgaggaagaggagtatcttgatagtggctggaatttgaacaacatgccagtgatggagcagtctgtccttgcacatattactgctgatatatgtggcatgaaacttccttggttgtatgtgggaatgtgcttttcttcattctgttggcacattgaagaccactggagctattcaattaactacttgcactggggtgagccaaaaacctggtatggagtcccagggtatgctgctgagcagctagaaaatgtaatgaagaaactagctccagaactctttgtgtcccagccggatctcctccatcagcttgtgaccatcatgaaccccaataccctgatgactcatgaagtgcctgtttaccgaactaatcagtgtgctggggagtttgtgattacatttccaagagcctaccacagtggttttaaccagggttttaattttgctgaggctgttaacttctgcactgttgattggctgccattaggccgacagtgtgtggagcattatcgcttgcttcatcgatattgtgtgttttcccatgatgagatgatctgcaagatggcttccaaggctgatgtattagatgttgtagtggcttcaactgttcagaaagacatggccattatgattgaggatgagaaagctttaagagaaactgtccgtaaattgggagtgattgattcggaaagaatggattttgagctgttgccagatgatgaacgtcagtgtgtaaaatgcaaaactacatgcttcatgtctgccatctcctgttcttgtaaacctggccttcttgtttgcctgcatcatgtaaaagaattgtgttcctgtcctccttataaatataaattgcggtataggtacacgctggatgatctctaccctatgatgaatgcattgaagcttcgagcagaatcttacaacgaatgggccttgaatgtgaatgaagctttggaggcaaagatcaacaagaagaaaagccttgtcagcttcaaggctttaattgaagaatctgaaatgaagaaattcccagacaatgatcttttgcgacaccttcgcctagtcacacaggatgcagagaagtgtgcctctgttgcgcagcagttgcttaatggcaaaaggcaaactagatatcgatctggtggagggaaatcccaaaatcagttgacagtgaatgagctccggcagtttgtaacacagctgtatgctcttccatgtgtcctcagtcagacaccattactaaaggatctcttgaatcgtgtagaagattttcaacagcatagtcagaaactactctctgaggaaacgcctagtgctgcggagctgcaggacttgctagatgtcagctttgaatttgatgttgaacttccacagcttgctgagatgcgtatccgtttggaacaagcccgttggctagaagaggtgcagcaagcttgcctagaccccagctcccttactttagatgatatgagacgtctcatagacctaggggtagggctggccccgtattcagcagtggagaaagctatggcccggctgcaggaactgctcacagtgtcagagcactgggacgacaaagccaagagtctcctcaaggccaggccacgacattcattgaatagccttgctacggcagtaaaggaaatcgaagagatccctgcatatctgcccaatggtgcggctctgaaagactcagtgcagagagccagagactggcttcaggatgtagagggcctgcaggctggaggacgtgtgccagtgttagacacactcatagaacttgttacacgaggccgatctatcccggtacatctgaattctttgccaagactggaaaccctagtagctgaggttcaggcttggaaagaatgtgctgttaatacattcttgactgagaattctccatattctctcttagaggtgctgtgtcctcgatgtgatattggccttttgggattgaaaaggaagcagagaaagttaaaggagcccttgccaaatggaaagaaaaaaagcaccaaattagagagtctgagtgacctggagagagctttaactgaaagcaaggagactgcttcagctatggcaactcttggggaagctcgcctaagggaaatggaagccttgcagtctctcagactcgccaatgaagggaaattgctgtcgcctctccaagatgtggatataaaaatctgcctatgtcagaaggccccagctgcccctatgattcaatgtgaactctgcagggatgctttccacaccagttgtgtggcggtacccagtatttcacagggcctgcgaatctggctttgtccccattgtcggaggtcagagaaacctccattagagaaaattctgcccctgctcgcctcccttcagcgtatccgagttcgccttcctgagggagatgcacttcgatatatgattgaaagaaccgtgaactggcagcacagagcccagcaactgctttcgtcagggaatcttaaatttgtgcaagatcgagtgggctcaggactgttatatagcagatggcaagcctcagcaggacaggtgtcagacacaaacaaggtatctcaacctcctggcacaacatcattttctttgcctgatgactgggacaacagaacctcatatttgcactcccccttctcaactggacgaagttgtatccccctccatggtgttagtccagaagtgaatgaactattgatggaagcccagctgctccaggtatcccttcctgaaattcaggaactttaccagactttacttgcaaagccaagccctgctcagcagactgaccgaagctcaccagtgagacccagcagtgagaagaatgactgttgccgagggaagcgagatggaattaacagtcttgagagaaaactgaagagacgcctggaaagagagggcctctccagtgagcggtgggaacgagttaagaaaatgcggacccccaaaaagaagaaaatcaaactgagccaccccaaggacatgaacaatttcaagttagatgaaactcattccctgccctcagacacatcctattccgaacaggaagactctgaggatgaagatgccatctgcccagctgtgagctgcctgcagccagaaggagatgaggtcagtgaggtttgggccatagaggacgtgctttcccttaactcagaaaccctgtaagctagacctcatctcgctgggtctttctcctctgcttatctgctttgagctgatctgaatggattgctcagcccttcccccactgatatctgtgctcttaccatcgttcctgggtctcctcccttttcttgaagaaactcttgntcttccctttttccttttcttgctcttccagctttcaccttcccggcgctaagaaggtgggagggatgctgatgtgatgccctttggcttacttatcacagggcagcgctgtcttaaccccaaagcagacacgacttgaagaatgactttgactcggttgctttggctagggggccagctacactcatttggcttagctgttgtgccagaggtcccagtggtgggacagtggctgttattggcaaacggcctgaatttcttgaggctggcctgcccaattttgaatccattttttcctctgaaaaccccatcttcctgctctttgtaaccaggtggactgggtccagtgtgatggcagctgcaatcagtggtttcatcaggtctgtgttggtgtctccccagagatggcagagaaagaagactacatctgtgtgcgctgtactgtgaaggacgcaccaagccgaaagtaaaaacacaaaaacagatacccccctacttaatgtaattcaggactccaaccaagaggatttcttcaaatctcagcaaagctacaggactggtactcaagccagcctgtaaacggtgctatttctattccttatgggatcatttttccaggactctttgaagaaaagaaaaaacaactaaaaaaatttttgacactttttgtattttttccttaagagctatttgtggttgttgaggtttgaaaagctgactgttttttttgcaggggttcccaccaatttggaaggcattgaagcttgcaccttttcatgtacagcattaaaattttacctctctctgggatttaccagcttaagagtccaactcacttccagtgcccaaaagggcacccaccagaaattccagtaaatcctcatttgaggaagctctcccttgtttactctgttaccacattggggaaatttttaagtttttcactttgggagtttttgtttgtttcttcttttcctttatccacttttcttcttcctggtagactaggtttatttatctgagcaataacttctatgttggtttcagtggctggaattaaaacaaaacaaaacaaacttccaaacagtgtgttggtgctttagcgattgattgatgtacagaacacaaatgtctagtttctagtgtcactgatgaactagtgatgtagaaaagagacttctctgtaagtaattgccacagctgtattttggctttctccctgtcccttcctttctcccctattttttggtagcttgtatcaaatgttacagtttatattgtggaataaatccttcgtcctaacataacactaaatgctgattatttagagccattagagcacagcttcttctgcccctctactgttgcacagccagaaggggctgcttgcttttgcctctgcccaaccaggttgcagtagcagtggatgttagcctgcaaacaacattaggggattcttcttttgtgtcctgctctgtttggtgggccatatgcctacagccctcactaacaaagaacccctctgtcttcaaggactagaacctatctttaaagccgtgctcttttaaaataagctttctcagaatgttggcaaatcacttcaatcctcaaatcagtcttccttgtggaatgctgcctttattatatttgaattgacaggggaacttggtttagggttaagacgttggaaggaaatctaaggaaaattaatcctcacagaggtccgggtttagtatatgtcttgagaggagacttgtgaattcccagactctgcctcctggtttcctttctcatttctttctaactgtagctatcattactggctgtggatagcccatagctattttccttgcttttcttttttaaaggggtctgttctgcagtggagaagacattctggtgaccagacttttgcttaccttttcctattctgttgccaatttttgttttccccacattctatagccataaacctgaagatgagtaaaactggtgggtctttaataaaacaacaacaaaaacagcagtttgtgatatagcagaggtttaaatgtaccctccccttttatgcacttcaaataattaaatctctttaagaatga

SEQ ID NO: 414351 - DNA, 6634 bp, Homo sapiens
  misc_feature (12)..(12): n is a, c, g, or t
  misc_feature (30)..(30): n is a, c, g, or t
  misc_feature (337)..(337): n is a, c, g, or t
ttcagtctgttnaaggataccccgttgtgnatttctacctgtatgaccagagacacctcaaattcaaaatgtccagaaatgaacacagtatcttcttcccttgagtaactcgccttctgtatataattggggtgaatgttccagcaatgccaacgggctagcatctactcaggcaggtacgccagacatctgaatcttaatacctcgtcgtcccccctcaatctgtcactatgtcctaattttatttcctacctttgcatcccttcctcataattatcagcaccactgccttaatttagatcctatcattccttgtctggattatttcaagtctttngcccctctcaagtctgacctcgtcatagactgtttgtggatgattattttccctgcaacatctccacctcccaatagtctccatcacttattagccatgtgaattatggcaaattgcttaacctacctatgcctcactttccttattgtaaagtggaaataagagtacctatctcatagggttgtgtgattaatcatgcgatgcaattagaacagtgcctaggatatgaaagtgccccaaaatgttacgttattattattattactactattgccttctcatgaacatgctatgtgtatgttcaagctgttatctctactggaaaatccttctccgtttccaatactctttccaaaaccccctcctgggttttactgcacctaccattgtgtactgacgtgattgaatgattggcttatgggactgatcctttctaccagacttaacttcttcagggcaggaactctgatacatagtaaatggtcaataaaagttggctcaactgaaaccctaaggataaactccatccacagcggaaggcgcggccccgcccgattcgggggcggggcggggagccgcgcgcggagggtgggtcgatgggggtggggtgggactctttttcctcgccgtggcggcggaggcgcacggcgtgggcttgcggcgagacgtcgtcgtcggaggctgaaaaagcccaaggtgctgccgttgcccgtacaactcggacttgctgttgctcgagccgcgtctgcacgggtctcggaccgagcggagctcgcagcctcggtcccggagcccaccttcgcctcgcccttgcccagcctgcggtgatggaggcggccaccacactgcacccaggcccgcgcccggcgctgcccctcgggggcccgggcccgctgggcgagttcctgcctccacccgagtgcccggtcttcgaacccagctgggaagagttcgcggaccccttcgctttcatccacaagatccggcccatagccgagcagactggcatctgtaaggtgcggccgccgccggattggcagccaccatttgcatgtgatgttgataaacttcattttacgccacgtatccagagactgaatgaattggaggcccaaactcgtgtaaaattgaatttcttggaccagattgcaaagtactgggagttacagggaagtactctgaaaattccacatgtggagaggaagatcttggacttatttcagcttaataagttagttgcagaagaaggtggatttgcagttgtttgcaaggatagaaaatggaccaaaattgctaccaagatggggtttgctcctggcaaagcagtgggctcacatatcagagggcattatgaacgaattctcaacccctacaacttattcctgtccggagacagcctaaggtgtttgcagaagccaaacctgaccacagacactaaggacaaggagtacaaaccccatgatattccccagaggcagtctgtgcagccttcggaaacgtgccccccagcccgacgagcaaaacgcatgagagcagaggccatgaatattaaaatagaacccgaggagacaacagaagccagaactcataatctgagacgtcgaatgggttgtccaactccaaaatgtgaaaatgagaaagaaatgaagagtagcatcaagcaagaacctattgagaggaaagattatattgtagaaaatgagaaggaaaagcccaagagtcgatctaaaaaagccaccaatgctgtggacctgtatgtctgtcttttatgtggcagtggcaatgatgaagaccggctactgttgtgtgatggctgtgatgacagttaccataccttttgcttgatcccacctctccatgatgttcccaagggagactggaggtgtcctaagtgtttggctcaggaatgtagtaagccacaagaagcatttggctttgaacaagcagccagggactataccctccgtacttttggggaaatggcagatgcgttcaaatctgattacttcaacatgccagtccatatggtccccacagagcttgttgagaaagaattttggagactagtaagcactattgaggaggatgtcacagtggaatatggagctgacattgcctcaaaggaatttggcagtggctttcctgtccgagatgggaaaatcaaactctcacctgaggaagaggagtatcttgatagtggctggaatttgaacaacatgccagtgatggagcagtctgtccttgcacatattactgctgatatatgtggcatgaaacttccttggttgtatgtgggaatgtgcttttcttcattctgttggcacattgaagaccactggagctattcaattaactacttgcactggggtgagccaaaaacctggtatggagtcccagggtatgctgctgagcagctagaaaatgtaatgaagaaactagctccagaactctttgtgtcccagccggatctcctccatcagcttgtgaccatcatgaaccccaataccctgatgactcatgaagtgcctgtttaccgaactaatcagtgtgctggggagtttgtgattacatttccaagagcctaccacagtggttttaaccagggttttaattttgctgaggctgttaacttctgcactgttgattggctgccattaggccgacagtgtgtggagcattatcgcttgcttcatcgatattgtgtgttttcccatgatgagatgatctgcaagatggcttccaaggctgatgtattagatgttgtagtggcttcaactgttcagaaagacatggccattatgattgaggatgagaaagctttaagagaaactgtccgtaaattgggagtgattgattcggaaagaatggattttgagctgttgccagatgatgaacgtcagtgtgtaaaatgcaaaactacatgcttcatgtctgccatctcctgttcttgtaaacctggccttcttgtttgcctgcatcatgtaaaagaattgtgttcctgtcctccttataaatataaattgcggtataggtacacgctggatgatctctaccctatgatgaatgcattgaagcttcgagcagaatcttacaacgaatgggccttgaatgtgaatgaagctttggaggcaaagatcaacaagaagaaaagccttgtcagcttcaaggctttaattgaagaatctgaaatgaagaaattcccagacaatgatcttttgcgacaccttcgcctagtcacacaggatgcagagaagtgtgcctctgttgcgcagcagttgcttaatggcaaaaggcaaactagatatcgatctggtggagggaaatcccaaaatcagttgacagtgaatgagctccggcagtttgtaacacagctgtatgctcttccatgtgtcctcagtcagacaccattactaaaggatctcttgaatcgtgtagaagattttcaacagcatagtcagaaactactctctgaggaaacgcctagtgctgcggagctgcaggacttgctagatgtcagctttgaatttgatgttgaacttccacagcttgctgagatgcgtatccgtttggaacaagcccgttggctagaagaggtgcagcaagcttgcctagaccccagctcccttactttagatgatatgagacgtctcatagacctaggggtagggctggccccgtattcagcagtggagaaagctatggcccggctgcaggaactgctcacagtgtcagagcactgggacgacaaagccaagagtctcctcaaggccaggccacgacattcattgaatagccttgctacggcagtaaaggaaatcgaagagatccctgcatatctgcccaatggtgcggctctgaaagactcagtgcagagagccagagactggcttcaggatgtagagggcctgcaggctggaggacgtgtgccagtgttagacacactcatagaacttgttacacgaggccgatctatcccggtacatctgaattctttgccaagactggaaaccctagtagctgaggttcaggcttggaaagaatgtgctgttaatacattcttgactgagaattctccatattctctcttagaggtgctgtgtcctcgatgtgatattggccttttgggattgaaaaggaagcagagaaagttaaaggagcccttgccaaatggaaagaaaaaaagcaccaaattagagagtctgagtgacctggagagagctttaactgaaagcaaggagactgcttcagctatggcaactcttggggaagctcgcctaagggaaatggaagccttgcagtctctcagactcgccaatgaagggaaattgctgtcgcctctccaagatgtggatataaaaatctgcctatgtcagaaggccccagctgcccctatgattcaatgtgaactctgcagggatgctttccacaccagttgtgtggcggtacccagtatttcacagggcctgcgaatctggctttgtccccattgtcggaggtcagagaaacctccattagagaaaattctgcccctgctcgcctcccttcagcgtatccgagttcgccttcctgagggagatgcacttcgatatatgattgaaagaaccgtgaactggcagcacagagcccagcaactgctttcgtcagggaatcttaaatttgtgcaagatcgagtgggctcaggactgttatatagcagatggcaagcctcagcaggacaggtgtcagacacaaacaaggtatctcaacctcctggcacaacatcattttctttgcctgatgactgggacaacagaacctcatatttgcactcccccttctcaactggacgaagttgtatccccctccatggtgttagtccagaagtgaatgaactattgatggaagcccagctgctccaggtatcccttcctgaaattcaggaactttaccagactttacttgcaaagccaagccctgctcagcagactgaccgaagctcaccagtgagacccagcagtgagaagaatgactgttgccgagggaagcgagatggaattaacagtcttgagagaaaactgaagagacgcctggaaagagagggcctctccagtgagcggtgggaacgagttaagaaaatgcggacccccaaaaagaagaaaatcaaactgagccaccccaaggacatgaacaatttcaagttagagagagagcgtagctatgaattagttcgttctgctgaaactcattccctgccctcagacacatcctattccgaacaggaagactctgaggatgaagatgccatctgcccagctgtgagctgcctgcagccagaaggagatgaggtggactgggtccagtgtgatggcagctgcaatcagtggtttcatcaggtctgtgttggtgtctccccagagatggcagagaaagaagactacatctgtgtgcgctgtactgtgaaggacgcaccaagccgaaagtaaaaacacaaaaacagatacccccctacttaatgtaattcaggactccaaccaagaggatttcttcaaatctcagcaaagctacaggactggtactcaagccagcctgtaaacggtgctatttctattccttatgggatcatttttccaggactctttgaagaaaagaaaaaacaactaaaaaaatttttgacactttttgtattttttccttaagagctatttgtggttgttgaggtttgaaaagctgactgttttttttgcaggggttcccaccaatttggaaggcattgaagcttgcaccttttcatgtacagcattaaaattttacctctctctgggatttaccagcttaagagtccaactcacttccagtgcccaaaagggcacccaccagaaattccagtaaatcctcatttgaggaagctctcccttgtttactctgttaccacattggggaaatttttaagtttttcactttgggagtttttgtttgtttcttcttttcctttatccacttttcttcttcctggtagactaggtttatttatctgagcaataacttctatgttggtttcagtggctggaattaaaacaaaacaaaacaaacttccaaacagtgtgttggtgctttagcgattgattgatgtacagaacacaaatgtctagtttctagtgtcactgatgaactagtgatgtagaaaagagacttctctgtaagtaattgccacagctgtattttggctttctccctgtcccttcctttctcccctattttttggtagcttgtatcaaatgttacagtttatattgtggaataaatccttcgtcctaacat

SEQ ID NO: 414352 - DNA, 7732 bp, Homo sapiens
  misc_feature (12)..(12): n is a, c, g, or t
  misc_feature (30)..(30): n is a, c, g, or t
  misc_feature (337)..(337): n is a, c, g, or t
ttcagtctgttnaaggataccccgttgtgnatttctacctgtatgaccagagacacctcaaattcaaaatgtccagaaatgaacacagtatcttcttcccttgagtaactcgccttctgtatataattggggtgaatgttccagcaatgccaacgggctagcatctactcaggcaggtacgccagacatctgaatcttaatacctcgtcgtcccccctcaatctgtcactatgtcctaattttatttcctacctttgcatcccttcctcataattatcagcaccactgccttaatttagatcctatcattccttgtctggattatttcaagtctttngcccctctcaagtctgacctcgtcatagactgtttgtggatgattattttccctgcaacatctccacctcccaatagtctccatcacttattagccatgtgaattatggcaaattgcttaacctacctatgcctcactttccttattgtaaagtggaaataagagtacctatctcatagggttgtgtgattaatcatgcgatgcaattagaacagtgcctaggatatgaaagtgccccaaaatgttacgttattattattattactactattgccttctcatgaacatgctatgtgtatgttcaagctgttatctctactggaaaatccttctccgtttccaatactctttccaaaaccccctcctgggttttactgcacctaccattgtgtactgacgtgattgaatgattggcttatgggactgatcctttctaccagacttaacttcttcagggcaggaactctgatacatagtaaatggtcaataaaagttggctcaactgaaaccctaaggataaactccatccacagcggaaggcgcggccccgcccgattcgggggcggggcggggagccgcgcgcggagggtgggtcgatgggggtggggtgggactctttttcctcgccgtggcggcggaggcgcacggcgtgggcttgcggcgagacgtcgtcgtcggaggctgaaaaagcccaaggtgctgccgttgcccgtacaactcggacttgctgttgctcgagccgcgtctgcacgggtctcggaccgagcggagctcgcagcctcggtcccggagcccaccttcgcctcgcccttgcccagcctgcggtgatggaggcggccaccacactgcacccaggcccgcgcccggcgctgcccctcgggggcccgggcccgctgggcgagttcctgcctccacccgagtgcccggtcttcgaacccagctgggaagagttcgcggaccccttcgctttcatccacaagatccggcccatagccgagcagactggcatctgtaaggtgcggccgccgccggattggcagccaccatttgcatgtgatgttgataaacttcattttacgccacgtatccagagactgaatgaattggaggcccaaactcgtgtaaaattgaatttcttggaccagattgcaaagtactgggagttacagggaagtactctgaaaattccacatgtggagaggaagatcttggacttatttcagcttaataagttagttgcagaagaaggtggatttgcagttgtttgcaaggatagaaaatggaccaaaattgctaccaagatggggtttgctcctggcaaagcagtgggctcacatatcagagggcattatgaacgaattctcaacccctacaacttattcctgtccggagacagcctaaggtgtttgcagaagccaaacctgaccacagacactaaggacaaggagtacaaaccccatgatattccccagaggcagtctgtgcagccttcggaaacgtgccccccagcccgacgagcaaaacgcatgagagcagaggccatgaatattaaaatagaacccgaggagacaacagaagccagaactcataatctgagacgtcgaatgggttgtccaactccaaaatgtgaaaatgagaaagaaatgaagagtagcatcaagcaagaacctattgagaggaaagattatattgtagaaaatgagaaggaaaagcccaagagtcgatctaaaaaagccaccaatgctgtggacctgtatgtctgtcttttatgtggcagtggcaatgatgaagaccggctactgttgtgtgatggctgtgatgacagttaccataccttttgcttgatcccacctctccatgatgttcccaagggagactggaggtgtcctaagtgtttggctcaggaatgtagtaagccacaagaagcatttggctttgaacaagcagccagggactataccctccgtacttttggggaaatggcagatgcgttcaaatctgattacttcaacatgccagtccatatggtccccacagagcttgttgagaaagaattttggagactagtaagcactattgaggaggatgtcacagtggaatatggagctgacattgcctcaaaggaatttggcagtggctttcctgtccgagatgggaaaatcaaactctcacctgaggaagaggagtatcttgatagtggctggaatttgaacaacatgccagtgatggagcagtctgtccttgcacatattactgctgatatatgtggcatgaaacttccttggttgtatgtgggaatgtgcttttcttcattctgttggcacattgaagaccactggagctattcaattaactacttgcactggggtgagccaaaaacctggtatggagtcccagggtatgctgctgagcagctagaaaatgtaatgaagaaactagctccagaactctttgtgtcccagccggatctcctccatcagcttgtgaccatcatgaaccccaataccctgatgactcatgaagtgcctgtttaccgaactaatcagtgtgctggggagtttgtgattacatttccaagagcctaccacagtggttttaaccagggttttaattttgctgaggctgttaacttctgcactgttgattggctgccattaggccgacagtgtgtggagcattatcgcttgcttcatcgatattgtgtgttttcccatgatgagatgatctgcaagatggcttccaaggctgatgtattagatgttgtagtggcttcaactgttcagaaagacatggccattatgattgaggatgagaaagctttaagagaaactgtccgtaaattgggagtgattgattcggaaagaatggattttgagctgttgccagatgatgaacgtcagtgtgtaaaatgcaaaactacatgcttcatgtctgccatctcctgttcttgtaaacctggccttcttgtttgcctgcatcatgtaaaagaattgtgttcctgtcctccttataaatataaattgcggtataggtacacgctggatgatctctaccctatgatgaatgcattgaagcttcgagcagaatcttacaacgaatgggccttgaatgtgaatgaagctttggaggcaaagatcaacaagaagaaaagccttgtcagcttcaaggctttaattgaagaatctgaaatgaagaaattcccagacaatgatcttttgcgacaccttcgcctagtcacacaggatgcagagaagtgtgcctctgttgcgcagcagttgcttaatggcaaaaggcaaactagatatcgatctggtggagggaaatcccaaaatcagttgacagtgaatgagctccggcagtttgtaacacagctgtatgctcttccatgtgtcctcagtcagacaccattactaaaggatctcttgaatcgtgtagaagattttcaacagcatagtcagaaactactctctgaggaaacgcctagtgctgcggagctgcaggacttgctagatgtcagctttgaatttgatgttgaacttccacagcttgctgagatgcgtatccgtttggaacaagcccgttggctagaagaggtgcagcaagcttgcctagaccccagctcccttactttagatgatatgagacgtctcatagacctaggggtagggctggccccgtattcagcagtggagaaagctatggcccggctgcaggaactgctcacagtgtcagagcactgggacgacaaagccaagagtctcctcaaggccaggccacgacattcattgaatagccttgctacggcagtaaaggaaatcgaagagatccctgcatatctgcccaatggtgcggctctgaaagactcagtgcagagagccagagactggcttcaggatgtagagggcctgcaggctggaggacgtgtgccagtgttagacacactcatagaacttgttacacgaggccgatctatcccggtacatctgaattctttgccaagactggaaaccctagtagctgaggttcaggcttggaaagaatgtgctgttaatacattcttgactgagaattctccatattctctcttagaggtgctgtgtcctcgatgtgatattggccttttgggattgaaaaggaagcagagaaagttaaaggagcccttgccaaatggaaagaaaaaaagcaccaaattagagagtctgagtgacctggagagagctttaactgaaagcaaggagactgcttcagctatggcaactcttggggaagctcgcctaagggaaatggaagccttgcagtctctcagactcgccaatgaagggaaattgctgtcgcctctccaagatgtggatataaaaatctgcctatgtcagaaggccccagctgcccctatgattcaatgtgaactctgcagggatgctttccacaccagttgtgtggcggtacccagtatttcacagggcctgcgaatctggctttgtccccattgtcggaggtcagagaaacctccattagagaaaattctgcccctgctcgcctcccttcagcgtatccgagttcgccttcctgagggagatgcacttcgatatatgattgaaagaaccgtgaactggcagcacagagcccagcaactgctttcgtcagggaatcttaaatttgtgcaagatcgagtgggctcaggactgttatatagcagatggcaagcctcagcaggacaggtgtcagacacaaacaaggtatctcaacctcctggcacaacatcattttctttgcctgatgactgggacaacagaacctcatatttgcactcccccttctcaactggacgaagttgtatccccctccatggtgttagtccagaagtgaatgaactattgatggaagcccagctgctccaggtatcccttcctgaaattcaggaactttaccagactttacttgcaaagccaagccctgctcagcagactgaccgaagctcaccagtgagacccagcagtgagaagaatgactgttgccgagggaagcgagatggaattaacagtcttgagagaaaactgaagagacgcctggaaagagagggcctctccagtgagcggtgggaacgagttaagaaaatgcggacccccaaaaagaagaaaatcaaactgagccaccccaaggacatgaacaatttcaagttagagagagagcgtagctatgaattagttcgttctgctgaaactcattccctgccctcagacacatcctattccgaacaggaagactctgaggatgaagatgccatctgcccagctgtgagctgcctgcagccagaaggagatgagctttcaccttcccggcgctaagaaggtgggagggatgctgatgtgatgccctttggcttacttatcacagggcagcgctgtcttaaccccaaagcagacacgacttgaagaatgactttgactcggttgctttggctagggggccagctacactcatttggcttagctgttgtgccagaggtcccagtggtgggacagtggctgttattggcaaacggcctgaatttcttgaggctggcctgcccaattttgaatccattttttcctctgaaaaccccatcttcctgctctttgtaaccaggtggactgggtccagtgtgatggcagctgcaatcagtggtttcatcaggtctgtgttggtgtctccccagagatggcagagaaagaagactacatctgtgtgcgctgtactgtgaaggacgcaccaagccgaaagtaaaaacacaaaaacagatacccccctacttaatgtaattcaggactccaaccaagaggatttcttcaaatctcagcaaagctacaggactggtactcaagccagcctgtaaacggtgctatttctattccttatgggatcatttttccaggactctttgaagaaaagaaaaaacaactaaaaaaatttttgacactttttgtattttttccttaagagctatttgtggttgttgaggtttgaaaagctgactgttttttttgcaggggttcccaccaatttggaaggcattgaagcttgcaccttttcatgtacagcattaaaattttacctctctctgggatttaccagcttaagagtccaactcacttccagtgcccaaaagggcacccaccagaaattccagtaaatcctcatttgaggaagctctcccttgtttactctgttaccacattggggaaatttttaagtttttcactttgggagtttttgtttgtttcttcttttcctttatccacttttcttcttcctggtagactaggtttatttatctgagcaataacttctatgttggtttcagtggctggaattaaaacaaaacaaaacaaacttccaaacagtgtgttggtgctttagcgattgattgatgtacagaacacaaatgtctagtttctagtgtcactgatgaactagtgatgtagaaaagagacttctctgtaagtaattgccacagctgtattttggctttctccctgtcccttcctttctcccctattttttggtagcttgtatcaaatgttacagtttatattgtggaataaatccttcgtcctaacataacactaaatgctgattatttagagccattagagcacagcttcttctgcccctctactgttgcacagccagaaggggctgcttgcttttgcctctgcccaaccaggttgcagtagcagtggatgttagcctgcaaacaacattaggggattcttcttttgtgtcctgctctgtttggtgggccatatgcctacagccctcactaacaaagaacccctctgtcttcaaggactagaacctatctttaaagccgtgctcttttaaaataagctttctcagaatgttggcaaatcacttcaatcctcaaatcagtcttccttgtggaatgctgcctttattatatttgaattgacaggggaacttggtttagggttaagacgttggaaggaaatctaaggaaaattaatcctcacagaggtccgggtttagtatatgtcttgagaggagacttgtgaattcccagactctgcctcctggtttcctttctcatttctttctaactgtagctatcattactggctgtggatagcccatagctattttccttgcttttcttttttaaaggggtctgttctgcagtggagaagacattctggtgaccagacttttgcttaccttttcctattctgttgccaatttttgttttccccacattctatagccataaacctgaagatgagtaaaactggtgggtctttaataaaacaacaacaaaaacagcagtttgtgatatagcagaggtttaaatgtaccctccccttttatgcacttcaaataattaaatctctttaagaatga

SEQ ID NO: 414353 - DNA, 4420 bp, Homo sapiens
caccgcagccttgaaatcctgggtttaagtaatcctcctgctttagtttgtcaaatagttgggactacagttgtgtgccaccatggctggctaagttctttaattttgtagagaggagatcttgcttgtgttgaccaggctggtgttaaactcctggcctcaagtgatcttcctgccttggccttgcaaattgctgggatttacaggcgtgagccactgtacccgccctaaaacatgtcaggtcttagcatttttatatttaagttcaactctaggcacttgtttaaaaaactccgtgttcagccaccaccctgcaaaaatcaaatcaacaaatttgttaataatttaaagcattgcaaacatttgtaagttacatttctagacaagaactgacaaaaccagtctcctctgaatttcataccagtagtaataaacataatgattacagaaaatatgacttttttcttcattcctaggccttgtcagcttcaaggctttaattgaagaatctgaaatgaagaaattcccagacaatgatcttttgcgacaccttcgcctagtcacacaggatgcagagaagtgtgcctctgttgcgcagcagttgcttaatggcaaaaggcaaactagatatcgatctggtggagggaaatcccaaaatcagttgacagtgaatgagctccggcagtttgtaacacagctgtatgctcttccatgtgtcctcagtcagacaccattactaaaggatctcttgaatcgtgtagaagattttcaacagcatagtcagaaactactctctgaggaaacgcctagtgctgcggagctgcaggacttgctagatgtcagctttgaatttgatgttgaacttccacagcttgctgagatgcgtatccgtttggaacaagcccgttggctagaagaggtgcagcaagcttgcctagaccccagctcccttactttagatgatatgagacgtctcatagacctaggggtagggctggccccgtattcagcagtggagaaagctatggcccggctgcaggaactgctcacagtgtcagagcactgggacgacaaagccaagagtctcctcaaggccaggccacgacattcattgaatagccttgctacggcagtaaaggaaatcgaagagatccctgcatatctgcccaatggtgcggctctgaaagactcagtgcagagagccagagactggcttcaggatgtagagggcctgcaggctggaggacgtgtgccagtgttagacacactcatagaacttgttacacgaggccgatctatcccggtacatctgaattctttgccaagactggaaaccctagtagctgaggttcaggcttggaaagaatgtgctgttaatacattcttgactgagaattctccatattctctcttagaggtgctgtgtcctcgatgtgatattggccttttgggattgaaaaggaagcagagaaagttaaaggagcccttgccaaatggaaagaaaaaaagcaccaaattagagagtctgagtgacctggagagagctttaactgaaagcaaggagactgcttcagctatggcaactcttggggaagctcgcctaagggaaatggaagccttgcagtctctcagactcgccaatgaagggaaattgctgtcgcctctccaagatgtggatataaaaatctgcctatgtcagaaggccccagctgcccctatgattcaatgtgaactctgcagggatgctttccacaccagttgtgtggcggtacccagtatttcacagggcctgcgaatctggctttgtccccattgtcggaggtcagagaaacctccattagagaaaattctgcccctgctcgcctcccttcagcgtatccgagttcgccttcctgagggagatgcacttcgatatatgattgaaagaaccgtgaactggcagcacagagcccagcaactgctttcgtcagggaatcttaaatttgtgcaagatcgagtgggctcaggactgttatatagcagatggcaagcctcagcaggacaggtgtcagacacaaacaaggtatctcaacctcctggcacaacatcattttctttgcctgatgactgggacaacagaacctcatatttgcactcccccttctcaactggacgaagttgtatccccctccatggtgttagtccagaagtgaatgaactattgatggaagcccagctgctccaggtatcccttcctgaaattcaggaactttaccagactttacttgcaaagccaagccctgctcagcagactgaccgaagctcaccagtgagacccagcagtgagaagaatgactgttgccgagggaagcgagatggaattaacagtcttgagagaaaactgaagagacgcctggaaagagagggcctctccagtgagcggtgggaacgagttaagaaaatgcggacccccaaaaagaagaaaatcaaactgagccaccccaaggacatgaacaatttcaagttagagagagagcgtagctatgaattagttcgttctgctgaaactcattccctgccctcagacacatcctattccgaacaggaagactctgaggatgaagatgccatctgcccagctgtgagctgcctgcagccagaaggagatgaggtggactgggtccagtgtgatggcagctgcaatcagtggtttcatcaggtctgtgttggtgtctccccagagatggcagagaaagaagactacatctgtgtgcgctgtactgtgaaggacgcaccaagccgaaagtaaaaacacaaaaacagatacccccctacttaatgtaattcaggactccaaccaagaggatttcttcaaatctcagcaaagctacaggactggtactcaagccagcctgtaaacggtgctatttctattccttatgggatcatttttccaggactctttgaagaaaagaaaaaacaactaaaaaaatttttgacactttttgtattttttccttaagagctatttgtggttgttgaggtttgaaaagctgactgttttttttgcaggggttcccaccaatttggaaggcattgaagcttgcaccttttcatgtacagcattaaaattttacctctctctgggatttaccagcttaagagtccaactcacttccagtgcccaaaagggcacccaccagaaattccagtaaatcctcatttgaggaagctctcccttgtttactctgttaccacattggggaaatttttaagtttttcactttgggagtttttgtttgtttcttcttttcctttatccacttttcttcttcctggtagactaggtttatttatctgagcaataacttctatgttggtttcagtggctggaattaaaacaaaacaaaacaaacttccaaacagtgtgttggtgctttagcgattgattgatgtacagaacacaaatgtctagtttctagtgtcactgatgaactagtgatgtagaaaagagacttctctgtaagtaattgccacagctgtattttggctttctccctgtcccttcctttctcccctattttttggtagcttgtatcaaatgttacagtttatattgtggaataaatccttcgtcctaacataacactaaatgctgattatttagagccattagagcacagcttcttctgcccctctactgttgcacagccagaaggggctgcttgcttttgcctctgcccaaccaggttgcagtagcagtggatgttagcctgcaaacaacattaggggattcttcttttgtgtcctgctctgtttggtgggccatatgcctacagccctcactaacaaagaacccctctgtcttcaaggactagaacctatctttaaagccgtgctcttttaaaataagctttctcagaatgttggcaaatcacttcaatcctcaaatcagtcttccttgtggaatgctgcctttattatatttgaattgacaggggaacttggtttagggttaagacgttggaaggaaatctaaggaaaattaatcctcacagaggtccgggtttagtatatgtcttgagaggagacttgtgaattcccagactctgcctcctggtttcctttctcatttctttctaactgtagctatcattactggctgtggatagcccatagctattttccttgcttttcttttttaaaggggtctgttctgcagtggagaagacattctggtgaccagacttttgcttaccttttcctattctgttgccaatttttgttttccccacattctatagccataaacctgaagatgagtaaaactggtgggtctttaataaaacaacaacaaaaacagcagtttgtgatatagcagaggtttaaatgtaccctccccttttatgcacttcaaataattaaatctctttaagaatga

SEQ ID NO: 414354 - DNA, 4523 bp, Homo sapiens
  misc_feature (11)..(11): n is a, c, g, or t
tgatgcacaantgactgcactttacgtaattatcaatttggagggacagaggtgtgaatgttttacaataccaaactttaaaaaaaatctattataaaaactgcaactcatctccctaacatttttaaatggtggtattatgtttgcacaaacagattaatacattaaattaagccaagatcttaaagactggctaagttctttaattttgtagagaggagatcttgcttgtgttgaccaggctggtgttaaactcctggcctcaagtgatcttcctgccttggccttgcaaattgctgggatttacaggcgtgagccactgtacccgccctaaaacatgtcaggtcttagcatttttatatttaagttcaactctaggcacttgtttaaaaaactccgtgttcagccaccaccctgcaaaaatcaaatcaacaaatttgttaataatttaaagcattgcaaacatttgtaagttacatttctagacaagaactgacaaaaccagtctcctctgaatttcataccagtagtaataaacataatgattacagaaaatatgacttttttcttcattcctaggccttgtcagcttcaaggctttaattgaagaatctgaaatgaagaaattcccagacaatgatcttttgcgacaccttcgcctagtcacacaggatgcagagaagtgtgcctctgttgcgcagcagttgcttaatggcaaaaggcaaactagatatcgatctggtggagggaaatcccaaaatcagttgacagtgaatgagctccggcagtttgtaacacagctgtatgctcttccatgtgtcctcagtcagacaccattactaaaggatctcttgaatcgtgtagaagattttcaacagcatagtcagaaactactctctgaggaaacgcctagtgctgcggagctgcaggacttgctagatgtcagctttgaatttgatgttgaacttccacagcttgctgagatgcgtatccgtttggaacaagcccgttggctagaagaggtgcagcaagcttgcctagaccccagctcccttactttagatgatatgagacgtctcatagacctaggggtagggctggccccgtattcagcagtggagaaagctatggcccggctgcaggaactgctcacagtgtcagagcactgggacgacaaagccaagagtctcctcaaggccaggccacgacattcattgaatagccttgctacggcagtaaaggaaatcgaagagatccctgcatatctgcccaatggtgcggctctgaaagactcagtgcagagagccagagactggcttcaggatgtagagggcctgcaggctggaggacgtgtgccagtgttagacacactcatagaacttgttacacgaggccgatctatcccggtacatctgaattctttgccaagactggaaaccctagtagctgaggttcaggcttggaaagaatgtgctgttaatacattcttgactgagaattctccatattctctcttagaggtgctgtgtcctcgatgtgatattggccttttgggattgaaaaggaagcagagaaagttaaaggagcccttgccaaatggaaagaaaaaaagcaccaaattagagagtctgagtgacctggagagagctttaactgaaagcaaggagactgcttcagctatggcaactcttggggaagctcgcctaagggaaatggaagccttgcagtctctcagactcgccaatgaagggaaattgctgtcgcctctccaagatgtggatataaaaatctgcctatgtcagaaggccccagctgcccctatgattcaatgtgaactctgcagggatgctttccacaccagttgtgtggcggtacccagtatttcacagggcctgcgaatctggctttgtccccattgtcggaggtcagagaaacctccattagagaaaattctgcccctgctcgcctcccttcagcgtatccgagttcgccttcctgagggagatgcacttcgatatatgattgaaagaaccgtgaactggcagcacagagcccagcaactgctttcgtcagggaatcttaaatttgtgcaagatcgagtgggctcaggactgttatatagcagatggcaagcctcagcaggacaggtgtcagacacaaacaaggtatctcaacctcctggcacaacatcattttctttgcctgatgactgggacaacagaacctcatatttgcactcccccttctcaactggacgaagttgtatccccctccatggtgttagtccagaagtgaatgaactattgatggaagcccagctgctccaggtatcccttcctgaaattcaggaactttaccagactttacttgcaaagccaagccctgctcagcagactgaccgaagctcaccagtgagacccagcagtgagaagaatgactgttgccgagggaagcgagatggaattaacagtcttgagagaaaactgaagagacgcctggaaagagagggcctctccagtgagcggtgggaacgagttaagaaaatgcggacccccaaaaagaagaaaatcaaactgagccaccccaaggacatgaacaatttcaagttagagagagagcgtagctatgaattagttcgttctgctgaaactcattccctgccctcagacacatcctattccgaacaggaagactctgaggatgaagatgccatctgcccagctgtgagctgcctgcagccagaaggagatgaggtggactgggtccagtgtgatggcagctgcaatcagtggtttcatcaggtctgtgttggtgtctccccagagatggcagagaaagaagactacatctgtgtgcgctgtactgtgaaggacgcaccaagccgaaagtaaaaacacaaaaacagatacccccctacttaatgtaattcaggactccaaccaagaggatttcttcaaatctcagcaaagctacaggactggtactcaagccagcctgtaaacggtgctatttctattccttatgggatcatttttccaggactctttgaagaaaagaaaaaacaactaaaaaaatttttgacactttttgtattttttccttaagagctatttgtggttgttgaggtttgaaaagctgactgttttttttgcaggggttcccaccaatttggaaggcattgaagcttgcaccttttcatgtacagcattaaaattttacctctctctgggatttaccagcttaagagtccaactcacttccagtgcccaaaagggcacccaccagaaattccagtaaatcctcatttgaggaagctctcccttgtttactctgttaccacattggggaaatttttaagtttttcactttgggagtttttgtttgtttcttcttttcctttatccacttttcttcttcctggtagactaggtttatttatctgagcaataacttctatgttggtttcagtggctggaattaaaacaaaacaaaacaaacttccaaacagtgtgttggtgctttagcgattgattgatgtacagaacacaaatgtctagtttctagtgtcactgatgaactagtgatgtagaaaagagacttctctgtaagtaattgccacagctgtattttggctttctccctgtcccttcctttctcccctattttttggtagcttgtatcaaatgttacagtttatattgtggaataaatccttcgtcctaacataacactaaatgctgattatttagagccattagagcacagcttcttctgcccctctactgttgcacagccagaaggggctgcttgcttttgcctctgcccaaccaggttgcagtagcagtggatgttagcctgcaaacaacattaggggattcttcttttgtgtcctgctctgtttggtgggccatatgcctacagccctcactaacaaagaacccctctgtcttcaaggactagaacctatctttaaagccgtgctcttttaaaataagctttctcagaatgttggcaaatcacttcaatcctcaaatcagtcttccttgtggaatgctgcctttattatatttgaattgacaggggaacttggtttagggttaagacgttggaaggaaatctaaggaaaattaatcctcacagaggtccgggtttagtatatgtcttgagaggagacttgtgaattcccagactctgcctcctggtttcctttctcatttctttctaactgtagctatcattactggctgtggatagcccatagctattttccttgcttttcttttttaaaggggtctgttctgcagtggagaagacattctggtgaccagacttttgcttaccttttcctattctgttgccaatttttgttttccccacattctatagccataaacctgaagatgagtaaaactggtgggtctttaataaaacaacaacaaaaacagcagtttgtgatatagcagaggtttaaatgtaccctccccttttatgcacttcaaataattaaatctctttaagaatga

SEQ ID NO: 414355 - DNA, 6686 bp, Homo sapiens
  misc_feature (12)..(12): n is a, c, g, or t
  misc_feature (30)..(30): n is a, c, g, or t
  misc_feature (337)..(337): n is a, c, g, or t
  misc_feature (5829)..(5829): n is a, c, g, or t
ttcagtctgttnaaggataccccgttgtgnatttctacctgtatgaccagagacacctcaaattcaaaatgtccagaaatgaacacagtatcttcttcccttgagtaactcgccttctgtatataattggggtgaatgttccagcaatgccaacgggctagcatctactcaggcaggtacgccagacatctgaatcttaatacctcgtcgtcccccctcaatctgtcactatgtcctaattttatttcctacctttgcatcccttcctcataattatcagcaccactgccttaatttagatcctatcattccttgtctggattatttcaagtctttngcccctctcaagtctgacctcgtcatagactgtttgtggatgattattttccctgcaacatctccacctcccaatagtctccatcacttattagccatgtgaattatggcaaattgcttaacctacctatgcctcactttccttattgtaaagtggaaataagagtacctatctcatagggttgtgtgattaatcatgcgatgcaattagaacagtgcctaggatatgaaagtgccccaaaatgttacgttattattattattactactattgccttctcatgaacatgctatgtgtatgttcaagctgttatctctactggaaaatccttctccgtttccaatactctttccaaaaccccctcctgggttttactgcacctaccattgtgtactgacgtgattgaatgattggcttatgggactgatcctttctaccagacttaacttcttcagggcaggaactctgatacatagtaaatggtcaataaaagttggctcaactgaaaccctaaggataaactccatccacagcggaaggcgcggccccgcccgattcgggggcggggcggggagccgcgcgcggagggtgggtcgatgggggtggggtgggactctttttcctcgccgtggcggcggaggcgcacggcgtgggcttgcggcgagacgtcgtcgtcggaggctgaaaaagcccaaggtgctgccgttgcccgtacaactcggacttgctgttgctcgagccgcgtctgcacgggtctcggaccgagcggagctcgcagcctcggtcccggagcccaccttcgcctcgcccttgcccagcctgcggtgatggaggcggccaccacactgcacccaggcccgcgcccggcgctgcccctcgggggcccgggcccgctgggcgagttcctgcctccacccgagtgcccggtcttcgaacccagctgggaagagttcgcggaccccttcgctttcatccacaagatccggcccatagccgagcagactggcatctgtaaggtgcggccgccgccggattggcagccaccatttgcatgtgatgttgataaacttcattttacgccacgtatccagagactgaatgaattggaggcccaaactcgtgtaaaattgaatttcttggaccagattgcaaagtactgggagttacagggaagtactctgaaaattccacatgtggagaggaagatcttggacttatttcagcttaataagttagttgcagaagaaggtggatttgcagttgtttgcaaggatagaaaatggaccaaaattgctaccaagatggggtttgctcctggcaaagcagtgggctcacatatcagagggcattatgaacgaattctcaacccctacaacttattcctgtccggagacagcctaaggtgtttgcagaagccaaacctgaccacagacactaaggacaaggagtacaaaccccatgatattccccagaggcagtctgtgcagccttcggaaacgtgccccccagcccgacgagcaaaacgcatgagagcagaggccatgaatattaaaatagaacccgaggagacaacagaagccagaactcataatctgagacgtcgaatgggttgtccaactccaaaatgtgaaaatgagaaagaaatgaagagtagcatcaagcaagaacctattgagaggaaagattatattgtagaaaatgagaaggaaaagcccaagagtcgatctaaaaaagccaccaatgctgtggacctgtatgtctgtcttttatgtggcagtggcaatgatgaagaccggctactgttgtgtgatggctgtgatgacagttaccataccttttgcttgatcccacctctccatgatgttcccaagggagactggaggtgtcctaagtgtttggctcaggaatgtagtaagccacaagaagcatttggctttgaacaagcagccagggactataccctccgtacttttggggaaatggcagatgcgttcaaatctgattacttcaacatgccagtccatatggtccccacagagcttgttgagaaagaattttggagactagtaagcactattgaggaggatgtcacagtggaatatggagctgacattgcctcaaaggaatttggcagtggctttcctgtccgagatgggaaaatcaaactctcacctgaggaagaggagtatcttgatagtggctggaatttgaacaacatgccagtgatggagcagtctgtccttgcacatattactgctgatatatgtggcatgaaacttccttggttgtatgtgggaatgtgcttttcttcattctgttggcacattgaagaccactggagctattcaattaactacttgcactggggtgagccaaaaacctggtatggagtcccagggtatgctgctgagcagctagaaaatgtaatgaagaaactagctccagaactctttgtgtcccagccggatctcctccatcagcttgtgaccatcatgaaccccaataccctgatgactcatgaagtgcctgtttaccgaactaatcagtgtgctggggagtttgtgattacatttccaagagcctaccacagtggttttaaccagggttttaattttgctgaggctgttaacttctgcactgttgattggctgccattaggccgacagtgtgtggagcattatcgcttgcttcatcgatattgtgtgttttcccatgatgagatgatctgcaagatggcttccaaggctgatgtattagatgttgtagtggcttcaactgttcagaaagacatggccattatgattgaggatgagaaagctttaagagaaactgtccgtaaattgggagtgattgattcggaaagaatggattttgagctgttgccagatgatgaacgtcagtgtgtaaaatgcaaaactacatgcttcatgtctgccatctcctgttcttgtaaacctggccttcttgtttgcctgcatcatgtaaaagaattgtgttcctgtcctccttataaatataaattgcggtataggtacacgctggatgatctctaccctatgatgaatgcattgaagcttcgagcagaatcttacaacgaatgggccttgaatgtgaatgaagctttggaggcaaagatcaacaagaagaaaagccttgtcagcttcaaggctttaattgaagaatctgaaatgaagaaattcccagacaatgatcttttgcgacaccttcgcctagtcacacaggatgcagagaagtgtgcctctgttgcgcagcagttgcttaatggcaaaaggcaaactagatatcgatctggtggagggaaatcccaaaatcagttgacagtgaatgagctccggcagtttgtaacacagctgtatgctcttccatgtgtcctcagtcagacaccattactaaaggatctcttgaatcgtgtagaagattttcaacagcatagtcagaaactactctctgaggaaacgcctagtgctgcggagctgcaggacttgctagatgtcagctttgaatttgatgttgaacttccacagcttgctgagatgcgtatccgtttggaacaagcccgttggctagaagaggtgcagcaagcttgcctagaccccagctcccttactttagatgatatgagacgtctcatagacctaggggtagggctggccccgtattcagcagtggagaaagctatggcccggctgcaggaactgctcacagtgtcagagcactgggacgacaaagccaagagtctcctcaaggccaggccacgacattcattgaatagccttgctacggcagtaaaggaaatcgaagagatccctgcatatctgcccaatggtgcggctctgaaagactcagtgcagagagccagagactggcttcaggatgtagagggcctgcaggctggaggacgtgtgccagtgttagacacactcatagaacttgttacacgaggccgatctatcccggtacatctgaattctttgccaagactggaaaccctagtagctgaggttcaggcttggaaagaatgtgctgttaatacattcttgactgagaattctccatattctctcttagaggtgctgtgtcctcgatgtgatattggccttttgggattgaaaaggaagcagagaaagttaaaggagcccttgccaaatggaaagaaaaaaagcaccaaattagagagtctgagtgacctggagagagctttaactgaaagcaaggagactgcttcagctatggcaactcttggggaagctcgcctaagggaaatggaagccttgcagtctctcagactcgccaatgaagggaaattgctgtcgcctctccaagatgtggatataaaaatctgcctatgtcagaaggccccagctgcccctatgattcaatgtgaactctgcagggatgctttccacaccagttgtgtggcggtacccagtatttcacagggcctgcgaatctggctttgtccccattgtcggaggtcagagaaacctccattagagaaaattctgcccctgctcgcctcccttcagcgtatccgagttcgccttcctgagggagatgcacttcgatatatgattgaaagaaccgtgaactggcagcacagagcccagcaactgctttcgtcagggaatcttaaatttgtgcaagatcgagtgggctcaggactgttatatagcagatggcaagcctcagcaggacaggtgtcagacacaaacaaggtatctcaacctcctggcacaacatcattttctttgcctgatgactgggacaacagaacctcatatttgcactcccccttctcaactggacgaagttgtatccccctccatggtgttagtccagaagtgaatgaactattgatggaagcccagctgctccaggtatcccttcctgaaattcaggaactttaccagactttacttgcaaagccaagccctgctcagcagactgaccgaagctcaccagtgagacccagcagtgagaagaatgactgttgccgagggaagcgagatggaattaacagtcttgagagaaaactgaagagacgcctggaaagagagggcctctccagtgagcggtgggaacgagttaagaaaatgcggacccccaaaaagaagaaaatcaaactgagccaccccaaggacatgaacaatttcaagttagatgaaactcattccctgccctcagacacatcctattccgaacaggaagactctgaggatgaagatgccatctgcccagctgtgagctgcctgcagccagaaggagatgaggtcagtgaggtttgggccatagaggacgtgctttcccttaactcagaaaccctgtaagctagacctcatctcgctgggtctttctcctctgcttatctgctttgagctgatctgaatggattgctcagcccttcccccactgatatctgtgctcttaccatcgttcctgggtctcctcccttttcttgaagaaactcttgntcttccctttttccttttcttgctcttccagctttcaccttcccggcgctaagaaggtgggagggatgctgatgtgatgccctttggcttacttatcacagggcagcgctgtcttaaccccaaagcagacacgacttgaagaatgactttgactcggttgctttggctagggggccagctacactcatttggcttagctgttgtgccagaggtcccagtggtgggacagtggctgttattggcaaacggcctgaatttcttgaggctggcctgcccaattttgaatccattttttcctctgaaaaccccatcttcctgctctttgtaaccaggtggactgggtccagtgtgatggcagctgcaatcagtggtttcatcaggtctgtgttggtgtctccccagagatggcagagaaagaagactacatctgtgtgcgctgtactgtgaaggacgcaccaagccgaaagtaaaaacacaaaaacagatacccccctacttaatgtaattcaggactccaaccaaggatgggccagtactggcatctcaggtacaggtgacttcctgtctgtcctggggaagctcgttgttgaaactgctctctccaaatgttgagtaaggagggacctggggagcttcgatgatcagcagaccctctggggaaagtgaggcaaatactgtcacaggatccacctctgcaggaagctggattttcgttgtgaagttcttagagacaaggccaccttcttgctgtgtctcttcatgtttgccagacacctccacgtatccatctttggtattcaccatcaactcctatggcctgaagctgtgcaaaatctacacactactttaagatcccg

SEQ ID NO: 414356 - DNA, 2522 bp, Homo sapiens
tcaagaaggaagattattagtgtggttcctcaggagcctgtaggtcacaggatagacataaacacctagacagaaactattatagtagttagtcattcagggatttggtgaaaggaagactcttagtgggcacctctccatcttctggtattggttggttaattggaagggtaatcacgtctttaacattcctttttccagtgatcctttggtagcattaacagtgataggggaaggaagtatgttaaacccaaactggttgtcttatacaagactgggaggggagtggttaagatgcagtatttttttcccgtgtagattgggggatcatctgatttctaatttacatgttctctttagcttcattagttttagtaataggtgacccataggcgaaaattgaactttcctatcttccacccagtgagaagaatgactgttgccgagggaagcgagatggaattaacagtcttgagagaaaactgaagagacgcctggaaagagagggcctctccagtgagcggtgggaacgagttaagaaaatgcggacccccaaaaagaagaaaatcaaactgagccaccccaaggacatgaacaatttcaagttagagagagagcgtagctatgaattagttcgttctgctgaaactcattccctgccctcagacacatcctattccgaacaggaagactctgaggatgaagatgccatctgcccagctgtgagctgcctgcagccagaaggagatgaggtggactgggtccagtgtgatggcagctgcaatcagtggtttcatcaggtctgtgttggtgtctccccagagatggcagagaaagaagactacatctgtgtgcgctgtactgtgaaggacgcaccaagccgaaagtaaaaacacaaaaacagatacccccctacttaatgtaattcaggactccaaccaagaggatttcttcaaatctcagcaaagctacaggactggtactcaagccagcctgtaaacggtgctatttctattccttatgggatcatttttccaggactctttgaagaaaagaaaaaacaactaaaaaaatttttgacactttttgtattttttccttaagagctatttgtggttgttgaggtttgaaaagctgactgttttttttgcaggggttcccaccaatttggaaggcattgaagcttgcaccttttcatgtacagcattaaaattttacctctctctgggatttaccagcttaagagtccaactcacttccagtgcccaaaagggcacccaccagaaattccagtaaatcctcatttgaggaagctctcccttgtttactctgttaccacattggggaaatttttaagtttttcactttgggagtttttgtttgtttcttcttttcctttatccacttttcttcttcctggtagactaggtttatttatctgagcaataacttctatgttggtttcagtggctggaattaaaacaaaacaaaacaaacttccaaacagtgtgttggtgctttagcgattgattgatgtacagaacacaaatgtctagtttctagtgtcactgatgaactagtgatgtagaaaagagacttctctgtaagtaattgccacagctgtattttggctttctccctgtcccttcctttctcccctattttttggtagcttgtatcaaatgttacagtttatattgtggaataaatccttcgtcctaacataacactaaatgctgattatttagagccattagagcacagcttcttctgcccctctactgttgcacagccagaaggggctgcttgcttttgcctctgcccaaccaggttgcagtagcagtggatgttagcctgcaaacaacattaggggattcttcttttgtgtcctgctctgtttggtgggccatatgcctacagccctcactaacaaagaacccctctgtcttcaaggactagaacctatctttaaagccgtgctcttttaaaataagctttctcagaatgttggcaaatcacttcaatcctcaaatcagtcttccttgtggaatgctgcctttattatatttgaattgacaggggaacttggtttagggttaagacgttggaaggaaatctaaggaaaattaatcctcacagaggtccgggtttagtatatgtcttgagaggagacttgtgaattcccagactctgcctcctggtttcctttctcatttctttctaactgtagctatcattactggctgtggatagcccatagctattttccttgcttttcttttttaaaggggtctgttctgcagtggagaagacattctggtgaccagacttttgcttaccttttcctattctgttgccaatttttgttttccccacattctatagccataaacctgaagatgagtaaaactggtgggtctttaataaaacaacaacaaaaacagcagtttgtgatatagcagaggtttaaatgtaccctccccttttatgcacttcaaataattaaatctctttaagaatga

SEQ ID NO: 414357 - DNA, 1960 bp, Homo sapiens
  misc_feature (1)..(1): n is a, c, g, or t
  misc_feature (6)..(6): n is a, c, g, or t
  misc_feature (8)..(8): n is a, c, g, or t
  misc_feature (17)..(17): n is a, c, g, or t
  misc_feature (31)..(31): n is a, c, g, or t
ntcgtncntcagctgcnaacactctgttcantgtccttggggtggctcgagagagcgtagctatgaattagttcgttctgctgaaactcattccctgccctcagacacatcctattccgaacaggaagactctgaggatgaagatgccatctgcccagctgtgagctgcctgcagccagaaggagatgaggtggactgggtccagtgtgatggcagctgcaatcagtggtttcatcaggtctgtgttggtgtctccccagagatggcagagaaagaagactacatctgtgtgcgctgtactgtgaaggacgcaccaagccgaaagtaaaaacacaaaaacagatacccccctacttaatgtaattcaggactccaaccaagaggatttcttcaaatctcagcaaagctacaggactggtactcaagccagcctgtaaacggtgctatttctattccttatgggatcatttttccaggactctttgaagaaaagaaaaaacaactaaaaaaatttttgacactttttgtattttttccttaagagctatttgtggttgttgaggtttgaaaagctgactgttttttttgcaggggttcccaccaatttggaaggcattgaagcttgcaccttttcatgtacagcattaaaattttacctctctctgggatttaccagcttaagagtccaactcacttccagtgcccaaaagggcacccaccagaaattccagtaaatcctcatttgaggaagctctcccttgtttactctgttaccacattggggaaatttttaagtttttcactttgggagtttttgtttgtttcttcttttcctttatccacttttcttcttcctggtagactaggtttatttatctgagcaataacttctatgttggtttcagtggctggaattaaaacaaaacaaaacaaacttccaaacagtgtgttggtgctttagcgattgattgatgtacagaacacaaatgtctagtttctagtgtcactgatgaactagtgatgtagaaaagagacttctctgtaagtaattgccacagctgtattttggctttctccctgtcccttcctttctcccctattttttggtagcttgtatcaaatgttacagtttatattgtggaataaatccttcgtcctaacataacactaaatgctgattatttagagccattagagcacagcttcttctgcccctctactgttgcacagccagaaggggctgcttgcttttgcctctgcccaaccaggttgcagtagcagtggatgttagcctgcaaacaacattaggggattcttcttttgtgtcctgctctgtttggtgggccatatgcctacagccctcactaacaaagaacccctctgtcttcaaggactagaacctatctttaaagccgtgctcttttaaaataagctttctcagaatgttggcaaatcacttcaatcctcaaatcagtcttccttgtggaatgctgcctttattatatttgaattgacaggggaacttggtttagggttaagacgttggaaggaaatctaaggaaaattaatcctcacagaggtccgggtttagtatatgtcttgagaggagacttgtgaattcccagactctgcctcctggtttcctttctcatttctttctaactgtagctatcattactggctgtggatagcccatagctattttccttgcttttcttttttaaaggggtctgttctgcagtggagaagacattctggtgaccagacttttgcttaccttttcctattctgttgccaatttttgttttccccacattctatagccataaacctgaagatgagtaaaactggtgggtctttaataaaacaacaacaaaaacagcagtttgtgatatagcagaggtttaaatgtaccctccccttttatgcacttcaaataattaaatctctttaagaatga

SEQ ID NO: 414358 - DNA, 1110 bp, Homo sapiens
cagctgtgagctgcctgcagccagaaggagatgaggtggactgggtccagtgtgatggctggaattaaaacaaaacaaaacaaacttccaaacagtgtgttggtgctttagcgattgattgatgtacagaacacaaatgtctagtttctagtgtcactgatgaactagtgatgtagaaaagagacttctctgtaagtaattgccacagctgtattttggctttctccctgtcccttcctttctcccctattttttggtagcttgtatcaaatgttacagtttatattgtggaataaatccttcgtcctaacataacactaaatgctgattatttagagccattagagcacagcttcttctgcccctctactgttgcacagccagaaggggctgcttgcttttgcctctgcccaaccaggttgcagtagcagtggatgttagcctgcaaacaacattaggggattcttcttttgtgtcctgctctgtttggtgggccatatgcctacagccctcactaacaaagaacccctctgtcttcaaggactagaacctatctttaaagccgtgctcttttaaaataagctttctcagaatgttggcaaatcacttcaatcctcaaatcagtcttccttgtggaatgctgcctttattatatttgaattgacaggggaacttggtttagggttaagacgttggaaggaaatctaaggaaaattaatcctcacagaggtccgggtttagtatatgtcttgagaggagacttgtgaattcccagactctgcctcctggtttcctttctcatttctttctaactgtagctatcattactggctgtggatagcccatagctattttccttgcttttcttttttaaaggggtctgttctgcagtggagaagacattctggtgaccagacttttgcttaccttttcctattctgttgccaatttttgttttccccacattctatagccataaacctgaagatgagtaaaactggtgggtctttaataaaacaacaacaaaaacagcagtttgtgatatagcagaggtttaaatgtaccctccccttttatgcacttcaaataattaaatctctttaagaatga

SEQ ID NO: 414359 - DNA, 3761 bp, Homo sapiens
  misc_feature (12)..(12): n is a, c, g, or t
  misc_feature (30)..(30): n is a, c, g, or t
  misc_feature (337)..(337): n is a, c, g, or t
ttcagtctgttnaaggataccccgttgtgnatttctacctgtatgaccagagacacctcaaattcaaaatgtccagaaatgaacacagtatcttcttcccttgagtaactcgccttctgtatataattggggtgaatgttccagcaatgccaacgggctagcatctactcaggcaggtacgccagacatctgaatcttaatacctcgtcgtcccccctcaatctgtcactatgtcctaattttatttcctacctttgcatcccttcctcataattatcagcaccactgccttaatttagatcctatcattccttgtctggattatttcaagtctttngcccctctcaagtctgacctcgtcatagactgtttgtggatgattattttccctgcaacatctccacctcccaatagtctccatcacttattagccatgtgaattatggcaaattgcttaacctacctatgcctcactttccttattgtaaagtggaaataagagtacctatctcatagggttgtgtgattaatcatgcgatgcaattagaacagtgcctaggatatgaaagtgccccaaaatgttacgttattattattattactactattgccttctcatgaacatgctatgtgtatgttcaagctgttatctctactggaaaatccttctccgtttccaatactctttccaaaaccccctcctgggttttactgcacctaccattgtgtactgacgtgattgaatgattggcttatgggactgatcctttctaccagacttaacttcttcagggcaggaactctgatacatagtaaatggtcaataaaagttggctcaactgaaaccctaaggataaactccatccacagcggaaggcgcggccccgcccgattcgggggcggggcggggagccgcgcgcggagggtgggtcgatgggggtggggtgggactctttttcctcgccgtggcggcggaggcgcacggcgtgggcttgcggcgagacgtcgtcgtcggaggctgaaaaagcccaaggtgctgccgttgcccgtacaactcggacttgctgttgctcgagccgcgtctgcacgggtctcggaccgagcggagctcgcagcctcggtcccggagcccaccttcgcctcgcccttgcccagcctgcggtgatggaggcggccaccacactgcacccaggcccgcgcccggcgctgcccctcgggggcccgggcccgctgggcgagttcctgcctccacccgagtgcccggtcttcgaacccagctgggaagagttcgcggaccccttcgctttcatccacaagatccggcccatagccgagcagactggcatctgtaaggtgcggccgccgccggattggcagccaccatttgcatgtgatgttgataaacttcattttacgccacgtatccagagactgaatgaattggaggcccaaactcgtgtaaaattgaatttcttggaccagattgcaaagtactgggagttacagggaagtactctgaaaattccacatgtggagaggaagatcttggacttatttcagcttaataagttagttgcagaagaaggtggatttgcagttgtttgcaaggatagaaaatggaccaaaattgctaccaagatggggtttgctcctggcaaagcagtgggctcacatatcagagggcattatgaacgaattctcaacccctacaacttattcctgtccggagacagcctaaggtgtttgcagaagccaaacctgaccacagacactaaggacaaggagtacaaaccccatgatattccccagaggcagtctgtgcagccttcggaaacgtgccccccagcccgacgagcaaaacgcatgagagcagaggccatgaatattaaaatagaacccgaggagacaacagaagccagaactcataatctgagacgtcgaatgggttgtccaactccaaaatgtgaaaatgagaaagaaatgaagagtagcatcaagcaagaacctattgagaggaaagattatattgtagaaaatgagaaggaaaagcccaagagtcgatctaaaaaagccaccaatgctgtggacctgtatgtctgtcttttatgtggcagtggcaatgatgaagaccggctactgttgtgtgatggctgtgatgacagttaccataccttttgcttgatcccacctctccatgatgttcccaagggagactggaggtgtcctaagtgtttggctcaggaatgtagtaagccacaagaagcatttggctttgaacaagcagccagggactataccctccgtacttttggggaaatggcagatgcgttcaaatctgattacttcaacatgccagtccatatggtccccacagagcttgttgagaaagaattttggagactagtaagcactattgaggaggatgtcacagtggaatatggagctgacattgcctcaaaggaatttggcagtggctttcctgtccgagatgggaaaatcaaactctcacctgaggaagaggagtatcttgatagtggctggaatttgaacaacatgccagtgatggagcagtctgtccttgcacatattactgctgatatatgtggcatgaaacttccttggttgtatgtgggaatgtgcttttcttcattctgttggcacattgaagaccactggagctattcaattaactacttgcactggggtgagccaaaaacctggtatggagtcccagggtatgctgctgagcagctagaaaatgtaatgaagaaactagctccagaactctttgtgtcccagccggatctcctccatcagcttgtgaccatcatgaaccccaataccctgatgactcatgaagtgcctgtttaccgaactaatcagtgtgctggggagtttgtgattacatttccaagagcctaccacagtggttttaaccagggttttaattttgctgaggctgttaacttctgcactgttgattggctgccattaggccgacagtgtgtggagcattatcgcttgcttcatcgatattgtgtgttttcccatgatgagatgatctgcaagatggcttccaaggctgatgtattagatgttgtagtggcttcaactgttcagaaagacatggccattatgattgaggatgagaaagctttaagagaaactgtccgtaaattgggagtgattgattcggaaagaatggattttgagctgttgccagatgatgaacgtcagtgtgtaaaatgcaaaactacatgcttcatgtctgccatctcctgttcttgtaaacctggccttcttgtttgcctgcatcatgtaaaagaattgtgttcctgtcctccttataaatataaattgcggtataggtacacgctggatgatctctaccctatgatgaatgcattgaagcttcgagcagaatcttacaacgaatgggccttgaatgtgaatgaagctttggaggcaaagatcaacaagaagaaaagcacattccacatatacaaagcgcaagggaaggctacactggccgacgatgatatcgaccaagtaaatatcgtgcatggagcagacaagctcctatgactggccatgttgtcagaaacacagtcgaactagtcatgatgactcctcttcctcaggtgagaagtttgcacttacacaatctcggagaggaaagtctaagacaagattccttggcaggcattgtcagataccatattccactgtgaaatcctcctcaatagtgcttatagtctaca

SEQ ID NO: 414360 - DNA, 2496 bp, Homo sapiens
  misc_feature (12)..(12): n is a, c, g, or t
  misc_feature (30)..(30): n is a, c, g, or t
  misc_feature (337)..(337): n is a, c, g, or t
ttcagtctgttnaaggataccccgttgtgnatttctacctgtatgaccagagacacctcaaattcaaaatgtccagaaatgaacacagtatcttcttcccttgagtaactcgccttctgtatataattggggtgaatgttccagcaatgccaacgggctagcatctactcaggcaggtacgccagacatctgaatcttaatacctcgtcgtcccccctcaatctgtcactatgtcctaattttatttcctacctttgcatcccttcctcataattatcagcaccactgccttaatttagatcctatcattccttgtctggattatttcaagtctttngcccctctcaagtctgacctcgtcatagactgtttgtggatgattattttccctgcaacatctccacctcccaatagtctccatcacttattagccatgtgaattatggcaaattgcttaacctacctatgcctcactttccttattgtaaagtggaaataagagtacctatctcatagggttgtgtgattaatcatgcgatgcaattagaacagtgcctaggatatgaaagtgccccaaaatgttacgttattattattattactactattgccttctcatgaacatgctatgtgtatgttcaagctgttatctctactggaaaatccttctccgtttccaatactctttccaaaaccccctcctgggttttactgcacctaccattgtgtactgacgtgattgaatgattggcttatgggactgatcctttctaccagacttaacttcttcagggcaggaactctgatacatagtaaatggtcaataaaagttggctcaactgaaaccctaaggataaactccatccacagcggaaggcgcggccccgcccgattcgggggcggggcggggagccgcgcgcggagggtgggtcgatgggggtggggtgggactctttttcctcgccgtggcggcggaggcgcacggcgtgggcttgcggcgagacgtcgtcgtcggaggctgaaaaagcccaaggtgctgccgttgcccgtacaactcggacttgctgttgctcgagccgcgtctgcacgggtctcggaccgagcggagctcgcagcctcggtcccggagcccaccttcgcctcgcccttgcccagcctgcggtgatggaggcggccaccacactgcacccaggcccgcgcccggcgctgcccctcgggggcccgggcccgctgggcgagttcctgcctccacccgagtgcccggtcttcgaacccagctgggaagagttcgcggaccccttcgctttcatccacaagatccggcccatagccgagcagactggcatctgtaaggtgcggccgccgccggattggcagccaccatttgcatgtgatgttgataaacttcattttacgccacgtatccagagactgaatgaattggaggcccaaactcgtgtaaaattgaatttcttggaccagattgcaaagtactgggagttacagggaagtactctgaaaattccacatgtggagaggaagatcttggacttatttcagcttaataagttagttgcagaagaaggtggatttgcagttgtttgcaaggatagaaaatggaccaaaattgctaccaagatggggtttgctcctggcaaagcagtgggctcacatatcagagggcattatgaacgaattctcaacccctacaacttattcctgtccggagacagcctaaggtgtttgcagaagccaaacctgaccacagacactaaggacaaggagtacaaaccccatgatattccccagaggcagtctgtgcagccttcggaaacgtgccccccagcccgacgagcaaaacgcatgagagcagaggccatgaatattaaaatagaacccgaggagacaacagaagccagaactcataatctgagacgtcgaatgggttgtccaactccaaaatgtgaaaatgagaaagaaatgaagagtagcatcaagcaagaacctattgagaggaaagattatattgtagaaaatgagaaggaaaagcccaagagtcgatctaaaaaagccaccaatgctgtggacctgtatgtctgtcttttatgtggcagtggcaatgatgaagaccggctactgttgtgtgatggctgtgatgacagttaccataccttttgcttgatcccacctctccatgatgttcccaagggagactggaggtgtcctaagtgtttggctcaggaatgtagtaagccacaagaagcatttggctttgaacaagcagccagggactataccctccgtacttttggggaaatggcagatgcgttcaaatctgattacttcaacatgccagtccatgtatgtacatatatactgctttgatttaggattttaatagcttttggagaaaagtgtacctgaagacccatttttagttgaggcctcactctagtaggcattgtcacacagaaagcagaatgaaactttaatttg

SEQ ID NO: 414361 - DNA, 476 bp, Homo sapiens
gtgaaaaagcagacttctctttctttgggaaggttggacagttatctccagcttaaacacagagcacaatgattggtctatggcaagtgctcagtagctgcggttattatgcatgtggaagacatgtagaaatagctgagatatttggagctgctttgggacctgagtaaaagaatgttaattttttcttattttactgattaaaaatgaataattcaattggacacaccttttctagagttggtttaatgaaatttccctggatcctgttaatatcgtgtctttgagagaggaaaatatttacaaataggtgaagctgtttaaactcacagttaatacggttccaaggagtcttaaagagaaatgtgtgagagttaataggcactgttctgcaagaaaacagtgcagataattttcaacaggaatagacaatgtcatttgaaaaaaattatttgccatactgaatttcctttgaa

SEQ ID NO: 414362 - DNA, 406 bp, Homo sapiens
aaaaactccgtgttcagccaccaccctgcaaaaatcaaatcaacaaatttgttaataatttaaagcattgcaaacatttgtaagttacatttctagacaagaactgacaaaaccagtctcctctgaatttcataccagtagtaataaacataatgattacagaaaatatgacttttttcttcattcctaggccttgtcagcttcaaggctttaattgaagaatctgaaatgaagaaattcccagacaatgatcttttgcgacaccttcgcctagtcacacaggatgcagagaagtgtgcctctgttgcgcagcagttgcttaatggcaaaaggcaaactaggtatgcgcttctgactgcgtgagtttggattctttggcacctatgtttggaaacctgttgtgact

SEQ ID NO: 414363 - DNA, 7431 bp, Homo sapiens
  misc_feature (12)..(12): n is a, c, g, or t
  misc_feature (30)..(30): n is a, c, g, or t
  misc_feature (337)..(337): n is a, c, g, or t
ttcagtctgttnaaggataccccgttgtgnatttctacctgtatgaccagagacacctcaaattcaaaatgtccagaaatgaacacagtatcttcttcccttgagtaactcgccttctgtatataattggggtgaatgttccagcaatgccaacgggctagcatctactcaggcaggtacgccagacatctgaatcttaatacctcgtcgtcccccctcaatctgtcactatgtcctaattttatttcctacctttgcatcccttcctcataattatcagcaccactgccttaatttagatcctatcattccttgtctggattatttcaagtctttngcccctctcaagtctgacctcgtcatagactgtttgtggatgattattttccctgcaacatctccacctcccaatagtctccatcacttattagccatgtgaattatggcaaattgcttaacctacctatgcctcactttccttattgtaaagtggaaataagagtacctatctcatagggttgtgtgattaatcatgcgatgcaattagaacagtgcctaggatatgaaagtgccccaaaatgttacgttattattattattactactattgccttctcatgaacatgctatgtgtatgttcaagctgttatctctactggaaaatccttctccgtttccaatactctttccaaaaccccctcctgggttttactgcacctaccattgtgtactgacgtgattgaatgattggcttatgggactgatcctttctaccagacttaacttcttcagggcaggaactctgatacatagtaaatggtcaataaaagttggctcaactgaaaccctaaggataaactccatccacagcggaaggcgcggccccgcccgattcgggggcggggcggggagccgcgcgcggagggtgggtcgatgggggtggggtgggactctttttcctcgccgtggcggcggaggcgcacggcgtgggcttgcggcgagacgtcgtcgtcggaggctgaaaaagcccaaggtgctgccgttgcccgtacaactcggacttgctgttgctcgagccgcgtctgcacgggtctcggaccgagcggagctcgcagcctcggtcccggagcccaccttcgcctcgcccttgcccagcctgcggtgatggaggcggccaccacactgcacccaggcccgcgcccggcgctgcccctcgggggcccgggcccgctgggcgagttcctgcctccacccgagtgcccggtcttcgaacccagctgggaagagttcgcggaccccttcgctttcatccacaagatccggcccatagccgagcagactggcatctgtaaggtgcggccgccgccggattggcagccaccatttgcatgtgatgttgataaacttcattttacgccacgtatccagagactgaatgaattggaggcccaaactcgtgtaaaattgaatttcttggaccagattgcaaagtactgggagttacagggaagtactctgaaaattccacatgtggagaggaagatcttggacttatttcagcttaataagttagttgcagaagaaggtggatttgcagttgtttgcaaggatagaaaatggaccaaaattgctaccaagatggggtttgctcctggcaaagcagtgggctcacatatcagagggcattatgaacgaattctcaacccctacaacttattcctgtccggagacagcctaaggtgtttgcagaagccaaacctgaccacagacactaaggacaaggagtacaaaccccatgatattccccagaggcagtctgtgcagccttcggaaacgtgccccccagcccgacgagcaaaacgcatgagagcagaggccatgaatattaaaatagaacccgaggagacaacagaagccagaactcataatctgagacgtcgaatgggttgtccaactccaaaatgtgaaaatgagaaagaaatgaagagtagcatcaagcaagaacctattgagaggaaagattatattgtagaaaatgagaaggaaaagcccaagagtcgatctaaaaaagccaccaatgctgtggacctgtatgtctgtcttttatgtggcagtggcaatgatgaagaccggctactgttgtgtgatggctgtgatgacagttaccataccttttgcttgatcccacctctccatgatgttcccaagggagactggaggtgtcctaagtgtttggctcaggaatgtagtaagccacaagaagcatttggctttgaacaagcagccagggactataccctccgtacttttggggaaatggcagatgcgttcaaatctgattacttcaacatgccagtccatatggtccccacagagcttgttgagaaagaattttggagactagtaagcactattgaggaggatgtcacagtggaatatggagctgacattgcctcaaaggaatttggcagtggctttcctgtccgagatgggaaaatcaaactctcacctgaggaagaggagtatcttgatagtggctggaatttgaacaacatgccagtgatggagcagtctgtccttgcacatattactgctgatatatgtggcatgaaacttccttggttgtatgtgggaatgtgcttttcttcattctgttggcacattgaagaccactggagctattcaattaactacttgcactggggtgagccaaaaacctggtatggagtcccagggtatgctgctgagcagctagaaaatgtaatgaagaaactagctccagaactctttgtgtcccagccggatctcctccatcagcttgtgaccatcatgaaccccaataccctgatgactcatgaagtgcctgtttaccgaactaatcagtgtgctggggagtttgtgattacatttccaagagcctaccacagtggttttaaccagggttttaattttgctgaggctgttaacttctgcactgttgattggctgccattaggccgacagtgtgtggagcattatcgcttgcttcatcgatattgtgtgttttcccatgatgagatgatctgcaagatggcttccaaggctgatgtattagatgttgtagtggcttcaactgttcagaaagacatggccattatgattgaggatgagaaagctttaagagaaactgtccgtaaattgggagtgattgattcggaaagaatggattttgagctgttgccagatgatgaacgtcagtgtgtaaaatgcaaaactacatgcttcatgtctgccatctcctgttcttgtaaacctggccttcttgtttgcctgcatcatgtaaaagaattgtgttcctgtcctccttataaatataaattgcggtataggtacacgctggatgatctctaccctatgatgaatgcattgaagcttcgagcagaatcttacaacgaatgggccttgaatgtgaatgaagctttggaggcaaagatcaacaagaagaaaagccttgtcagcttcaaggctttaattgaagaatctgaaatgaagaaattcccagacaatgatcttttgcgacaccttcgcctagtcacacaggatgcagagaagtgtgcctctgttgcgcagcagttgcttaatggcaaaaggcaaactagatatcgatctggtggagggaaatcccaaaatcagttgacagtgaatgagctccggcagtttgtaacacagctgtatgctcttccatgtgtcctcagtcagacaccattactaaaggatctcttgaatcgtgtagaagattttcaacagcatagtcagaaactactctctgaggaaacgcctagtgctgcggagctgcaggacttgctagatgtcagctttgaatttgatgttgaacttccacagcttgctgagatgcgtatccgtttggaacaagcccgttggctagaagaggtgcagcaagcttgcctagaccccagctcccttactttagatgatatgagacgtctcatagacctaggggtagggctggccccgtattcagcagtggagaaagctatggcccggctgcaggaactgctcacagtgtcagagcactgggacgacaaagccaagagtctcctcaaggccaggccacgacattcattgaatagccttgctacggcagtaaaggaaatcgaagagatccctgcatatctgcccaatggtgcggctctgaaagactcagtgcagagagccagagactggcttcaggatgtagagggcctgcaggctggaggacgtgtgccagtgttagacacactcatagaacttgttacacgaggccgatctatcccggtacatctgaattctttgccaagactggaaaccctagtagctgaggttcaggcttggaaagaatgtgctgttaatacattcttgactgagaattctccatattctctcttagaggtgctgtgtcctcgatgtgatattggccttttgggattgaaaaggaagcagagaaagttaaaggagcccttgccaaatggaaagaaaaaaagcaccaaattagagagtctgagtgacctggagagagctttaactgaaagcaaggagactgcttcagctatggcaactcttggggaagctcgcctaagggaaatggaagccttgcagtctctcagactcgccaatgaagggaaattgctgtcgcctctccaagatgtggatataaaaatctgcctatgtcagaaggccccagctgcccctatgattcaatgtgaactctgcagggatgctttccacaccagttgtgtggcggtacccagtatttcacagggcctgcgaatctggctttgtccccattgtcggaggtcagagaaacctccattagagaaaattctgcccctgctcgcctcccttcagcgtatccgagttcgccttcctgagggagatgcacttcgatatatgattgaaagaaccgtgaactggcagcacagagcccagcaactgctttcgtcagggaatcttaaatttgtgcaagatcgagtgggctcaggactgttatatagcagatggcaagcctcagcaggacaggtgtcagacacaaacaaggtatctcaacctcctggcacaacatcattttctttgcctgatgactgggacaacagaacctcatatttgcactcccccttctcaactggacgaagttgtatccccctccatggtgttagtccagaagtgaatgaactattgatggaagcccagctgctccaggtatcccttcctgaaattcaggaactttaccagactttacttgcaaagccaagccctgctcagcagactgaccgaagctcaccagtgagacccagcagtgagaagaatgactgttgccgagggaagcgagatggaattaacagtcttgagagaaaactgaagagacgcctggaaagagagggcctctccagtgagcggtgggaacgagttaagaaaatgcggacccccaaaaagaagaaaatcaaactgagccaccccaaggacatgaacaatttcaagttagagagagagcgtagctatgaattagttcgttctgctgaaactcattccctgccctcagacacatcctattccgaacaggaagactctgaggatgaagatgccatctgcccagctgtgagctgcctgcagccagaaggagatgaggtggactgggtccagtgtgatggcagctgcaatcagtggtttcatcaggtctgtgttggtgtctccccagagatggcagagaaagaagactacatctgtgtgcgctgtactgtgaaggacgcaccaagccgaaagtaaaaacacaaaaacagatacccccctacttaatgtaattcaggactccaaccaagaggatttcttcaaatctcagcaaagctacaggactggtactcaagccagcctgtaaacggtgctatttctattccttatgggatcatttttccaggactctttgaagaaaagaaaaaacaactaaaaaaatttttgacactttttgtattttttccttaagagctatttgtggttgttgaggtttgaaaagctgactgttttttttgcaggggttcccaccaatttggaaggcattgaagcttgcaccttttcatgtacagcattaaaattttacctctctctgggatttaccagcttaagagtccaactcacttccagtgcccaaaagggcacccaccagaaattccagtaaatcctcatttgaggaagctctcccttgtttactctgttaccacattggggaaatttttaagtttttcactttgggagtttttgtttgtttcttcttttcctttatccacttttcttcttcctggtagactaggtttatttatctgagcaataacttctatgttggtttcagtggctggaattaaaacaaaacaaaacaaacttccaaacagtgtgttggtgctttagcgattgattgatgtacagaacacaaatgtctagtttctagtgtcactgatgaactagtgatgtagaaaagagacttctctgtaagtaattgccacagctgtattttggctttctccctgtcccttcctttctcccctattttttggtagcttgtatcaaatgttacagtttatattgtggaataaatccttcgtcctaacataacactaaatgctgattatttagagccattagagcacagcttcttctgcccctctactgttgcacagccagaaggggctgcttgcttttgcctctgcccaaccaggttgcagtagcagtggatgttagcctgcaaacaacattaggggattcttcttttgtgtcctgctctgtttggtgggccatatgcctacagccctcactaacaaagaacccctctgtcttcaaggactagaacctatctttaaagccgtgctcttttaaaataagctttctcagaatgttggcaaatcacttcaatcctcaaatcagtcttccttgtggaatgctgcctttattatatttgaattgacaggggaacttggtttagggttaagacgttggaaggaaatctaaggaaaattaatcctcacagaggtccgggtttagtatatgtcttgagaggagacttgtgaattcccagactctgcctcctggtttcctttctcatttctttctaactgtagctatcattactggctgtggatagcccatagctattttccttgcttttcttttttaaaggggtctgttctgcagtggagaagacattctggtgaccagacttttgcttaccttttcctattctgttgccaatttttgttttccccacattctatagccataaacctgaagatgagtaaaactggtgggtctttaataaaacaacaacaaaaacagcagtttgtgatatagcagaggtttaaatgtaccctccccttttatgcacttcaaataattaaatctctttaagaatga

SEQ ID NO: 414364 - DNA, 4724 bp, Homo sapiens
accaggatgtggacgtcaaatactttgcaaggtgtgctgagcagctagaaaatgtaatgaagaaactagctccagaactctttgtgtcccagccggatctcctccatcagcttgtgaccatcatgaaccccaataccctgatgactcatgaagtgcctgtttaccgaactaatcagtgtgctggggagtttgtgattacatttccaagagcctaccacagtggttttaaccagggttttaattttgctgaggctgttaacttctgcactgttgattggctgccattaggccgacagtgtgtggagcattatcgcttgcttcatcgatattgtgtgttttcccatgatgagatgatctgcaagatggcttccaaggctgatgtattagatgttgtagtggcttcaactgttcagaaagacatggccattatgattgaggatgagaaagctttaagagaaactgtccgtaaattgggagtgattgattcggaaagaatggattttgagctgttgccagatgatgaacgtcagtgtgtaaaatgcaaaactacatgcttcatgtctgccatctcctgttcttgtaaacctggccttcttgtttgcctgcatcatgtaaaagaattgtgttcctgtcctccttataaatataaattgcggtataggtacacgctggatgatctctaccctatgatgaatgcattgaagcttcgagcagaatcttacaacgaatgggccttgaatgtgaatgaagctttggaggcaaagatcaacaagaagaaaagccttgtcagcttcaaggctttaattgaagaatctgaaatgaagaaattcccagacaatgatcttttgcgacaccttcgcctagtcacacaggatgcagagaagtgtgcctctgttgcgcagcagttgcttaatggcaaaaggcaaactagatatcgatctggtggagggaaatcccaaaatcagttgacagtgaatgagctccggcagtttgtaacacagctgtatgctcttccatgtgtcctcagtcagacaccattactaaaggatctcttgaatcgtgtagaagattttcaacagcatagtcagaaactactctctgaggaaacgcctagtgctgcggagctgcaggacttgctagatgtcagctttgaatttgatgttgaacttccacagcttgctgagatgcgtatccgtttggaacaagcccgttggctagaagaggtgcagcaagcttgcctagaccccagctcccttactttagatgatatgagacgtctcatagacctaggggtagggctggccccgtattcagcagtggagaaagctatggcccggctgcaggaactgctcacagtgtcagagcactgggacgacaaagccaagagtctcctcaaggccaggccacgacattcattgaatagccttgctacggcagtaaaggaaatcgaagagatccctgcatatctgcccaatggtgcggctctgaaagactcagtgcagagagccagagactggcttcaggatgtagagggcctgcaggctggaggacgtgtgccagtgttagacacactcatagaacttgttacacgaggccgatctatcccggtacatctgaattctttgccaagactggaaaccctagtagctgaggttcaggcttggaaagaatgtgctgttaatacattcttgactgagaattctccatattctctcttagaggtgctgtgtcctcgatgtgatattggccttttgggattgaaaaggaagcagagaaagttaaaggagcccttgccaaatggaaagaaaaaaagcaccaaattagagagtctgagtgacctggagagagctttaactgaaagcaaggagactgcttcagctatggcaactcttggggaagctcgcctaagggaaatggaagccttgcagtctctcagactcgccaatgaagggaaattgctgtcgcctctccaagatgtggatataaaaatctgcctatgtcagaaggccccagctgcccctatgattcaatgtgaactctgcagggatgctttccacaccagttgtgtggcggtacccagtatttcacagggcctgcgaatctggctttgtccccattgtcggaggtcagagaaacctccattagagaaaattctgcccctgctcgcctcccttcagcgtatccgagttcgccttcctgagggagatgcacttcgatatatgattgaaagaaccgtgaactggcagcacagagcccagcaactgctttcgtcagggaatcttaaatttgtgcaagatcgagtgggctcaggactgttatatagcagatggcaagcctcagcaggacaggtgtcagacacaaacaaggtatctcaacctcctggcacaacatcattttctttgcctgatgactgggacaacagaacctcatatttgcactcccccttctcaactggacgaagttgtatccccctccatggtgttagtccagaagtgaatgaactattgatggaagcccagctgctccaggtatcccttcctgaaattcaggaactttaccagactttacttgcaaagccaagccctgctcagcagactgaccgaagctcaccagtgagacccagcagtgagaagaatgactgttgccgagggaagcgagatggaattaacagtcttgagagaaaactgaagagacgcctggaaagagagggcctctccagtgagcggtgggaacgagttaagaaaatgcggacccccaaaaagaagaaaatcaaactgagccaccccaaggacatgaacaatttcaagttagagagagagcgtagctatgaattagttcgttctgctgaaactcattccctgccctcagacacatcctattccgaacaggaagactctgaggatgaagatgccatctgcccagctgtgagctgcctgcagccagaaggagatgaggtggactgggtccagtgtgatggcagctgcaatcagtggtttcatcaggtctgtgttggtgtctccccagagatggcagagaaagaagactacatctgtgtgcgctgtactgtgaaggacgcaccaagccgaaagtaaaaacacaaaaacagatacccccctacttaatgtaattcaggactccaaccaagaggatttcttcaaatctcagcaaagctacaggactggtactcaagccagcctgtaaacggtgctatttctattccttatgggatcatttttccaggactctttgaagaaaagaaaaaacaactaaaaaaatttttgacactttttgtattttttccttaagagctatttgtggttgttgaggtttgaaaagctgactgttttttttgcaggggttcccaccaatttggaaggcattgaagcttgcaccttttcatgtacagcattaaaattttacctctctctgggatttaccagcttaagagtccaactcacttccagtgcccaaaagggcacccaccagaaattccagtaaatcctcatttgaggaagctctcccttgtttactctgttaccacattggggaaatttttaagtttttcactttgggagtttttgtttgtttcttcttttcctttatccacttttcttcttcctggtagactaggtttatttatctgagcaataacttctatgttggtttcagtggctggaattaaaacaaaacaaaacaaacttccaaacagtgtgttggtgctttagcgattgattgatgtacagaacacaaatgtctagtttctagtgtcactgatgaactagtgatgtagaaaagagacttctctgtaagtaattgccacagctgtattttggctttctccctgtcccttcctttctcccctattttttggtagcttgtatcaaatgttacagtttatattgtggaataaatccttcgtcctaacataacactaaatgctgattatttagagccattagagcacagcttcttctgcccctctactgttgcacagccagaaggggctgcttgcttttgcctctgcccaaccaggttgcagtagcagtggatgttagcctgcaaacaacattaggggattcttcttttgtgtcctgctctgtttggtgggccatatgcctacagccctcactaacaaagaacccctctgtcttcaaggactagaacctatctttaaagccgtgctcttttaaaataagctttctcagaatgttggcaaatcacttcaatcctcaaatcagtcttccttgtggaatgctgcctttattatatttgaattgacaggggaacttggtttagggttaagacgttggaaggaaatctaaggaaaattaatcctcacagaggtccgggtttagtatatgtcttgagaggagacttgtgaattcccagactctgcctcctggtttcctttctcatttctttctaactgtagctatcattactggctgtggatagcccatagctattttccttgcttttcttttttaaaggggtctgttctgcagtggagaagacattctggtgaccagacttttgcttaccttttcctattctgttgccaatttttgttttccccacattctatagccataaacctgaagatgagtaaaactggtgggtctttaataaaacaacaacaaaaacagcagtttgtgatatagcagaggtttaaatgtaccctccccttttatgcacttcaaataattaaatctctttaagaatga

SEQ ID NO: 414365 - DNA, 6410 bp, Homo sapiens
  misc_feature (12)..(12): n is a, c, g, or t
  misc_feature (30)..(30): n is a, c, g, or t
  misc_feature (337)..(337): n is a, c, g, or t
ttcagtctgttnaaggataccccgttgtgnatttctacctgtatgaccagagacacctcaaattcaaaatgtccagaaatgaacacagtatcttcttcccttgagtaactcgccttctgtatataattggggtgaatgttccagcaatgccaacgggctagcatctactcaggcaggtacgccagacatctgaatcttaatacctcgtcgtcccccctcaatctgtcactatgtcctaattttatttcctacctttgcatcccttcctcataattatcagcaccactgccttaatttagatcctatcattccttgtctggattatttcaagtctttngcccctctcaagtctgacctcgtcatagactgtttgtggatgattattttccctgcaacatctccacctcccaatagtctccatcacttattagccatgtgaattatggcaaattgcttaacctacctatgcctcactttccttattgtaaagtggaaataagagtacctatctcatagggttgtgtgattaatcatgcgatgcaattagaacagtgcctaggatatgaaagtgccccaaaatgttacgttattattattattactactattgccttctcatgaacatgctatgtgtatgttcaagctgttatctctactggaaaatccttctccgtttccaatactctttccaaaaccccctcctgggttttactgcacctaccattgtgtactgacgtgattgaatgattggcttatgggactgatcctttctaccagacttaacttcttcagggcaggaactctgatacatagtaaatggtcaataaaagttggctcaactgaaaccctaaggataaactccatccacagcggaaggcgcggccccgcccgattcgggggcggggcggggagccgcgcgcggagggtgggtcgatgggggtggggtgggactctttttcctcgccgtggcggcggaggcgcacggcgtgggcttgcggcgagacgtcgtcgtcggaggctgaaaaagcccaaggtgctgccgttgcccgtacaactcggacttgctgttgctcgagccgcgtctgcacgggtctcggaccgagcggagctcgcagcctcggtcccggagcccaccttcgcctcgcccttgcccagcctgcggtgatggaggcggccaccacactgcacccaggcccgcgcccggcgctgcccctcgggggcccgggcccgctgggcgagttcctgcctccacccgagtgcccggtcttcgaacccagctgggaagagttcgcggaccccttcgctttcatccacaagatccggcccatagccgagcagactggcatctgtaaggtgcggccgccgccggattggcagccaccatttgcatgtgatgttgataaacttcattttacgccacgtatccagagactgaatgaattggaggcccaaactcgtgtaaaattgaatttcttggaccagattgcaaagtactgggagttacagggaagtactctgaaaattccacatgtggagaggaagatcttggacttatttcagcttaataagttagttgcagaagaaggtggatttgcagttgtttgcaaggatagaaaatggaccaaaattgctaccaagatggggtttgctcctggcaaagcagtgggctcacatatcagagggcattatgaacgaattctcaacccctacaacttattcctgtccggagacagcctaaggtgtttgcagaagccaaacctgaccacagacactaaggacaaggagtacaaaccccatgatattccccagaggcagtctgtgcagccttcggaaacgtgccccccagcccgacgagcaaaacgcatgagagcagaggccatgaatattaaaatagaacccgaggagacaacagaagccagaactcataatctgagacgtcgaatgggttgtccaactccaaaatgtgaaaatgagaaagaaatgaagagtagcatcaagcaagaacctattgagaggaaagattatattgtagaaaatgagaaggaaaagcccaagagtcgatctaaaaaagccaccaatgctgtggacctgtatgtctgtcttttatgtggcagtggcaatgatgaagaccggctactgttgtgtgatggctgtgatgacagttaccataccttttgcttgatcccacctctccatgatgttcccaagggagactggaggtgtcctaagtgtttggctcaggaatgtagtaagccacaagaagcatttggctttgaacaagcagccagggactataccctccgtacttttggggaaatggcagatgcgttcaaatctgattacttcaacatgccagtccatatggtccccacagagcttgttgagaaagaattttggagactagtaagcactattgaggaggatgtcacagtggaatatggagctgacattgcctcaaaggaatttggcagtggctttcctgtccgagatgggaaaatcaaactctcacctgaggaagaggagtatcttgatagtggctggaatttgaacaacatgccagtgatggagcagtctgtccttgcacatattactgctgatatatgtggcatgaaacttccttggttgtatgtgggaatgtgcttttcttcattctgttggcacattgaagaccactggagctattcaattaactacttgcactggggtgagccaaaaacctggtatggagtcccagggtatgctgctgagcagctagaaaatgtaatgaagaaactagctccagaactctttgtgtcccagccggatctcctccatcagcttgtgaccatcatgaaccccaataccctgatgactcatgaagtgcctgtttaccgaactaatcagtgtgctggggagtttgtgattacatttccaagagcctaccacagtggttttaaccagggttttaattttgctgaggctgttaacttctgcactgttgattggctgccattaggccgacagtgtgtggagcattatcgcttgcttcatcgatattgtgtgttttcccatgatgagatgatctgcaagatggcttccaaggctgatgtattagatgttgtagtggcttcaactgttcagaaagacatggccattatgattgaggatgagaaagctttaagagaaactgtccgtaaattgggagtgattgattcggaaagaatggattttgagctgttgccagatgatgaacgtcagtgtgtaaaatgcaaaactacatgcttcatgtctgccatctcctgttcttgtaaacctggccttcttgtttgcctgcatcatgtaaaagaattgtgttcctgtcctccttataaatataaattgcggtataggtacacgctggatgatctctaccctatgatgaatgcattgaagcttcgagcagaatcttacaacgaatgggccttgaatgtgaatgaagctttggaggcaaagatcaacaagaagaaaagccttgtcagcttcaaggctttaattgaagaatctgaaatgaagaaattcccagacaatgatcttttgcgacaccttcgcctagtcacacaggatgcagagaagtgtgcctctgttgcgcagcagttgcttaatggcaaaaggcaaactagatatcgatctggtggagggaaatcccaaaatcagttgacagtgaatgagctccggcagtttgtaacacagctgtatgctcttccatgtgtcctcagtcagacaccattactaaaggatctcttgaatcgtgtagaagattttcaacagcatagtcagaaactactctctgaggaaacgcctagtgctgcggagctgcaggacttgctagatgtcagctttgaatttgatgttgaacttccacagcttgctgagatgcgtatccgtttggaacaagcccgttggctagaagaggtgcagcaagcttgcctagaccccagctcccttactttagatgatatgagacgtctcatagacctaggggtagggctggccccgtattcagcagtggagaaagctatggcccggctgcaggaactgctcacagtgtcagagcactgggacgacaaagccaagagtctcctcaaggccaggccacgacattcattgaatagccttgctacggcagtaaaggaaatcgaagagatccctgcatatctgcccaatggtgcggctctgaaagactcagtgcagagagccagagactggcttcaggatgtagagggcctgcaggctggaggacgtgtgccagtgttagacacactcatagaacttgttacacgaggccgatctatcccggtacatctgaattctttgccaagactggaaaccctagtagctgaggttcaggcttggaaagaatgtgctgttaatacattcttgactgagaattctccatattctctcttagaggtgctgtgtcctcgatgtgatattggccttttgggattgaaaaggaagcagagaaagttaaaggagcccttgccaaatggaaagaaaaaaagcaccaaattagagagtctgagtgacctggagagagctttaactgaaagcaaggagactgcttcagctatggcaactcttggggaagctcgcctaagggaaatggaagccttgcagtctctcagactcgccaatgaagggaaattgctgtcgcctctccaagatgtggatataaaaatctgcctatgtcagaaggccccagctgcccctatgattcaatgtgaactctgcagggatgctttccacaccagttgtgtggcggtacccagtatttcacagggcctgcgaatctggctttgtccccattgtcggaggtcagagaaacctccattagagaaaattctgcccctgctcgcctcccttcagcgtatccgagttcgccttcctgagggagatgcacttcgatatatgattgaaagaaccgtgaactggcagcacagagcccagcaactgctttcgtcagggaatcttaaatttgtgcaagatcgagtgggctcaggactgttatatagcagatggcaagcctcagcaggacaggtgtcagacacaaacaaggtatctcaacctcctggcacaacatcattttctttgcctgatgactgggacaacagaacctcatatttgcactcccccttctcaactggacgaagttgtatccccctccatggtgttagtccagaagtgaatgaactattgatggaagcccagctgctccaggtatcccttcctgaaattcaggaactttaccagactttacttgcaaagccaagccctgctcagcagactgaccgaagctcaccagtgagacccagcagtgagaagaatgactgttgccgagggaagcgagatggaattaacagtcttgagagaaaactgaagagacgcctggaaagagagggcctctccagtgagcggtgggaacgagttaagaaaatgcggacccccaaaaagaagaaaatcaaactgagccaccccaaggacatgaacaatttcaagttagagagagagcgtagctatgaattagttcgttctgctgaaactcattccctgccctcagacacatcctattccgaacaggaagactctgaggatgaagatgccatctgcccagctgtgagctgcctgcagccagaaggagatgaggtggactgggtccagtgtgatggcagctgcaatcagtggtttcatcaggtctgtgttggtgtctccccagagatggcagagaaagaagactacatctgtgtgcgctgtactgtgaaggacgcaccaagccgaaagtaaaaacacaaaaacagatacccccctacttaatgtaattcaggactccaaccaagaggatttcttcaaatctcagcaaagctacaggactggtactcaagccagcctgtaaacggtgctatttctattccttatgggatcatttttccaggactctttgaagaaaagaaaaaacaactaaaaaaatttttgacactttttgtattttttccttaagagctatttgtggttgttgaggtttgaaaagctgactgttttttttgcaggggttcccaccaatttggaaggcattgaagcttgcaccttttcatgtacagcattaaaattttacctctctctgggatttaccagcttaagagtccaactcacttccagtgcccaaaagggcacccaccagaaattccagtaaatcctcatttgaggaagctctcccttgtttactctgttaccacattggggaaatttttaagtttttcactttgggagtttttgtttgtttcttcttttcctttatccacttttcttcttcctggtagactaggtttatttatctgagcaataacttctatgttggtttcagtggctggaattaaaacaaaacaaaacaaacttcc

SEQ ID NO: 414366 - DNA, 4037 bp, Homo sapiens
agctcctaccccacgacctcctaccccaatcttacaacgaatgggccttgaatgtgaatgaagctttggaggcaaagatcaacaagaagaaaagccttgtcagcttcaaggctttaattgaagaatctgaaatgaagaaattcccagacaatgatcttttgcgacaccttcgcctagtcacacaggatgcagagaagtgtgcctctgttgcgcagcagttgcttaatggcaaaaggcaaactagatatcgatctggtggagggaaatcccaaaatcagttgacagtgaatgagctccggcagtttgtaacacagctgtatgctcttccatgtgtcctcagtcagacaccattactaaaggatctcttgaatcgtgtagaagattttcaacagcatagtcagaaactactctctgaggaaacgcctagtgctgcggagctgcaggacttgctagatgtcagctttgaatttgatgttgaacttccacagcttgctgagatgcgtatccgtttggaacaagcccgttggctagaagaggtgcagcaagcttgcctagaccccagctcccttactttagatgatatgagacgtctcatagacctaggggtagggctggccccgtattcagcagtggagaaagctatggcccggctgcaggaactgctcacagtgtcagagcactgggacgacaaagccaagagtctcctcaaggccaggccacgacattcattgaatagccttgctacggcagtaaaggaaatcgaagagatccctgcatatctgcccaatggtgcggctctgaaagactcagtgcagagagccagagactggcttcaggatgtagagggcctgcaggctggaggacgtgtgccagtgttagacacactcatagaacttgttacacgaggccgatctatcccggtacatctgaattctttgccaagactggaaaccctagtagctgaggttcaggcttggaaagaatgtgctgttaatacattcttgactgagaattctccatattctctcttagaggtgctgtgtcctcgatgtgatattggccttttgggattgaaaaggaagcagagaaagttaaaggagcccttgccaaatggaaagaaaaaaagcaccaaattagagagtctgagtgacctggagagagctttaactgaaagcaaggagactgcttcagctatggcaactcttggggaagctcgcctaagggaaatggaagccttgcagtctctcagactcgccaatgaagggaaattgctgtcgcctctccaagatgtggatataaaaatctgcctatgtcagaaggccccagctgcccctatgattcaatgtgaactctgcagggatgctttccacaccagttgtgtggcggtacccagtatttcacagggcctgcgaatctggctttgtccccattgtcggaggtcagagaaacctccattagagaaaattctgcccctgctcgcctcccttcagcgtatccgagttcgccttcctgagggagatgcacttcgatatatgattgaaagaaccgtgaactggcagcacagagcccagcaactgctttcgtcagggaatcttaaatttgtgcaagatcgagtgggctcaggactgttatatagcagatggcaagcctcagcaggacaggtgtcagacacaaacaaggtatctcaacctcctggcacaacatcattttctttgcctgatgactgggacaacagaacctcatatttgcactcccccttctcaactggacgaagttgtatccccctccatggtgttagtccagaagtgaatgaactattgatggaagcccagctgctccaggtatcccttcctgaaattcaggaactttaccagactttacttgcaaagccaagccctgctcagcagactgaccgaagctcaccagtgagacccagcagtgagaagaatgactgttgccgagggaagcgagatggaattaacagtcttgagagaaaactgaagagacgcctggaaagagagggcctctccagtgagcggtgggaacgagttaagaaaatgcggacccccaaaaagaagaaaatcaaactgagccaccccaaggacatgaacaatttcaagttagagagagagcgtagctatgaattagttcgttctgctgaaactcattccctgccctcagacacatcctattccgaacaggaagactctgaggatgaagatgccatctgcccagctgtgagctgcctgcagccagaaggagatgaggtggactgggtccagtgtgatggcagctgcaatcagtggtttcatcaggtctgtgttggtgtctccccagagatggcagagaaagaagactacatctgtgtgcgctgtactgtgaaggacgcaccaagccgaaagtaaaaacacaaaaacagatacccccctacttaatgtaattcaggactccaaccaagaggatttcttcaaatctcagcaaagctacaggactggtactcaagccagcctgtaaacggtgctatttctattccttatgggatcatttttccaggactctttgaagaaaagaaaaaacaactaaaaaaatttttgacactttttgtattttttccttaagagctatttgtggttgttgaggtttgaaaagctgactgttttttttgcaggggttcccaccaatttggaaggcattgaagcttgcaccttttcatgtacagcattaaaattttacctctctctgggatttaccagcttaagagtccaactcacttccagtgcccaaaagggcacccaccagaaattccagtaaatcctcatttgaggaagctctcccttgtttactctgttaccacattggggaaatttttaagtttttcactttgggagtttttgtttgtttcttcttttcctttatccacttttcttcttcctggtagactaggtttatttatctgagcaataacttctatgttggtttcagtggctggaattaaaacaaaacaaaacaaacttccaaacagtgtgttggtgctttagcgattgattgatgtacagaacacaaatgtctagtttctagtgtcactgatgaactagtgatgtagaaaagagacttctctgtaagtaattgccacagctgtattttggctttctccctgtcccttcctttctcccctattttttggtagcttgtatcaaatgttacagtttatattgtggaataaatccttcgtcctaacataacactaaatgctgattatttagagccattagagcacagcttcttctgcccctctactgttgcacagccagaaggggctgcttgcttttgcctctgcccaaccaggttgcagtagcagtggatgttagcctgcaaacaacattaggggattcttcttttgtgtcctgctctgtttggtgggccatatgcctacagccctcactaacaaagaacccctctgtcttcaaggactagaacctatctttaaagccgtgctcttttaaaataagctttctcagaatgttggcaaatcacttcaatcctcaaatcagtcttccttgtggaatgctgcctttattatatttgaattgacaggggaacttggtttagggttaagacgttggaaggaaatctaaggaaaattaatcctcacagaggtccgggtttagtatatgtcttgagaggagacttgtgaattcccagactctgcctcctggtttcctttctcatttctttctaactgtagctatcattactggctgtggatagcccatagctattttccttgcttttcttttttaaaggggtctgttctgcagtggagaagacattctggtgaccagacttttgcttaccttttcctattctgttgccaatttttgttttccccacattctatagccataaacctgaagatgagtaaaactggtgggtctttaataaaacaacaacaaaaacagcagtttgtgatatagcagaggtttaaatgtaccctccccttttatgcacttcaaataattaaatctctttaagaatga

SEQ ID NO: 414367 - DNA, 5548 bp, Homo sapiens
  misc_feature (12)..(12): n is a, c, g, or t
  misc_feature (30)..(30): n is a, c, g, or t
  misc_feature (337)..(337): n is a, c, g, or t
ttcagtctgttnaaggataccccgttgtgnatttctacctgtatgaccagagacacctcaaattcaaaatgtccagaaatgaacacagtatcttcttcccttgagtaactcgccttctgtatataattggggtgaatgttccagcaatgccaacgggctagcatctactcaggcaggtacgccagacatctgaatcttaatacctcgtcgtcccccctcaatctgtcactatgtcctaattttatttcctacctttgcatcccttcctcataattatcagcaccactgccttaatttagatcctatcattccttgtctggattatttcaagtctttngcccctctcaagtctgacctcgtcatagactgtttgtggatgattattttccctgcaacatctccacctcccaatagtctccatcacttattagccatgtgaattatggcaaattgcttaacctacctatgcctcactttccttattgtaaagtggaaataagagtacctatctcatagggttgtgtgattaatcatgcgatgcaattagaacagtgcctaggatatgaaagtgccccaaaatgttacgttattattattattactactattgccttctcatgaacatgctatgtgtatgttcaagctgttatctctactggaaaatccttctccgtttccaatactctttccaaaaccccctcctgggttttactgcacctaccattgtgtactgacgtgattgaatgattggcttatgggactgatcctttctaccagacttaacttcttcagggcaggaactctgatacatagtaaatggtcaataaaagttggctcaactgaaaccctaaggataaactccatccacagcggaaggcgcggccccgcccgattcgggggcggggcggggagccgcgcgcggagggtgggtcgatgggggtggggtgggactctttttcctcgccgtggcggcggaggcgcacggcgtgggcttgcggcgagacgtcgtcgtcggaggctgaaaaagcccaaggtgctgccgttgcccgtacaactcggacttgctgttgctcgagccgcgtctgcacgggtctcggaccgagcggagctcgcagcctcggtcccggagcccaccttcgcctcgcccttgcccagcctgcggtgatggaggcggccaccacactgcacccaggcccgcgcccggcgctgcccctcgggggcccgggcccgctgggcgagttcctgcctccacccgagtgcccggtcttcgaacccagctgggaagagttcgcggaccccttcgctttcatccacaagatccggcccatagccgagcagactggcatctgtaaggtgcggccgccgccggattggcagccaccatttgcatgtgatgttgataaacttcattttacgccacgtatccagagactgaatgaattggaggcccaaactcgtgtaaaattgaatttcttggaccagattgcaaagtactgggagttacagggaagtactctgaaaattccacatgtggagaggaagatcttggacttatttcagcttaataagttagttgcagaagaaggtggatttgcagttgtttgcaaggatagaaaatggaccaaaattgctaccaagatggggtttgctcctggcaaagcagtgggctcacatatcagagggcattatgaacgaattctcaacccctacaacttattcctgtccggagacagcctaaggtgtttgcagaagccaaacctgaccacagacactaaggacaaggagtacaaaccccatgatattccccagaggcagtctgtgcagccttcggaaacgtgccccccagcccgacgagcaaaacgcatgagagcagaggccatgaatattaaaatagaacccgaggagacaacagaagccagaactcataatctgagacgtcgaatgggttgtccaactccaaaatgtgaaaatgagaaagaaatgaagagtagcatcaagcaagaacctattgagaggaaagattatattgtagaaaatgagaaggaaaagcccaagagtcgatctaaaaaagccaccaatgctgtggacctgtatgtctgtcttttatgtggcagtggcaatgatgaagaccggctactgttgtgtgatggctgtgatgacagttaccataccttttgcttgatcccacctctccatgatgttcccaagggagactggaggtgtcctaagtgtttggctcaggaatgtagtaagccacaagaagcatttggctttgaacaagcagccagggactataccctccgtacttttggggaaatggcagatgcgttcaaatctgattacttcaacatgccagtccatatggtccccacagagcttgttgagaaagaattttggagactagtaagcactattgaggaggatgtcacagtggaatatggagctgacattgcctcaaaggaatttggcagtggctttcctgtccgagatgggaaaatcaaactctcacctgaggaagaggagtatcttgatagtggctggaatttgaacaacatgccagtgatggagcagtctgtccttgcacatattactgctgatatatgtggcatgaaacttccttggttgtatgtgggaatgtgcttttcttcattctgttggcacattgaagaccactggagctattcaattaactacttgcactggggtgagccaaaaacctggtatggagtcccagggtatgctgctgagcagctagaaaatgtaatgaagaaactagctccagaactctttgtgtcccagccggatctcctccatcagcttgtgaccatcatgaaccccaataccctgatgactcatgaagtgcctgtttaccgaactaatcagtgtgctggggagtttgtgattacatttccaagagcctaccacagtggttttaaccagggttttaattttgctgaggctgttaacttctgcactgttgattggctgccattaggccgacagtgtgtggagcattatcgcttgcttcatcgatattgtgtgttttcccatgatgagatgatctgcaagatggcttccaaggctgatgtattagatgttgtagtggcttcaactgttcagaaagacatggccattatgattgaggatgagaaagctttaagagaaactgtccgtaaattgggagtgattgattcggaaagaatggattttgagctgttgccagatgatgaacgtcagtgtgtaaaatgcaaaactacatgcttcatgtctgccatctcctgttcttgtaaacctggccttcttgtttgcctgcatcatgtaaaagaattgtgttcctgtcctccttataaatataaattgcggtataggtacacgctggatgatctctaccctatgatgaatgcattgaagcttcgagcagaatcttacaacgaatgggccttgaatgtgaatgaagctttggaggcaaagatcaacaagaagaaaagccttgtcagcttcaaggctttaattgaagaatctgaaatgaagaaattcccagacaatgatcttttgcgacaccttcgcctagtcacacaggatgcagagaagtgtgcctctgttgcgcagcagttgcttaatggcaaaaggcaaactagatatcgatctggtggagggaaatcccaaaatcagttgacagtgaatgagctccggcagtttgtaacacagctgtatgctcttccatgtgtcctcagtcagacaccattactaaaggatctcttgaatcgtgtagaagattttcaacagcatagtcagaaactactctctgaggaaacgcctagtgctgcggagctgcaggacttgctagatgtcagctttgaatttgatgttgaacttccacagcttgctgagatgcgtatccgtttggaacaagcccgttggctagaagaggtgcagcaagcttgcctagaccccagctcccttactttagatgatatgagacgtctcatagacctaggggtagggctggccccgtattcagcagtggagaaagctatggcccggctgcaggaactgctcacagtgtcagagcactgggacgacaaagccaagagtctcctcaaggccaggccacgacattcattgaatagccttgctacggcagtaaaggaaatcgaagagatccctgcatatctgcccaatggtgcggctctgaaagactcagtgcagagagccagagactggcttcaggatgtagagggcctgcaggctggaggacgtgtgccagtgttagacacactcatagaacttgttacacgaggccgatctatcccggtacatctgaattctttgccaagactggaaaccctagtagctgaggttcaggcttggaaagaatgtgctgttaatacattcttgactgagaattctccatattctctcttagaggtgctgtgtcctcgatgtgatattggccttttgggattgaaaaggaagcagagaaagttaaaggagcccttgccaaatggaaagaaaaaaagcaccaaattagagagtctgagtgacctggagagagctttaactgaaagcaaggagactgcttcagctatggcaactcttggggaagctcgcctaagggaaatggaagccttgcagtctctcagactcgccaatgaagggaaattgctgtcgcctctccaagatgtggatataaaaatctgcctatgtcagaaggccccagctgcccctatgattcaatgtgaactctgcagggatgctttccacaccagttgtgtggcggtacccagtatttcacagggcctgcgaatctggctttgtccccattgtcggaggtcagagaaacctccattagagaaaattctgcccctgctcgcctcccttcagcgtatccgagttcgccttcctgagggagatgcacttcgatatatgattgaaagaaccgtgaactggcagcacagagcccagcaactgctttcgtcagggaatcttaaatttgtgcaagatcgagtgggctcaggactgttatatagcagatggcaagcctcagcaggacaggtgtcagacacaaacaaggtatctcaacctcctggcacaacatcattttctttgcctgatgactgggacaacagaacctcatatttgcactcccccttctcaactggacgaagttgtatccccctccatggtgttagtccagaagtgaatgaactattgatggaagcccagctgctccaggtatcccttcctgaaattcaggaactttaccagactttacttgcaaagccaagccctgctcagcagactgaccgaagctcaccagtgagacccagcagtgagaagaatgactgttgccgagggaagcgagatggaattaacagtcttgagagaaaactgaagagacgcctggaaagagagggcctctccagtgagcggtgggaacgagttaagaaaatgcggacccccaaaaagaagaaaatcaaactgagccaccccaaggacatgaacaatttcaagttagagggggatccttagatcgaccacagcagca

SEQ ID NO: 414368 - DNA, 2427 bp, Homo sapiens
gtttattatattgtggctttaggcacattaaacctcacttcaactgaaggtaatttgtaatttaagaaggagagggtagtagtggtattaggggcagtccttctatttgtctcataaacccaaatgtgaatgtgaaacaccctttgttgttatcattttgatttggtctggtcttttacaggtgttagtccagaagtgaatgaactattgatggaagcccagctgctccaggtatcccttcctgaaattcaggaactttaccagactttacttgcaaagccaagccctgctcagcagactgaccgaagctcaccagtgagacccagcagtgagaagaatgactgttgccgagggaagcgagatggaattaacagtcttgagagaaaactgaagagacgcctggaaagagagggcctctccagtgagcggtgggaacgagttaagaaaatgcggacccccaaaaagaagaaaatcaaactgagccaccccaaggacatgaacaatttcaagttagagagagagcgtagctatgaattagttcgttctgctgaaactcattccctgccctcagacacatcctattccgaacaggaagactctgaggatgaagatgccatctgcccagctgtgagctgcctgcagccagaaggagatgaggtggactgggtccagtgtgatggcagctgcaatcagtggtttcatcaggtctgtgttggtgtctccccagagatggcagagaaagaagactacatctgtgtgcgctgtactgtgaaggacgcaccaagccgaaagtaaaaacacaaaaacagatacccccctacttaatgtaattcaggactccaaccaagaggatttcttcaaatctcagcaaagctacaggactggtactcaagccagcctgtaaacggtgctatttctattccttatgggatcatttttccaggactctttgaagaaaagaaaaaacaactaaaaaaatttttgacactttttgtattttttccttaagagctatttgtggttgttgaggtttgaaaagctgactgttttttttgcaggggttcccaccaatttggaaggcattgaagcttgcaccttttcatgtacagcattaaaattttacctctctctgggatttaccagcttaagagtccaactcacttccagtgcccaaaagggcacccaccagaaattccagtaaatcctcatttgaggaagctctcccttgtttactctgttaccacattggggaaatttttaagtttttcactttgggagtttttgtttgtttcttcttttcctttatccacttttcttcttcctggtagactaggtttatttatctgagcaataacttctatgttggtttcagtggctggaattaaaacaaaacaaaacaaacttccaaacagtgtgttggtgctttagcgattgattgatgtacagaacacaaatgtctagtttctagtgtcactgatgaactagtgatgtagaaaagagacttctctgtaagtaattgccacagctgtattttggctttctccctgtcccttcctttctcccctattttttggtagcttgtatcaaatgttacagtttatattgtggaataaatccttcgtcctaacataacactaaatgctgattatttagagccattagagcacagcttcttctgcccctctactgttgcacagccagaaggggctgcttgcttttgcctctgcccaaccaggttgcagtagcagtggatgttagcctgcaaacaacattaggggattcttcttttgtgtcctgctctgtttggtgggccatatgcctacagccctcactaacaaagaacccctctgtcttcaaggactagaacctatctttaaagccgtgctcttttaaaataagctttctcagaatgttggcaaatcacttcaatcctcaaatcagtcttccttgtggaatgctgcctttattatatttgaattgacaggggaacttggtttagggttaagacgttggaaggaaatctaaggaaaattaatcctcacagaggtccgggtttagtatatgtcttgagaggagacttgtgaattcccagactctgcctcctggtttcctttctcatttctttctaactgtagctatcattactggctgtggatagcccatagctattttccttgcttttcttttttaaaggggtctgttctgcagtggagaagacattctggtgaccagacttttgcttaccttttcctattctgttgccaatttttgttttccccacattctatagccataaacctgaagatgagtaaaactggtgggtctttaataaaacaacaacaaaaacagcagtttgtgatatagcagaggtttaaatgtaccctccccttttatgcacttcaaataattaaatctctttaagaatga

SEQ ID NO: 414369 - DNA, 4134 bp, Homo sapiens
  misc_feature (12)..(12): n is a, c, g, or t
  misc_feature (30)..(30): n is a, c, g, or t
  misc_feature (337)..(337): n is a, c, g, or t
ttcagtctgttnaaggataccccgttgtgnatttctacctgtatgaccagagacacctcaaattcaaaatgtccagaaatgaacacagtatcttcttcccttgagtaactcgccttctgtatataattggggtgaatgttccagcaatgccaacgggctagcatctactcaggcaggtacgccagacatctgaatcttaatacctcgtcgtcccccctcaatctgtcactatgtcctaattttatttcctacctttgcatcccttcctcataattatcagcaccactgccttaatttagatcctatcattccttgtctggattatttcaagtctttngcccctctcaagtctgacctcgtcatagactgtttgtggatgattattttccctgcaacatctccacctcccaatagtctccatcacttattagccatgtgaattatggcaaattgcttaacctacctatgcctcactttccttattgtaaagtggaaataagagtacctatctcatagggttgtgtgattaatcatgcgatgcaattagaacagtgcctaggatatgaaagtgccccaaaatgttacgttattattattattactactattgccttctcatgaacatgctatgtgtatgttcaagctgttatctctactggaaaatccttctccgtttccaatactctttccaaaaccccctcctgggttttactgcacctaccattgtgtactgacgtgattgaatgattggcttatgggactgatcctttctaccagacttaacttcttcagggcaggaactctgatacatagtaaatggtcaataaaagttggctcaactgaaaccctaaggataaactccatccacagcggaaggcgcggccccgcccgattcgggggcggggcggggagccgcgcgcggagggtgggtcgatgggggtggggtgggactctttttcctcgccgtggcggcggaggcgcacggcgtgggcttgcggcgagacgtcgtcgtcggaggctgaaaaagcccaaggtgctgccgttgcccgtacaactcggacttgctgttgctcgagccgcgtctgcacgggtctcggaccgagcggagctcgcagcctcggtcccggagcccaccttcgcctcgcccttgcccagcctgcggtgatggaggcggccaccacactgcacccaggcccgcgcccggcgctgcccctcgggggcccgggcccgctgggcgagttcctgcctccacccgagtgcccggtcttcgaacccagctgggaagagttcgcggaccccttcgctttcatccacaagatccggcccatagccgagcagactggcatctgtaaggtgcggccgccgccggattggcagccaccatttgcatgtgatgttgataaacttcattttacgccacgtatccagagactgaatgaattggaggcccaaactcgtgtaaaattgaatttcttggaccagattgcaaagtactgggagttacagggaagtactctgaaaattccacatgtggagaggaagatcttggacttatttcagcttaataagttagttgcagaagaaggtggatttgcagttgtttgcaaggatagaaaatggaccaaaattgctaccaagatggggtttgctcctggcaaagcagtgggctcacatatcagagggcattatgaacgaattctcaacccctacaacttattcctgtccggagacagcctaaggtgtttgcagaagccaaacctgaccacagacactaaggacaaggagtacaaaccccatgatattccccagaggcagtctgtgcagccttcggaaacgtgccccccagcccgacgagcaaaacgcatgagagcagaggccatgaatattaaaatagaacccgaggagacaacagaagccagaactcataatctgagacgtcgaatgggttgtccaactccaaaatgtgaaaatgagaaagaaatgaagagtagcatcaagcaagaacctattgagaggaaagattatattgtagaaaatgagaaggaaaagcccaagagtcgatctaaaaaagccaccaatgctgtggacctgtatgtctgtcttttatgtggcagtggcaatgatgaagaccggctactgttgtgtgatggctgtgatgacagttaccataccttttgcttgatcccacctctccatgatgttcccaagggagactggaggtgtcctaagtgtttggctcaggaatgtagtaagccacaagaagcatttggctttgaacaagcagccagggactataccctccgtacttttggggaaatggcagatgcgttcaaatctgattacttcaacatgccagtccatatggtccccacagagcttgttgagaaagaattttggagactagtaagcactattgaggaggatgtcacagtggaatatggagctgacattgcctcaaaggaatttggcagtggctttcctgtccgagatgggaaaatcaaactctcacctgaggaagaggagtatcttgatagtggctggaatttgaacaacatgccagtgatggagcagtctgtccttgcacatattactgctgatatatgtggcatgaaacttccttggttgtatgtgggaatgtgcttttcttcattctgttggcacattgaagaccactggagctattcaattaactacttgcactggggtgagccaaaaacctggtatggagtcccagggtatgctgctgagcagctagaaaatgtaatgaagaaactagctccagaactctttgtgtcccagccggatctcctccatcagcttgtgaccatcatgaaccccaataccctgatgactcatgaagtgcctgtttaccgaactaatcagtgtgctggggagtttgtgattacatttccaagagcctaccacagtggttttaaccagggttttaattttgctgaggctgttaacttctgcactgttgattggctgccattaggccgacagtgtgtggagcattatcgcttgcttcatcgatattgtgtgttttcccatgatgagatgatctgcaagatggcttccaaggctgatgtattagatgttgtagtggcttcaactgttcagaaagacatggccattatgattgaggatgagaaagctttaagagaaactgtccgtaaattgggagtgattgattcggaaagaatggattttgagctgttgccagatgatgaacgtcagtgtgtaaaatgcaaaactacatgcttcatgtctgccatctcctgttcttgtaaacctggccttcttgtttgcctgcatcatgtaaaagaattgtgttcctgtcctccttataaatataaattgcggtataggtacacgctggatgatctctaccctatgatgaatgcattgaagcttcgagcagaatcttacaacgaatgggccttgaatgtgaatgaagctttggaggcaaagatcaacaagaagaaaagccttgtcagcttcaaggctttaattgaagaatctgaaatgaagaaattcccagacaatgatcttttgcgacaccttcgcctagtcacacaggatgcagagaagtgtgcctctgttgcgcagcagttgcttaatggcaaaaggcaaactagatatcgatctggtggagggaaatcccaaaatcagttgacagtgaatgagctccggcagtttgtaacacagctgtatgctcttccatgtgtcctcagtcagacaccattactaaaggatctcttgaatcgtgtagaagattttcaacagcatagtcagaaactactctctgaggaaacgcctagtgctgcggagctgcaggacttgctagatgtcagctttgaatttgatgttgaacttccacagcttgctgagatgcgtatccgtttggaacaagcccgttggctagaagaggtgcagcaagcttgcctagaccccagctcccttactttagatgatatgagacgtctcatagacctaggggtagggctggccccgtattcagcagtggagaaagctatggcccagggcgaggggtggtcctcagtgtcagagcattagtgctcatgcatcctgacttgcatatagtccagccccgacatgtgtcgggggatcctc

SEQ ID NO: 414370 - DNA, 575 bp, Homo sapiens
cgcggggcggcggggtggctgggccggcggcggcggcggtacgaggcgcgcgctcggggtcccggtcgcgaggaggaggaggatgtggcgcgcggaggggaaatggctgccgaaaacaagccggaagagcgtttcccaaagtgtattctgcggaactagcacctactgtgttctcaacaccgtgccacctatagaagatgatcatgggaacagcaatagtagtcatgtaaaaatctttttaccgaaaaagctgcttgaatgtctgccgaaatgttcaagtttaccaaaagagaggcaccgctggaacactaatgagagatcatgatgcagccgtccttttggatttctttttaataatgtgtgacccttcacctttgatcccctgacctgcattaccttggtaaccatttcattttttaatttaatttcattttttaattttggtgtacaagctgtaacatttcatctttcaaagtgtaacacgctgatttcctcaaatagagatacccctttgagtgataaatttgcaaaatgctgtcttcattttctgtattaaaattcatttcagttttaaa

SEQ ID NO: 414371 - DNA, 577 bp, Homo sapiens
  misc_feature (1)..(1): n is a, c, g, or t
  misc_feature (28)..(28): n is a, c, g, or t
ngctcgccgaaaacaagccggacgcganaggaaggacagacccagtctctgtccttatggagctaagggggagacggacattaatcaagatgccatatgaaatttcagctgggactcagtgctgtgaagagcgtttcccaaagtgtattctgcggaactagcacctactgtgttctcaacaccgtgccacctatagaagatgatcatgggaacagcaatagtagtcatgtaaaaatctttttaccgaaaaagctgcttgaatgtctgccgaaatgttcaagtttaccaaaagagaggcaccgctggaacactaatgagagatcatgatgcagccgtccttttggatttctttttaataatgtgtgacccttcacctttgatcccctgacctgcattaccttggtaaccatttcattttttaatttaatttcattttttaattttggtgtacaagctgtaacatttcatctttcaaagtgtaacacgctgatttcctcaaatagagatacccctttgagtgataaatttgcaaaatgctgtcttcattttctgtattaaaattcatttcagttttaaa

SEQ ID NO: 414372 - DNA, 856 bp, Homo sapiens
acatgtaagtgctacgcaagtaacgccttttgacccacagtttgggaccttaggccgcaggcctctcttaatatccaccgctacagtatcacagagttaattacaccagacctgcactaaagggaataatagaaagattggtctttggcagaagagaaatgatcctgcatggcagctttaagatgcgtggaaaagtgaagaccaaagaaaggagaaataagatgagatcatgatgcagccgtccttttggatttctttttaataatgtgtgacccttcacctttgatcccctgacctgcattaccttggctctcaccacacacttgttcatgggcgcagcaaagaagagggatccacagagctggagccatgagggctgacacattggaatgaaagctggcagaattcgtagggagagctttcccatcctgccagccccatgtctggctttaagacagttctattagtgaattaactgttctcaaaaccccaaattaatttgaaccgaatgttactaaaaatgaaatagaataaagtgacctactcttgcctcatccggagttattacgaaggagctccgcagcctgactgagctctggagagcagggctctgtgcacacgcctcctggtccagaggcctccgtgaccatccatgatgccactctgtcccctcagcaagctgcctttttcttcctagcacctgccccagcggtggtatgttttccagtcagttaccacctgtctcatcagaatggaagctccatgagagcagggcctttgtcttgtccccttgtatctccagtgcataggacagtgctgacacagtgcagagtctaaataaacgctgttgaacgaa

SEQ ID NO: 414373 - DNA, 698 bp, Homo sapiens
cccccccccaccaccccccgcgggaggggtgtcatcactaaatatctccaacggaagaaaattctaagatcatgatgcagccgtccttttggatttctttttaataatgtgtgacccttcacctttgatcccctgacctgcattaccttggctctcaccacacacttgttcatgggcgcagcaaagaagagggatccacagagctggagccatgagggctgacacattggaatgaaagctggcagaattcgtagggagagctttcccatcctgccagccccatgtctggctttaagacagttctattagtgaattaactgttctcaaaaccccaaattaatttgaaccgaatgttactaaaaatgaaatagaataaagtgacctactcttgcctcatccggagttattacgaaggagctccgcagcctgactgagctctggagagcagggctctgtgcacacgcctcctggtccagaggcctccgtgaccatccatgatgccactctgtcccctcagcaagctgcctttttcttcctagcacctgccccagcggtggtatgttttccagtcagttaccacctgtctcatcagaatggaagctccatgagagcagggcctttgtcttgtccccttgtatctccagtgcataggacagtgctgacacagtgcagagtctaaataaacgctgttgaacgaa

SEQ ID NO: 414374 - DNA, 721 bp, Homo sapiens
  misc_feature (35)..(35): n is a, c, g, or t
  misc_feature (58)..(61): n is a, c, g, or t
cttggtgtgtttggatttatttaattattgtttgngtaatgtgataaaaaaaaaaaannnntttcagtcttaaaattttggtagcagaaagcaaatgtgcaaagagcaatggaaaacaagtcagaagctgctgtctgattccagaggaactcgtattttatgttaaaaaaaatgctctcaccacacacttgttcatgggcgcagcaaagaagagggatccacagagctggagccatgagggctgacacattggaatgaaagctggcagaattcgtagggagagctttcccatcctgccagccccatgtctggctttaagacagttctattagtgaattaactgttctcaaaaccccaaattaatttgaaccgaatgttactaaaaatgaaatagaataaagtgacctactcttgcctcatccggagttattacgaaggagctccgcagcctgactgagctctggagagcagggctctgtgcacacgcctcctggtccagaggcctccgtgaccatccatgatgccactctgtcccctcagcaagctgcctttttcttcctagcacctgccccagcggtggtatgttttccagtcagttaccacctgtctcatcagaatggaagctccatgagagcagggcctttgtcttgtccccttgtatctccagtgcataggacagtgctgacacagtgcagagtctaaataaacgctgttgaacgaa

SEQ ID NO: 414375 - DNA, 1102 bp, Homo sapiens
cgcggggcggcggggtggctgggccggcggcggcggcggtacgaggcgcgcgctcggggtcccggtcgcgaggaggaggaggatgtggcgcgcggaggggaaatggctgccgaaaacaagccggaagatgatcatgggaacagcaatagtagtcatgtaaaaatctttttaccgaaaaagctgcttgaatgtctgccgaaatgttcaagtttaccaaaagagaggcaccgctggaacactaatgagagatcatgatgcagccgtccttttggatttctttttaataatgtgtgacccttcacctttgatcccctgacctgcattaccttggctctcaccacacacttgttcatgggcgcagcaaagaagagggatccacagagctggagccatgagggctgacacattggaatgaaagctggcagaattcgtagggagagctttcccatcctgccagccccatgtctggctttaagacagttctattagtgaattaactgttctcaaaaccccaaattaatttgaaccgaatgttactaaaaatgaaatagaataaagtgacctactcttgcctcatccggagttattacgaaggagctccgcagcctgactgagctctggagagcagggctctgtgcacacgcctcctggtccagaggcctccgtgaccatccatgatgccactctgtcccctcagcaagctgcctttttcttcctagcacctgccccagcggtggtatgttttccagtcagttaccacctgtctcatcagaatggaagctccatgagagcagggcctttgtcttgtccccttgtatctccagtgcataggacagtgctgacacagtgcagagtctaaataaacgctgttgaacgaaaaaaaaaagtatattgtttattaatataatgtgtagatgggaccataaagtattgatacgtatattatggcggagaaagcaacaaaaaaaaggggggggttattatgtgtggggagagatgcaattttagaagggttaataagtatttgagggggggaaggggagatgcgtttttggactttgggatatacacaaagggaaattggttatagggggggagaaaa

SEQ ID NO: 414376 - DNA, 761 bp, Homo sapiens
cgcggggcggcggggtggctgggccggcggcggcggcggtacgaggcgcgcgctcggggtcccggtcgcgaggaggaggaggatgtggcgcgcggaggggaaatggctgccgaaaacaagccggaagagcgtttcccaaagtgtattctgcggaactagcacctactgtgttctcaacaccgtgccacctatagaagatgatcatgggaacagcaatagtagtcatgtaaaaatctttttaccgaaaaagctgcttgaatgtctgccgaaatgttcaagtttaccaaaagagaggcaccgctggaacactaatgagagatcatgatgcagccgtccttttggatttctttttaataatgtgtgacccttcacctttgatcccctgacctgcattaccttggtaaccatttcattttttaatttaatttcattttttaattttggtgtacaagctgtaacatttcatctttcaaagtgtaacacgctgatttcctcaaatagagatacccctttgagtgataaatttgcaaaatgctgtcttcattttctgtattaaaattcatttcagttttaaagtctccaatcacactctaatgacattaaataacgtgtcgcccgtccaggaagggaaatggttcgcacgattcctcttttgccaataattttacaacctctagtttagggtttgttagaaaatctccctgaaagggggaaagcattgtttctcggctttattggacgggagtttcccttgggtggct

SEQ ID NO: 414377 - DNA, 544 bp, Homo sapiens
cgcggggcggcggggtggctgggccggcggcggcggcggtacgaggcgcgcgctcggggtcccggtcgcgaggaggaggaggatgtggcgcgcggaggggaaatggctgccgaaaacaagccggaagatgatcatgggaacagcaatagtagtcatgtaaaaatctttttaccgaaaaagctgcttgaatgtctgccgaaatgttcaagtttaccaaaagagaggcaccgctggaacactaatgagctcacttacaggccctccaagcagtacaacgagaggtctggaagccgctggccgctgcttatcaggaccagctagatcagccagtgataccacaccccttccgtgtcggtgacgccgtgtgggtacgccggcaccagactaagaacttggaacctcgctggaaaggaccctacaccgtcctgctgaccacccccaccgctctcaaagttgacggcatctctgcgtggatacacgccgctcacgtaaaggcggcgacaactcctccggccggagcaacatggaaggtccaacgttctca

SEQ ID NO: 414378 - DNA, 3105 bp, Homo sapiens
cgcggcgacggcggtccggtgcgaggcagagtgctagcgggagcgcgagccagcaagaggcgcctgcgcgatgtccgggcccctgagcccgcggcgctgagccagccgggacggacatgcgcgggagggcgccgcggggcagccgccgctcctccgggggaatgaaagctactggttgattttaaagtgcctgggcctcacaggtttggagatgtcccagaataaggcacaatgtcaatagcaggagttgctgctcaggagatcagagtcccattaaaaactggatttctacataatggccgagccatggggaatatgaggaagacctactggagcagtcgcagtgagtttaaaaacaactttttaaatattgacccgataaccatggcctacagtctgaactcttctgctcaggagcgcctaataccacttgggcatgcttccaaatctgctccgatgaatggccactgctttgcagaaaatggtccatctcaaaagtccagcttgccccctcttcttattcccccaagtgaaaacttgggaccacatgaagaggatcaagttgtatgtggttttaagaaactcacagtgaatggggtttgtgcttccacccctccactgacacccataaaaaactccccttcccttttcccctgtgcccctctttgtgaacggggttctaggcctcttccaccgttgccaatctctgaagccctctctctggatgacacagactgtgaggtggaattcctaactagctcagatacagacttccttttagaagactctacactttctgatttcaaatatgatgttcctggcaggcgaagcttccgtgggtgtggacaaatcaactatgcatattttgataccccagctgtttctgcagcagatctcagctatgtgtctgaccaaaatggaggtgtcccagatccaaatcctcctccacctcagacccaccgaagattaagaaggtctcattcgggaccagctggctcctttaacaagccagccataaggatatccaactgttgtatacacagagcttctcctaactccgatgaagacaaacctgaggttccccccagagttcccatacctcctagaccagtaaagccagattatagaagatggtcagcagaagttacttcgagcacctatagtgatgaagacaggcctcccaaagtaccgccaagagaacctttgtcaccgagtaactcgcgcacaccgagtcccaaaagccttccgtcttacctcaatggggtcatgcccccgacacagagctttgcccctgatcccaagtatgtcagcagcaaagcactgcaaagacagaacagcgaaggatctgccagtaaggttccttgcattctgcccattattgaaaatgggaagaaggttagttcaacacattattacctactacctgaacgaccaccatacctggacaaatatgaaaaattttttagggaagcagaagaaacaaatggaggcgcccaaatccagccattacctgctgactgcggtatatcttcagccacagaaaagccagactcaaaaacaaaaatggatctgggtggccacgtgaagcgtaaacatttatcctatgtggtttctccttagaccttggggtcatggttcagcagaggttacataggagcaaatggttctcaattttccagtttgattgaagtgcagagaaaaatcccttagattgcaaaataaaatagttgaactctctgtcttcatgtggaaggtttagagcagttgtgagatgctgttatgctgagaaaccctgactttgttagtgttggaaaaaagtcttacaagtctataatttaaagatgtgatggtggggaggggaggatggggaagctttttatatatgcatacattacatacctatatataaacttgtggtataaccatagaccatagctgcaggttaaccaattagttactatcgtagagtaatatatattcagaataataaactcaagctggagaaatgagtcctgatagactgaaaattgagcaaatggaagaagatacagtattgtttagatcagaatcattaaaaaatatttttgtttagtaagtttgaagatttctggcttttaggccttttctattttgttccatttatttttgcaggcaatcttttccatggagggcagggtatccattctttaccatgggtgtacctgcttaggttaaaaatcataccaaggcctcatacttccaggtttcatgttgcgtcttgttgagggagggagagcaggttacttggcaaccatattgtcacctgtacctgtcacacatcttgaaaaataaaacgataatagaactagtgactaattttcccttacagttcctgcttggtcccacccactgaagtagctcatcgtagtgcgggccgtattagaggcagtggggtacgttagactcagatggaaaagtattctaggtgccagtgttaggatgtcagttttacaaaataatgaagcaattagctatgtgattgagagttattgtttggggatgtgtgttgtggttttgctttttttttttagactgtattaataaacatacaacacaagctggccttgtgttgctggttcctattcagtatttcctggggattgtttgctttttaagtaaaacacttctgacccatagctcagtatgtctgaattccagaggtcacatcagcatctttctgctttgaaaactctcacagctgtggctgcttcacttagatgcagtgagacacatagttggtgttccgattttcacatccttccatgtatttatcttgaagagataagcacagaagagaaggtgctcactaacagaggtacattactgcaatgttctcttaacagttaaacaagctgtttacagtttaaactgctgaatattatttgagctatttaaagcttattatattttagtatgaactaaatgaaggttaaaacatgcttaagaaaaatgcactgatttctgcattatgtgtacagtattggacaaaggattttattcattttgttgcattattttgaatattgtcttttcattttaataaagttataatacttatttatgata

SEQ ID NO: 414379 - DNA, 3051 bp, Homo sapiens
cgcggcgacggcggtccggtgcgaggcagagtgctagcgggagcgcgagccagcaagaggcgcctgcgcgatgtccgggcccctgagcccgcggcgctgagccagccgggacggacatgcgcgggagggcgccgcggggcagccgccgctcctccgggggaatgaaagctactggttgattttaaagtgcctgggcctcacaggtttggagatgtcccagaataaggcacaatgtcaatagcaggagttgctgctcaggagatcagagtcccattaaaaactggatttctacataatggccgagccatggggaatatgaggaagacctactggagcagtcgcagtgagtttaaaaacaactttttaaatattgacccgataaccatggcctacagtctgaactcttctgctcaggagcgcctaataccacttgggcatgcttccaaatctgctccgatgaatggccactgctttgcagaaaatggtccatctcaaaagtccagcttgccccctcttcttattcccccaagtgaaaacttgggaccacatgaagaggatcaagttgtatgtggttttaagaaactcacagtgaatggggtttgtgcttccacccctccactgacacccataactcttccaccgttgccaatctctgaagccctctctctggatgacacagactgtgaggtggaattcctaactagctcagatacagacttccttttagaagactctacactttctgatttcaaatatgatgttcctggcaggcgaagcttccgtgggtgtggacaaatcaactatgcatattttgataccccagctgtttctgcagcagatctcagctatgtgtctgaccaaaatggaggtgtcccagatccaaatcctcctccacctcagacccaccgaagattaagaaggtctcattcgggaccagctggctcctttaacaagccagccataaggatatccaactgttgtatacacagagcttctcctaactccgatgaagacaaacctgaggttccccccagagttcccatacctcctagaccagtaaagccagattatagaagatggtcagcagaagttacttcgagcacctatagtgatgaagacaggcctcccaaagtaccgccaagagaacctttgtcaccgagtaactcgcgcacaccgagtcccaaaagccttccgtcttacctcaatggggtcatgcccccgacacagagctttgcccctgatcccaagtatgtcagcagcaaagcactgcaaagacagaacagcgaaggatctgccagtaaggttccttgcattctgcccattattgaaaatgggaagaaggttagttcaacacattattacctactacctgaacgaccaccatacctggacaaatatgaaaaattttttagggaagcagaagaaacaaatggaggcgcccaaatccagccattacctgctgactgcggtatatcttcagccacagaaaagccagactcaaaaacaaaaatggatctgggtggccacgtgaagcgtaaacatttatcctatgtggtttctccttagaccttggggtcatggttcagcagaggttacataggagcaaatggttctcaattttccagtttgattgaagtgcagagaaaaatcccttagattgcaaaataaaatagttgaactctctgtcttcatgtggaaggtttagagcagttgtgagatgctgttatgctgagaaaccctgactttgttagtgttggaaaaaagtcttacaagtctataatttaaagatgtgatggtggggaggggaggatggggaagctttttatatatgcatacattacatacctatatataaacttgtggtataaccatagaccatagctgcaggttaaccaattagttactatcgtagagtaatatatattcagaataataaactcaagctggagaaatgagtcctgatagactgaaaattgagcaaatggaagaagatacagtattgtttagatcagaatcattaaaaaatatttttgtttagtaagtttgaagatttctggcttttaggccttttctattttgttccatttatttttgcaggcaatcttttccatggagggcagggtatccattctttaccatgggtgtacctgcttaggttaaaaatcataccaaggcctcatacttccaggtttcatgttgcgtcttgttgagggagggagagcaggttacttggcaaccatattgtcacctgtacctgtcacacatcttgaaaaataaaacgataatagaactagtgactaattttcccttacagttcctgcttggtcccacccactgaagtagctcatcgtagtgcgggccgtattagaggcagtggggtacgttagactcagatggaaaagtattctaggtgccagtgttaggatgtcagttttacaaaataatgaagcaattagctatgtgattgagagttattgtttggggatgtgtgttgtggttttgctttttttttttagactgtattaataaacatacaacacaagctggccttgtgttgctggttcctattcagtatttcctggggattgtttgctttttaagtaaaacacttctgacccatagctcagtatgtctgaattccagaggtcacatcagcatctttctgctttgaaaactctcacagctgtggctgcttcacttagatgcagtgagacacatagttggtgttccgattttcacatccttccatgtatttatcttgaagagataagcacagaagagaaggtgctcactaacagaggtacattactgcaatgttctcttaacagttaaacaagctgtttacagtttaaactgctgaatattatttgagctatttaaagcttattatattttagtatgaactaaatgaaggttaaaacatgcttaagaaaaatgcactgatttctgcattatgtgtacagtattggacaaaggattttattcattttgttgcattattttgaatattgtcttttcattttaataaagttataatacttatttatgata

SEQ ID NO: 414380 - DNA, 3058 bp, Homo sapiens
cgcggcgacggcggtccggtgcgaggcagagtgctagcgggagcgcgagccagcaagaggcgcctgcgcgatgtccgggcccctgagcccgcggcgctgagccagccgggacggacatgcgcgggagggcgccgcggggcagccgccgctcctccgggggaatgaaagctactggttgattttaaagtgcctgggcctcacaggtttggagatgtcccagaataaggcacaatgtcaatagcaggagttgctgctcaggagatcagagtcccattaaaaactggatttctacataatggccgagccatggggaatatgaggaagacctactggagcagtcgcagtgagtttaaaaacaactttttaaatattgacccgataaccatggcctacagtctgaactcttctgctcaggagcgcctaataccacttgggcatgcttccaaatctgctccgatgaatggccactgctttgcagaaaatggtccatctcaaaagtccagcttgccccctcttcttattcccccaagtgaaaacttgggaccacatgaagaggatcaagttgtatgtggttttaagaaactcacagtgaatggggtttgtgcttccacccctccactgacacccataaaaaactccccttcccttttcccctgtgcccctctttgtgaacggggttctaggcctcttccaccgttgccaatctctgaagccctctctctggatgacacagactgtgaggtggaattcctaactagctcagatacagacttccttttagaagactctacactttctgatttcaaatatgatgttcctggcaggcgaagcttccgtgggtgtggacaaatcaactatgcatattttgataccccagctgtttctgcagcagatctcagctatgtgtctgaccaaaatggaggtgtcccagatccaaatcctcctccacctcagacccaccgaagattaagaaggtctcattcgggaccagctggctcctttaacaagccagccataaggatatccaactgttgtatacacagagcttctcctaactccgatgaagacaaacctgaggttccccccagagttcccatacctcctagaccagtaaagccagattatagaagatggtcagcagaagttacttcgagcacctatagtgatgaagacaggcctcccaaagtaccgccaagagaacctttgtcaccgagtaactcgcgcacaccgagtcccaaaagccttccgtcttacctcaatggggtcatgcccccgacacagagctttgcccctgatcccaagtatgtcagcagcaaagcactgcaaagacagaacagcgaaggatctgccagtaaggttccttgcattctgcccattattgaaaatgggaagaaggttagttcaacacattattacctactacctgaacgaccaccatacctggacaaatatgaaaaatttttctgctgactgcggtatatcttcagccacagaaaagccagactcaaaaacaaaaatggatctgggtggccacgtgaagcgtaaacatttatcctatgtggtttctccttagaccttggggtcatggttcagcagaggttacataggagcaaatggttctcaattttccagtttgattgaagtgcagagaaaaatcccttagattgcaaaataaaatagttgaactctctgtcttcatgtggaaggtttagagcagttgtgagatgctgttatgctgagaaaccctgactttgttagtgttggaaaaaagtcttacaagtctataatttaaagatgtgatggtggggaggggaggatggggaagctttttatatatgcatacattacatacctatatataaacttgtggtataaccatagaccatagctgcaggttaaccaattagttactatcgtagagtaatatatattcagaataataaactcaagctggagaaatgagtcctgatagactgaaaattgagcaaatggaagaagatacagtattgtttagatcagaatcattaaaaaatatttttgtttagtaagtttgaagatttctggcttttaggccttttctattttgttccatttatttttgcaggcaatcttttccatggagggcagggtatccattctttaccatgggtgtacctgcttaggttaaaaatcataccaaggcctcatacttccaggtttcatgttgcgtcttgttgagggagggagagcaggttacttggcaaccatattgtcacctgtacctgtcacacatcttgaaaaataaaacgataatagaactagtgactaattttcccttacagttcctgcttggtcccacccactgaagtagctcatcgtagtgcgggccgtattagaggcagtggggtacgttagactcagatggaaaagtattctaggtgccagtgttaggatgtcagttttacaaaataatgaagcaattagctatgtgattgagagttattgtttggggatgtgtgttgtggttttgctttttttttttagactgtattaataaacatacaacacaagctggccttgtgttgctggttcctattcagtatttcctggggattgtttgctttttaagtaaaacacttctgacccatagctcagtatgtctgaattccagaggtcacatcagcatctttctgctttgaaaactctcacagctgtggctgcttcacttagatgcagtgagacacatagttggtgttccgattttcacatccttccatgtatttatcttgaagagataagcacagaagagaaggtgctcactaacagaggtacattactgcaatgttctcttaacagttaaacaagctgtttacagtttaaactgctgaatattatttgagctatttaaagcttattatattttagtatgaactaaatgaaggttaaaacatgcttaagaaaaatgcactgatttctgcattatgtgtacagtattggacaaaggattttattcattttgttgcattattttgaatattgtcttttcattttaataaagttataatacttatttatgata

SEQ ID NO: 414381 - DNA, 3051 bp, Homo sapiens
cgcggcgacggcggtccggtgcgaggcagagtgctagcgggagcgcgagccagcaagaggcgcctgcgcgatgtccgggcccctgagcccgcggcgctgagccagccgggacggacatgcgcgggagggcgccgcggggcagccgccgctcctccgggggaatgaaagctactggttgattttaaagtgcctgggcctcacaggtttggagatgtcccagaataaggcacaatgtcaatagcaggagttgctgctcaggagatcagagtcccattaaaaactggatttctacataatggccgagccatggggaatatgaggaagacctactggagcagtcgcagtgagtttaaaaacaactttttaaatattgacccgataaccatggcctacagtctgaactcttctgctcaggagcgcctaataccacttgggcatgcttccaaatctgctccgatgaatggccactgctttgcagaaaatggtccatctcaaaagtccagcttgccccctcttcttattcccccaagtgaaaacttgggaccacatgaagaggatcaagttgtatgtggttttaagaaactcacagtgaatggggtttgtgcttccacccctccactgacacccataaaaaactccccttcccttttcccctgtgcccctctttgtgaacggggttctaggcctcttccaccgttgccaatctctgaagccctctctctggatgacacagactgtgaggtggaattcctaactagctcagatacagacttccttttagaagactctacactttctgatttcaaatatgatgttcctggcaggcgaagcttccgtgggtgtggacaaatcaactatgcatattttgataccccagctgtttctgcagcagatctcagctatgtgtctgaccaaaatggaggtgtcccagatccaaatcctcctccacctcagacccaccgaagattaagaaggtctcattcgggaccagctggctcctttaacaagccagccataaggatatccaactgttgtatacacagagcttctcctaactccgatgaagacaaacctgaggttccccccagagttcccatacctcctagaccagtaaagccagattatagaagatggtcagcagaagttacttcgagcacctatagtgatgaagacaggcctcccaaagtaccgccaagagaacctttgtcaccgagtaactcgcgcacaccgagtcccaaaagccttccgtcttacctcaatggggtcatgcccccgacacagagctttgcccctgatcccaagtatgtcagcagcaaagcactgcaaagacagaacagcgaaggatctgccagtaaggttccttgcattctgcccattattgaaaatgggaagaaggttagttcaacacattattacctactacctgaacgaccaccatacctggacaaatatgaaaaattttttagggaagcagaagaaacaaatggaggcgcccaaatccagccattacctgctgactgcggtatatcttcagccacagaaaagccagactcaaaaacaaaaatggatctgggtggccacgtgaagcgtaaacatttatcctatgtggtttctccttagaccttggggtcatggttcagcagaggttacataggagcaaatggttctcaattttccagtttgattgaagtgcagagaaaaatcccttagattgcaaaataaaatagttgaactctctgtcttcatgtggaaggtttagagcagttgtgagatgctgttatgctgagaaaccctgactttgttagtgttggaaaaaagtcttacaagtctataatttaaagatgtgatggtggggaggggaggatggggaagctttttatatatgcatacattacatacctatatataaacttgtggtataaccatagaccatagctgcaggttaaccaattagttactatcgtagagtaatatatattcagaataataaactcaagctggagaaatgagtcctgatagactgaaaattgagcaaatggaagaagatacagtattgtttagatcagaatcattaaaaaatatttttgtttagtaagtttgaagatttctggcttttaggccttttctattttgttccatttatttttgcaggcaatcttttccatggagggcagggtatccattctttaccatgggtgtacctgcttaggttaaaggagagcaggttacttggcaaccatattgtcacctgtacctgtcacacatcttgaaaaataaaacgataatagaactagtgactaattttcccttacagttcctgcttggtcccacccactgaagtagctcatcgtagtgcgggccgtattagaggcagtggggtacgttagactcagatggaaaagtattctaggtgccagtgttaggatgtcagttttacaaaataatgaagcaattagctatgtgattgagagttattgtttggggatgtgtgttgtggttttgctttttttttttagactgtattaataaacatacaacacaagctggccttgtgttgctggttcctattcagtatttcctggggattgtttgctttttaagtaaaacacttctgacccatagctcagtatgtctgaattccagaggtcacatcagcatctttctgctttgaaaactctcacagctgtggctgcttcacttagatgcagtgagacacatagttggtgttccgattttcacatccttccatgtatttatcttgaagagataagcacagaagagaaggtgctcactaacagaggtacattactgcaatgttctcttaacagttaaacaagctgtttacagtttaaactgctgaatattatttgagctatttaaagcttattatattttagtatgaactaaatgaaggttaaaacatgcttaagaaaaatgcactgatttctgcattatgtgtacagtattggacaaaggattttattcattttgttgcattattttgaatattgtcttttcattttaataaagttataatacttatttatgata

SEQ ID NO: 414382 - DNA, 3051 bp, Homo sapiens
cgcggcgacggcggtccggtgcgaggcagagtgctagcgggagcgcgagccagcaagaggcgcctgcgcgatgtccgggcccctgagcccgcggcgctgagccagccgggacggacatgcgcgggagggcgccgcggggcagccgccgctcctccgggggaatgaaagctactggttgattttaaagtgcctgggcctcacaggtttggagatgtcccagaataaggcacaatgtcaatagcaggagttgctgctcaggagatcagagtcccattaaaaactggatttctacataatggccgagccatggggaatatgaggaagacctactggagcagtcgcagtgagtttaaaaacaactttttaaatattgacccgataaccatggcctacagtctgaactcttctgctcaggagcgcctaataccacttgggcatgcttccaaatctgctccgatgaatggccactgctttgcagaaaatggtccatctcaaaagtccagcttgccccctcttcttattcccccaagtgaaaacttgggaccacatgaagaggatcaagttgtatgtggttttaagaaactcacagtgaatggggtttgtgcttccacccctccactgacacccataaaaaactccccttcccttttcccctgtgcccctctttgtgaacggggttctaggcctcttccaccgttgccaatctctgaagccctctctctggatgacacagactgtgaggtggaattcctaactagctcagatacagacttccttttagaagactctacactttctgatttcaaatatgatgttcctggcaggcgaagcttccgtgggtgtggacaaatcaactatgcatattttgataccccagctgtttctgcagcagatctcagctatgtgtctgaccaaaatggaggtgtcccagatccaaatcctcctccacctcagacccaccgaagattaagaaggtctcattcgggaccagctggctcctttaacaagccagccataaggatatccaactgttgtatacacagagcttctcctaactccgatgaagacaaacctgaggttccccccagagttcccatacctcctagaccagtaaagccagattatagaagatggtcagcagaagttacttcgagcacctatagtgatgaagacaggcctcccaaagtaccgccaagagaacctttgtcaccgagtaactcgcgcacaccgagtcccaaaagccttccgtcttacctcaatggggtcatgcccccgacacagagctttgcccctgatcccaagtatgtcagcagcaaagcactgcaaagacagaacagcgaaggatctgccagtaaggttccttgcattctgcccattattgaaaatgggaagaaggttagttcaacacattattacctactacctgaacgaccaccatacctggacaaatatgaaaaattttttagggaagcagaagaaacaaatggaggcgcccaaatccagccattacctgctgactgcggtatatcttcagccacagaaaagccagactcaaattctccttagaccttggggtcatggttcagcagaggttacataggagcaaatggttctcaattttccagtttgattgaagtgcagagaaaaatcccttagattgcaaaataaaatagttgaactctctgtcttcatgtggaaggtttagagcagttgtgagatgctgttatgctgagaaaccctgactttgttagtgttggaaaaaagtcttacaagtctataatttaaagatgtgatggtggggaggggaggatggggaagctttttatatatgcatacattacatacctatatataaacttgtggtataaccatagaccatagctgcaggttaaccaattagttactatcgtagagtaatatatattcagaataataaactcaagctggagaaatgagtcctgatagactgaaaattgagcaaatggaagaagatacagtattgtttagatcagaatcattaaaaaatatttttgtttagtaagtttgaagatttctggcttttaggccttttctattttgttccatttatttttgcaggcaatcttttccatggagggcagggtatccattctttaccatgggtgtacctgcttaggttaaaaatcataccaaggcctcatacttccaggtttcatgttgcgtcttgttgagggagggagagcaggttacttggcaaccatattgtcacctgtacctgtcacacatcttgaaaaataaaacgataatagaactagtgactaattttcccttacagttcctgcttggtcccacccactgaagtagctcatcgtagtgcgggccgtattagaggcagtggggtacgttagactcagatggaaaagtattctaggtgccagtgttaggatgtcagttttacaaaataatgaagcaattagctatgtgattgagagttattgtttggggatgtgtgttgtggttttgctttttttttttagactgtattaataaacatacaacacaagctggccttgtgttgctggttcctattcagtatttcctggggattgtttgctttttaagtaaaacacttctgacccatagctcagtatgtctgaattccagaggtcacatcagcatctttctgctttgaaaactctcacagctgtggctgcttcacttagatgcagtgagacacatagttggtgttccgattttcacatccttccatgtatttatcttgaagagataagcacagaagagaaggtgctcactaacagaggtacattactgcaatgttctcttaacagttaaacaagctgtttacagtttaaactgctgaatattatttgagctatttaaagcttattatattttagtatgaactaaatgaaggttaaaacatgcttaagaaaaatgcactgatttctgcattatgtgtacagtattggacaaaggattttattcattttgttgcattattttgaatattgtcttttcattttaataaagttataatacttatttatgata

SEQ ID NO: 414383 - DNA, 2696 bp, Homo sapiens
cgcggcgacggcggtccggtgcgaggcagagtgctagcgggagcgcgagccagcaagaggcgcctgcgcgatgtccgggcccctgagcccgcggcgctgagccagccgggacggacatgcgcgggagggcgccgcggggcagccgccgctcctccgggggaatgaaagctactggttgattttaaagtgcctgggcctcacaggtttggagatgtcccagaataaggcacaatgtcaatagcaggagttgctgctcaggagatcagagtcccattaaaaactggatttctacataatggccgagccatggggaatatgaggaagacctactggagcagtcgcagtgagtttaaaaacaactttttaaatattgacccgataaccatggcctacagtctgaactcttctgctcaggagcgcctaataccacttgggcatgcttccaaatctgctccgatgaatggccactgctttgcagaaaatggtccatctcaaaagtccagcttgccccctcttcttattcccccaagtgaaaacttgggaccacatgaagaggatcaagttgtatgtggttttaagaaactcacagtgaatggggtttgtgcttccacccctccactgacacccataaaaaactccccttcccttttcccctgtgcccctctttgtgaacggggttctaggcctcttccaccgttgccaatctctgaagccctctctctggatgacacagactgtgaggtggaattcctaactagctcagatacagacttccttttagaagactctacactttctgatttcaaatatgatgttcctggcaggcgaagcttccgtgggtgtggacaaatcaactatgcatattttgataccccagctgtttctgcagcagatctcagctatgtgtctgaccaaaatggaggtgtcccagatccaaatcctcctccacctcagacccaccgaagattaagaaggtctcattcgggaccagctggctcctttaacaagccagccataaggatatccaactgttgtatacacagagcttctcctaactccgatgaagacaaacctgaggttccccccagagttcccatacctcctagaccagtaaagccagattatagaagatggtcagcagaagttacttcgagcacctatagtgatgaagacaggcctcccaaagtaccgccaagagaacctttgtcaccgagtaactcgcgcacaccgagtcccaaaagccttccgtcttacctcaatggggtcatgcccccgacacagagctttgcccctgatcccaagtatgtcagcagcaaagcactgcaaagacagaacagcgaaggatctgccagtaaggttccttgcattctgcccattattgaaaatgggaagaaggttagttcaacacattattacctactacctgaacgaccaccatacctggacaaatatgaaaaatttttctttttatatatgcatacattacatacctatatataaacttgtggtataaccatagaccatagctgcaggttaaccaattagttactatcgtagagtaatatatattcagaataataaactcaagctggagaaatgagtcctgatagactgaaaattgagcaaatggaagaagatacagtattgtttagatcagaatcattaaaaaatatttttgtttagtaagtttgaagatttctggcttttaggccttttctattttgttccatttatttttgcaggcaatcttttccatggagggcagggtatccattctttaccatgggtgtacctgcttaggttaaaaatcataccaaggcctcatacttccaggtttcatgttgcgtcttgttgagggagggagagcaggttacttggcaaccatattgtcacctgtacctgtcacacatcttgaaaaataaaacgataatagaactagtgactaattttcccttacagttcctgcttggtcccacccactgaagtagctcatcgtagtgcgggccgtattagaggcagtggggtacgttagactcagatggaaaagtattctaggtgccagtgttaggatgtcagttttacaaaataatgaagcaattagctatgtgattgagagttattgtttggggatgtgtgttgtggttttgctttttttttttagactgtattaataaacatacaacacaagctggccttgtgttgctggttcctattcagtatttcctggggattgtttgctttttaagtaaaacacttctgacccatagctcagtatgtctgaattccagaggtcacatcagcatctttctgctttgaaaactctcacagctgtggctgcttcacttagatgcagtgagacacatagttggtgttccgattttcacatccttccatgtatttatcttgaagagataagcacagaagagaaggtgctcactaacagaggtacattactgcaatgttctcttaacagttaaacaagctgtttacagtttaaactgctgaatattatttgagctatttaaagcttattatattttagtatgaactaaatgaaggttaaaacatgcttaagaaaaatgcactgatttctgcattatgtgtacagtattggacaaaggattttattcattttgttgcattattttgaatattgtcttttcattttaataaagttataatacttatttatgata

SEQ ID NO: 414384 - DNA, 8320 bp, Homo sapiens
  misc_feature (1432)..(1432): n is a, c, g, or t
cgcggggcggcggggtggctgggccggcggcggcggcggtacgaggcgcgcgctcggggtcccggtcgcgaggaggaggaggatgtggcgcgcggaggggaaatggctgccgaaaacaagccggaagagcgtttcccaaagtgtattctgcggaactagcacctactgtgttctcaacaccgtgccacctatagaagatgatcatgggaacagcaatagtagtcatgtaaaaatctttttaccgaaaaagctgcttgaatgtctgccgaaatgttcaagtttaccaaaagagaggcaccgctggaacactaatgaggaaattgcagcttatttaataacatttgagaaacacgaagaatggctaaccacctcccctaagacaagaccacagaatggctcaatgatactctacaacaggaagaaagtgaaatacaggaaagatgggtattgctggaaaaagaggaaagatgggaaaacgaccagagaggaccacatgaaactcaaggtccagggagtggagtgcttgtacggctgctatgtccattcctccatcatccccaccttccaccggaggtgctactggctccttcagaaccccgacatcgtcctggtgcactacctgaacgtgccggccatcgaggactgcggcaagccttgcggccccatcctctgctccatcaacaccgacaagaaggagtgggcgaaatggacgaaagaagagctcatcgggcagctgaaacccatgttccatggcatcaagtggacctgcagcaatgggaacagcagctcaggcttctcggtggaacagctggtgcagcagatcctcgacagccaccagaccaagccccagccgcggacccacaactgcctctgcaccggcagcctgggagctggcggcagcgtgcatcacaagtgtaacagcgccaaacaccgcatcatctcgcccaaggtggagccacggacaggggggtacgggagccactcggaggtgcagcacaatgacgtgtcggagggcaagcacgagcacagccacagcaagggctccagccgtgagaagaggaacggcaaggtggccaagcccgtgctcctgcaccagagcagcaccgaggtctcctccaccaaccaggtggaagtccccgacaccacccagagctcccctgtgtccatcagcagcgggctcaacagcgacccggacatggtggacagcccggtggtcacaggtgtgtccggtatggcggtggcctctgtgatggggagcttgtcccagagcgccacggtgttcatgtcagaggtcaccaatgaggccgtgtacaccatgtcccccaccgctggccccaaccaccacctcctctcacctgacgcctctcagggcctcgtcctggccgtgagctctgatggccacaagttcgcctttcccaccacgggcagctcngagagcctgtccatgctgcccaccaacgtgtccgaagagctggtcctctccaccaccctcgacggtggccggaagattccagaaaccaccatgaactttgaccccgactgtttccttaataacccaaagcagggccagacgtacgggggtggaggcctgaaagccgagatggtcagctccaacatccggcactcgccacccggggagcggagcttcagctttaccaccgtcctcaccaaggagatcaagaccgaggacacctccttcgagcagcagatggccaaagaagcgtactcctcctccgcggcggctgtggcagccagctccctcaccctgaccgccggctccagcctcctgccgtcgggcggcggcctgagtcccagcaccaccctggagcagatggacttcagcgccatcgactccaacaaggactacacgtccagcttcagccagacgggccacagcccccacatccaccagaccccctccccgagcttcttcctgcaggacgccagcaaacccctccccgtcgagcagaacacccacagcagcctgagtgactctgggggcaccttcgtgatgcccacggtgaaaacggaggcctcgtcccaaaccagctcctgcagcggtcacgtggagacgcggatcgagtccacttcctccctccacctcatgcagttccaggccaacttccaggccatgacggcagaaggggaggtcaccatggagacctcgcaggcggcggaagggagcgaggtcctgctcaagtctggggagctgcaggcttgcagctctgagcactacctgcagccggagaccaacggggtaatccgaagcgccggcggcgtccccatcctcccgggcaacgtggtgcagggactctaccccgtggcccagcccagcctcggcaacgcctccaacatggagctcagcctggaccactttgacatctccttcagcaaccagttctccgacctgatcaacgacttcatctccgtggaggggggcagcagcaccatctatgggcaccagctggtgtcgggggacagcacggcgctctcacagtcagaggacggggcgcgggcccccttcacccaggcagagatgtgcctcccctgctgtagcccccagcagggtagcctgcagctgagcagctcggagggcggggccagcaccatggcctacatgcacgtcgccgaggtggtctcggccgcctcggcccagggcaccctaggcatgctgcagcagagcggacgggtgttcatggtgaccgactactccccagagtggtcttacccagagggaggagtgaaggtcctcatcacaggcccgtggcaagaagccagcaataactacagctgcctgtttgaccagatctcagtgcctgcatccctgattcagcctggggtgctgcgctgctactgcccagcccatgacactggtcttgtgaccctacaagttgccttcaacaaccagatcatctccaactcggtggtgtttgagtacaaagcccgggctctgcccacgctcccttcctcccagcacgactggctgtcgttggacgataaccagttcaggatgtccatcctggaacgactggagcagatggagaggaggatggccgagatgacggggtcccagcagcacaaacaggcgagcggaggcggcagcagtggaggcggcagcgggagcgggaatggagggagccaggcacagtgtgcttctgggactggggccttggggagctgctttgagagccgtgtggtcgtggtatgcgagaagatgatgagccgagcctgctgggcgaagtccaagcacttgatccactcaaagactttccgcggaatgaccctactccacctggccgctgcccagggctatgccaccctaatccagaccctcatcaaatggcgtacaaagcacgcggatagcattgacctggaactggaagttgaccccttgaatgtggaccacttctcctgtactcctctgatgtgggcgtgtgccctagggcacttggaagctgccgtcgtgctgtacaagtgggaccgtcgggccatctcgattcccgactctctaggaaggctgcctttgggaattgccaggtcacggggtcatgtgaaattagcagagtgtctggagcacctgcagagagatgagcaggctcagctgggacagaaccccagaatccactgtcctgcaagcgaagagcccagcacagagagctggatggcccagtggcacagcgaagccatcagctctccagaaatacccaagggagtcactgttattgcaagcaccaacccagagctgagaagacctcgttctgaaccctctaattactacagcagtgagagccacaaagattatccggctcccaaaaagcataaattgaaccctgagtacttccagacaaggcaggagaagctgcttcccactgcactgagtctggaagagccaaatatcaggaagcaaagccctagttctaagcagtctgtccccgagacactcagccccagtgaaggagtgagggacttcagccgggaactctcccctcccactccagagactgcagcatttcaagcctctggatctcagcctgtaggaaagtggaattccaaagatctttacattggtgtgtctacagtacaggtgactggaaatccgaaggggaccagtgtaggaaaggaggcagcaccttcacaggtgcgtccacgggaaccaatgagtgtcctgatgatggctaacagagaggtggtgaatacagagctggggtcctaccgtgatagtgcagaaaatgaagaatgcggccagcccatggatgacatacaggtgaacatgatgaccttggcagaacacattattgaagccacacctgaccgaatcaagcaggagaattttgtgcccatggagtcctcaggattggaaagaacagaccctgccaccattagcagtacaatgagctggctggccagttatctagcggatgctgactgccttcccagtgctgcccagatccgaagtgcatataacgagcctctaaccccttcttctaataccagcttgagccctgttggctctcccgtcagtgaaatcgctttcgagaaacctaaccttccctccgccgcggattggtcagaattcctgagtgcatctaccagtgagaaggtagagaatgagtttgctcagctcactctgtctgatcatgaacagagagaactctatgaggctgccaggcttgtccagacagctttccggaaatacaagggccgacccttgcgggaacagcaagaagtagctgctgctgttattcagcgttgttacagaaaatataaacagtacgcactttataaaaagatgacacaggctgccatccttatccagagcaaattccgaagttactatgaacaaaaaaaattccagcagagccgacgggctgctgtgctcatccaaaagtactaccgaagttataagaaatgtggcaaaagacggcaggctcgccggacggctgtgattgtacaacagaaactcaggagcagtttgctaaccaaaaagcaggatcaagctgctcgaaaaataatgaggtttcttcgccgctgtcgccacagccccctggtggaccataggctgtacaaaaggagtgaaagaattgaaaaaggccaaggaacttgaagacatacagcagcatcccttagcaatgtgacattgcttttcagactgttttcatttctgtttttagcagagacatgcaacaacaacacacacgcacacacgcacacacacacacgtacacacacatacaaaatccctctgcagttttggggagatcagctgcaggattttaacaggaatgttttggtcattgcatttgcactttcatggacaacttttaatttgatcagcaagacatcttggaactcaatcttctgttggatcacgggaaatcaagacacccaggaggaattgaaagaggcttcctcttctcaggaagaagccatttccttctcatatagggctgtattcaaacatcgtgtggaactgtacaaatatttataccaaaaatatagataagaaaaggtggggctatactagcaacaaaaaaagaatgctgttcctgcacctgccggttatttccaagaagctgaatctttgggactgattctcagtggagggcttagatcatacaaaaatctttattgggtccgtgtgttctcatttccttcactgtttatttttgtttgtttgtttgtttgttttaatctctacagcacatttaatgcaacttttgaaatctgcaggtttttaatgtcttgtggaaatttgcagaggggcaggtgtgtggtaaacgggtaatgcatgggaaataatgagaagcagctcacagagtttaaactattttcttgtccccaccaccttccaagaacctgcgagggtagtaatcatcttgtcccctttttcatgttcagcactttaatttttttgccttactttcatgtgcaatgagaattacttaagaattggtaacgcatgtagccttttttagtaaccttggaagctgtagtaattctaaggaatcatgaaccttgcctggacatttgccacctaaacgatcagtgtggtgctgcgttctggccagtaaattccatgtttttggctatatctcatccaaactgagcagtttctgtgtatatatagaaggtagaaatgaaaagtgagaaaatatttgaaagggattatattaattgctaaatattttattcacaaaggtcaataacatggcaagataaaattatttgtatagttttgtctgaatgagcgagaaaaatgtggatgtactgtttgtatatattgtatatattaaaacagagatatgtgcatgaaatcaagaaaaaagaaatgaacaaaagcaaagcattagtggctatggtctgtaaaatgaaacaaaaaaactttatttcactataagagtactttattttaaatgttctttaggagaacattttgctaaagcatgactaaactgcaaaaaaaaaaaaagagctactgtatttagacttaggaaaaaaggcagagtaacattacttaaaaaaaaaaggatatgtttacatttaattttggctaccaggagtttagtttattttatttaaaatttttttgccaatggtgccaagtaatgtgaatgctaatactgcttaagaaaattaagttacttttgcaaaacagataatcataagatgaatcagtatgtagcttaacaccatccactcactccaacaaagaacacttagaatgataaaaaaaaaaaaaaaaaacctgacaaaagaaatagtatgaaaagtagaaaaatgtcacgtttccatatctcctgctggaaatcagaaaatataataaaattgcacaaaaaaaaaaatgaaaaagatgcagactggtcttttagagacggcatggtatattactatttccacataatgaggagccaaagaaatctgatgtttttaacaattaaactgctaatgttaaattgagagaataaagttcgtatttgctgatgccagtttaaaattcccaggttacgtctgaggatcagttggtgtaaagctgagatgttttttcttggttctggctgccaactgtgagttaaaactcaaggcttgttgtgaagcctaaaaatattcacaaataagcttttaaactggtgtctttggaaggaaggtagatacaaaaagattgtgggtaaaaactggggtcagtgctcttggtgccttttctataattgtacttgttttttaattacttcctttcactgccaacctcgaattactgtacagtatatgtctttctgcttgtgatcagctttgacaacagtgacagccccacaactagtagccacctgtacatttgtaaactgacctgactccattttgtttttaaatgtgtgggttatgttgcagctgttgcagtcccccagatacctattattttacacaatttgacctataggaggacactgagtaatttacaaacacaactgcattcataaatgggaatagaacgtgaaagccagctctttcagaatatcctctattaatactgaatttagatatctttattccatttattatggtacaaataactgatgttttaaccagagtaatgacctcagtggatttgctttaaccctcacattttttttttaatgtttcacatgttacattattagctgaatacgttagaaaatgacagatggtagagacttccatagaattaagagggttctcatggaggggataggaagtaggtttaaagcctaccagtgtaacctaccagtacaactgtgaatcctaggcgaggcaaaaatgcacttccactgaaacgaagcatttctgaccgctttttcttggttatgaatcttaatttcgaatataagatgataggtaagcgcagctttcttggataatctgaattcccaagtgccaggagtaggatttcattataaaattaatagctaatcttattctatctcctgaagatttaattgctattgttacccattcgaaatcagctgtactgtgtgaacgaaataaagacaataatacgaacccctctctggctgcacggtcgcttatggcagttccacacagtagttggcgcccaatggggggtccctgagacttgcatgtaaaactagtctagatgtcttctttttttgtaagttttatttttgtaattgtgcatgtaaagcatcattgaatcaatggatctgttgaagaactcagctgctggaaaccatgcaaaatgttttgaattgcccttaaaatatggaaaatgttttctgaatgctttatattctttctgctgtaaattaaaaatgaagaaaatttccccata

SEQ ID NO: 414385 - DNA, 7966 bp, Homo sapiens
  misc_feature (1432)..(1432): n is a, c, g, or t
cgcggggcggcggggtggctgggccggcggcggcggcggtacgaggcgcgcgctcggggtcccggtcgcgaggaggaggaggatgtggcgcgcggaggggaaatggctgccgaaaacaagccggaagagcgtttcccaaagtgtattctgcggaactagcacctactgtgttctcaacaccgtgccacctatagaagatgatcatgggaacagcaatagtagtcatgtaaaaatctttttaccgaaaaagctgcttgaatgtctgccgaaatgttcaagtttaccaaaagagaggcaccgctggaacactaatgaggaaattgcagcttatttaataacatttgagaaacacgaagaatggctaaccacctcccctaagacaagaccacagaatggctcaatgatactctacaacaggaagaaagtgaaatacaggaaagatgggtattgctggaaaaagaggaaagatgggaaaacgaccagagaggaccacatgaaactcaaggtccagggagtggagtgcttgtacggctgctatgtccattcctccatcatccccaccttccaccggaggtgctactggctccttcagaaccccgacatcgtcctggtgcactacctgaacgtgccggccatcgaggactgcggcaagccttgcggccccatcctctgctccatcaacaccgacaagaaggagtgggcgaaatggacgaaagaagagctcatcgggcagctgaaacccatgttccatggcatcaagtggacctgcagcaatgggaacagcagctcaggcttctcggtggaacagctggtgcagcagatcctcgacagccaccagaccaagccccagccgcggacccacaactgcctctgcaccggcagcctgggagctggcggcagcgtgcatcacaagtgtaacagcgccaaacaccgcatcatctcgcccaaggtggagccacggacaggggggtacgggagccactcggaggtgcagcacaatgacgtgtcggagggcaagcacgagcacagccacagcaagggctccagccgtgagaagaggaacggcaaggtggccaagcccgtgctcctgcaccagagcagcaccgaggtctcctccaccaaccaggtggaagtccccgacaccacccagagctcccctgtgtccatcagcagcgggctcaacagcgacccggacatggtggacagcccggtggtcacaggtgtgtccggtatggcggtggcctctgtgatggggagcttgtcccagagcgccacggtgttcatgtcagaggtcaccaatgaggccgtgtacaccatgtcccccaccgctggccccaaccaccacctcctctcacctgacgcctctcagggcctcgtcctggccgtgagctctgatggccacaagttcgcctttcccaccacgggcagctcngagagcctgtccatgctgcccaccaacgtgtccgaagagctggtcctctccaccaccctcgacggtggccggaagattccagaaaccaccatgaactttgaccccgactgtttccttaataacccaaagcagggccagacgtacgggggtggaggcctgaaagccgagatggtcagctccaacatccggcactcgccacccggggagcggagcttcagctttaccaccgtcctcaccaaggagatcaagaccgaggacacctccttcgagcagcagatggccaaagaagcgtactcctcctccgcggcggctgtggcagccagctccctcaccctgaccgccggctccagcctcctgccgtcgggcggcggcctgagtcccagcaccaccctggagcagatggacttcagcgccatcgactccaacaaggactacacgtccagcttcagccagacgggccacagcccccacatccaccagaccccctccccgagcttcttcctgcaggacgccagcaaacccctccccgtcgagcagaacacccacagcagcctgagtgactctgggggcaccttcgtgatgcccacggtgaaaacggaggcctcgtcccaaaccagctcctgcagcggtcacgtggagacgcggatcgagtccacttcctccctccacctcatgcagttccaggccaacttccaggccatgacggcagaaggggaggtcaccatggagacctcgcaggcggcggaagggagcgaggtcctgctcaagtctggggagctgcaggcttgcagctctgagcactacctgcagccggagaccaacggggtaatccgaagcgccggcggcgtccccatcctcccgggcaacgtggtgcagggactctaccccgtggcccagcccagcctcggcaacgcctccaacatggagctcagcctggaccactttgacatctccttcagcaaccagttctccgacctgatcaacgacttcatctccgtggaggggggcagcagcaccatctatgggcaccagctggtgtcgggggacagcacggcgctctcacagtcagaggacggggcgcgggcccccttcacccaggcagagatgtgcctcccctgctgtagcccccagcagggtagcctgcagctgagcagctcggagggcggggccagcaccatggcctacatgcacgtcgccgaggtggtctcggccgcctcggcccagggcaccctaggcatgctgcagcagagcggacgggtgttcatggtgaccgactactccccagagtggtcttacccagagggaggagtgaaggtcctcatcacaggcccgtggcaagaagccagcaataactacagctgcctgtttgaccagatctcagtgcctgcatccctgattcagcctggggtgctgcgctgctactgcccagcccatgacactggtcttgtgaccctacaagttgccttcaacaaccagatcatctccaactcggtggtgtttgagtacaaagcccgggctctgcccacgctcccttcctcccagcacgactggctgtcgttggacgataaccagttcaggatgtccatcctggaacgactggagcagatggagaggaggatggccgagatgacggggtcccagcagcacaaacaggcgagcggaggcggcagcagtggaggcggcagcgggagcgggaatggagggagccaggcacagtgtgcttctgggactggggccttggggagctgctttgagagccgtgtggtcgtggtatgcgagaagatgatgagccgagcctgctgggcgaagtccaagcacttgatccactcaaagactttccgcggaatgaccctactccacctggccgctgcccagggctatgccaccctaatccagaccctcatcaaatggcgtacaaagcacgcggatagcattgacctggaactggaagttgaccccttgaatgtggaccacttctcctgtactcctctgatgtgggcgtgtgccctagggcacttggaagctgccgtcgtgctgtacaagtgggaccgtcgggccatctcgattcccgactctctaggaaggctgcctttgggaattgccaggtcacggggtcatgtgaaattagcagagtgtctggagcacctgcagagagatgagcaggctcagctgggacagaaccccagaatccactgtcctgcaagcgaagagcccagcacagagagctggatggcccagtggcacagcgaagccatcagctctccagaaatacccaagggagtcactgttattgcaagcaccaacccagagctgagaagacctcgttctgaaccctctaattactacagcagtgagagccacaaagattatccggctcccaaaaagcataaattgaaccctgagtacttccagacaaggcaggagaagctgcttcccactgcactgagtctggaagagccaaatatcaggaagcaaagccctagttctaagcagtctgtccccgagacactcagccccagtgaaggagtgagggacttcagccgggaactctcccctcccactccagagactgcagcatttcaagcctctggatctcagcctgtaggaaagtggaattccaaagatctttacattggtgtgtctacagtacaggtgactggaaatccgaaggggaccagtgtaggaaaggaggcagcaccttcacaggtgcgtccacgggaaccaatgagtgtcctgatgatggctaacagagaggtggtgaatacagagctggggtcctaccgtgatagtgcagaaaatgaagaatgcggccagcccatggatgacatacaggtgaacatgatgaccttggcagaacacattattgaagccacacctgaccgaatcaagcaggagaattttgtgcccatggagtcctcaggattggaaagaacagaccctgccaccattagcagtacaatgagctggctggccagttatctagcggatgctgactgccttcccagtgctgcccagatccgaagtgcatataacgagcctctaaccccttcttctaataccagcttgagccctgttggctctcccgtcagtgaaatcgctttcgagaaacctaaccttccctccgccgcggattggtcagaattcctgagtgcatctaccagtgagaaggtagagaatgagtttgctcagctcactctgtctgatcatgaacagagagaactctatgaggctgccaggcttgtccagacagctttccggaaatacaagggccgacccttgcgggaacagcaagaagtagctgctgctgttattcagcgttgttacagaaaatataaacagtacgcactttataaaaagatgacacaggctgccatccttatccagagcaaattccgaagttactatgaacaaaaaaaattccagcagagccgacgggctgctgtgctcatccaaaagtactaccgaagttataagaaatgtggcaaaagacggcaggctcgccggacggctgtgattgtacaacagaaactcaggagcagtttgctaaccaaaaagcaggatcaagctgctcgaaaaataatgaggtttcttcgccgctgtcgccacagccccctggtggaccataggctgtacaaaaggagtgaaagaattgaaaaaggccaaggaacttgaagacatacagcagcatcccttagcaatgtgacattgcttttcagactgttttcatttctgtttttagcagagacatgcaacaacaacacacacgcacacacgcacacacacacacgtacacacacatacaaaatccctctgcagttttggggagatcagctgcaggattttaacaggaatgttttggtcattgcatttgcactttcatggacaacttttaatttgatcagcaagacatcttggaactcaatcttctgttggatcacgggaaatcaagacacccaggaggaattgaaagaggcttcctcttctcaggaagaagccatttccttctcatatagggctgtattcaaacatcgtgtggaactgtacaaatatttataccaaaaatatagataagaaaaggtggggctatactagcaacaaaaaaagaatgctgttcctgcacctgccggttatttccaagaagctgaatctttgggactgattctcagtggagggcttagatcatacaaaaatctttattgggtccgtgtgttctcatttccttcactgtttatttttgtttgtttgtttgtttgttttaatctctacagcacatttaatgcaacttttgaaatctgcaggtttttaatgtcttgtggaaatttgcagaggggcaggtgtgtggtaaacgggtaatgcatgggaaataatgagaagcagctcacagagtttaaactattttcttgtccccaccaccttccaagaacctgcgagggtagtaatcatcttgtcccctttttcatgttcagcactttaatttttttgccttactttcatgtgcaatgagaattacttaagaattggtaacgcatgtagccttttttagtaaccttggaagctgtagtaattctaaggaatcatgaaccttgcctggacatttgccacctaaacgatcagtgtggtgctgcgttctggccagtaaattccatgtttttggctatatctcatccaaactgagcagtttctgtgtatatatagaaggtagaaatgaaaagtgagaaaatatttgaaagggattatattaattgctaaatattttattcacaaaggtcaataacatggcaagataaaattatttgtatagttttgtctgaatgagcgagaaaaatgtggatgtactgtttgtatatattgtatatattaaaacagagatatgtgcatgaaatcaagaaaaaagaaatgaacaaaagcaaagcattagtggctatggtctgtaaaatgaaacaaaaaaactttatttcactataagagtactttattttaaatgttctttaggagaacattttgctaaagcatgactaaactgcaaaaaaaaaaaaagagctactgtatttagacttaggaaaaaaggcagagtaacattacttaaaaaaaaaaggatatgtttacatttaattttggctaccaggagtttagtttattttatttaaaatttttttgccaatggtgccaagtaatgtgaatgctaatactgcttaagaaaattaagttacttttgcaaaacagataatcataagatgaatcagtatgtagcttaacaccatccactcactccaacaaagaacacttagaatgataaaaaaaaaaaaaaaaaacctgacaaaagaaatagtatgaaaagtagaaaaatgtcacgtttccatatctcctgctggaaatcagaaaatataataaaattgcacaaaaaaaaaaatgaaaaagatgcagactggtcttttagagacggcatggtatattactatttccacataatgaggagccaaagaaatctgatgtttttaacaattaaactgctaatgttaaattgagagaataaagttcgtatttgctgatgccagtttaaaattcccaggttacgtctgaggatcagttggtgtaaagctgagatgttttttcttggttctggctgccaactgtgagttaaaactcaaggcttgttgtgaagcctaaaaatattcacaaataagcttttaaactggtgtctttggaaggaaggtagatacaaaaagattgtgggtaaaaactggggtcagtgctcttggtgccttttctataattgtacttgttttttaattacttcctttcactgccaacctcgaattactgtacagtatatgtctttctgcttgtgatcagctttgacaacagtgacagccccacaactagtagccacctgtacatttgtaaactgacctgactccattttgtttttaaatgtgtgggttatgttgcagctgttgcagtcccccagatacctattattttacacaatttgacctataggaggacactgagtaatttacaaacacaactgcattcataaatgggaatagaacgtgaaagccagctctttcagaatatcctctattaatactgaatttagatatctttattccatttattatggtacaaataactgatgttttaaccagagtaatgacctcagtggatttgctttaaccctcacattttttttttaatgtttcacatgttacattattagctgaatacgttagaaaatgacagatggtagagacttccatagaattaagagggttctcatggaggggataggaagtaggtttaaagcctaccagtgtaacctaccagtacaactgtgaatcctaggcgggctgctttccttgaaacgaaacttctgacggtttcctgggtagaatctaattcgaatttggagaggaacccaatcgggaaacggatcccaggcggacggatccttacataagggacttaaacccgtgcgtgtgccgcggcgggggcccagcatagacctctggggcggtccccatggccaggggc

SEQ ID NO: 414386 - DNA, 963 bp, Homo sapiens
acatgtaagtgctacgcaagtaacgccttttgacccacagtttgggaccttaggccgcaggcctctcttaatatccaccgctacagtatcacagagttaattacaccagacctgcactaaagggaataatagaaagattggtctttggcagaagagaaatgatcctgcatggcagctttaagatgcgtggaaaagtgaagaccaaagaaaggagaaataagatgagatcatgatgcagccgtccttttggatttctttttaataatgtgtgacccttcacctttgatcccctgacctgcattaccttggtcttaaaattttggtagcagaaagcaaatgtgcaaagagcaatggaaaacaagtcagaagctgctgtctgattccagaggaactcgtattttatgttaaaaaaaatgctctcaccacacacttgttcatgggcgcagcaaagaagagggatccacagagctggagccatgagggctgacacattggaatgaaagctggcagaattcgtagggagagctttcccatcctgccagccccatgtctggctttaagacagttctattagtgaattaactgttctcaaaaccccaaattaatttgaaccgaatgttactaaaaatgaaatagaataaagtgacctactcttgcctcatccggagttattacgaaggagctccgcagcctgactgagctctggagagcagggctctgtgcacacgcctcctggtccagaggcctccgtgaccatccatgatgccactctgtcccctcagcaagctgcctttttcttcctagcacctgccccagcggtggtatgttttccagtcagttaccacctgtctcatcagaatggaagctccatgagagcagggcctttgtcttgtccccttgtatctccagtgcataggacagtgctgacacagtgcagagtctaaataaacgctgttgaacgaa

SEQ ID NO: 414387 - DNA, 948 bp, Homo sapiens
cgcggggcggcggggtggctgggccggcggcggcggcggtacgaggcgcgcgctcggggtcccggtcgcgaggaggaggaggatgtggcgcgcggaggggaaatggctgccgaaaacaagccggaagagcgtttcccaaagtgtattctgcggaactagcacctactgtgttctcaacaccgtgccacctatagaagatgatcatgggaacagcaatagtagtcatgtaaaaatctttttaccgaaaaagctgcttgaatgtctgccgaaatgttcaagtttaccaaaagagaggcaccgctggaacactaatgagagatcatgatgcagccgtccttttggatttctttttaataatgtgtgacccttcacctttgatcccctgacctgcattaccttggctctcaccacacacttgttcatgggcgcagcaaagaagagggatccacagagctggagccatgagggctgacacattggaatgaaagctggcagaattcgtagggagagctttcccatcctgccagccccatgtctggctttaagacagttctattagtgaattaactgttctcaaaaccccaaattaatttgaaccgaatgttactaaaaatgaaatagaataaagtgacctactcttgcctcatccggagttattacgaaggagctccgcagcctgactgagctctggagagcagggctctgtgcacacgcctcctggtccagaggcctccgtgaccatccatgatgccactctgtcccctcagcaagctgcctttttcttcctagcacctgccccagcggtggtatgttttccagtcagttaccacctgtctcatcagaatggaagctccatgagagcagggcctttgtcttgtccccttgtatctccagtgcataggacagtgctgacacagtgcagagtctaaataaacgctgttgaacgaa

SEQ ID NO: 414388 - DNA, 1057 bp, Homo sapiens
  misc_feature (1)..(1): n is a, c, g, or t
  misc_feature (28)..(28): n is a, c, g, or t
ngctcgccgaaaacaagccggacgcganaggaaggacagacccagtctctgtccttatggagctaagggggagacggacattaatcaagatgccatatgaaatttcagctgggactcagtgctgtgaagagcgtttcccaaagtgtattctgcggaactagcacctactgtgttctcaacaccgtgccacctatagaagatgatcatgggaacagcaatagtagtcatgtaaaaatctttttaccgaaaaagctgcttgaatgtctgccgaaatgttcaagtttaccaaaagagaggcaccgctggaacactaatgagagatcatgatgcagccgtccttttggatttctttttaataatgtgtgacccttcacctttgatcccctgacctgcattaccttggtcttaaaattttggtagcagaaagcaaatgtgcaaagagcaatggaaaacaagtcagaagctgctgtctgattccagaggaactcgtattttatgttaaaaaaaatgctctcaccacacacttgttcatgggcgcagcaaagaagagggatccacagagctggagccatgagggctgacacattggaatgaaagctggcagaattcgtagggagagctttcccatcctgccagccccatgtctggctttaagacagttctattagtgaattaactgttctcaaaaccccaaattaatttgaaccgaatgttactaaaaatgaaatagaataaagtgacctactcttgcctcatccggagttattacgaaggagctccgcagcctgactgagctctggagagcagggctctgtgcacacgcctcctggtccagaggcctccgtgaccatccatgatgccactctgtcccctcagcaagctgcctttttcttcctagcacctgccccagcggtggtatgttttccagtcagttaccacctgtctcatcagaatggaagctccatgagagcagggcctttgtcttgtccccttgtatctccagtgcataggacagtgctgacacagtgcagagtctaaataaacgctgttgaacgaa

SEQ ID NO: 414389 - DNA, 691 bp, Homo sapiens
aatcgaaccgcgacgcggcctgatcgcataaatagaaaaaaacttatggacacaagcagagatcatgatgcagccgtccttttggatttctttttaataatgtgtgacccttcacctttgatcccctgacctgcattaccttggctctcaccacacacttgttcatgggcgcagcaaagaagagggatccacagagctggagccatgagggctgacacattggaatgaaagctggcagaattcgtagggagagctttcccatcctgccagccccatgtctggctttaagacagttctattagtgaattaactgttctcaaaaccccaaattaatttgaaccgaatgttactaaaaatgaaatagaataaagtgacctactcttgcctcatccggagttattacgaaggagctccgcagcctgactgagctctggagagcagggctctgtgcacacgcctcctggtccagaggcctccgtgaccatccatgatgccactctgtcccctcagcaagctgcctttttcttcctagcacctgccccagcggtggtatgttttccagtcagttaccacctgtctcatcagaatggaagctccatgagagcagggcctttgtcttgtccccttgtatctccagtgcataggacagtgctgacacagtgcagagtctaaataaacgctgttgaacgaa

SEQ ID NO: 414390 - DNA, 8307 bp, Homo sapiens
  misc_feature (108)..(108): n is a, c, g, or t
  misc_feature (1429)..(1429): n is a, c, g, or t
aacctctgcggatgatgacatggcttcactcgtgtttcattcaacaagcatgtgcagtgaccacagatttggggatcttgaaatgatgtcttctcaaaatagcgaggngagtgagaaagagaagagcgtttcccaaagtgtattctgcggaactagcacctactgtgttctcaacaccgtgccacctatagaagatgatcatgggaacagcaatagtagtcatgtaaaaatctttttaccgaaaaagctgcttgaatgtctgccgaaatgttcaagtttaccaaaagagaggcaccgctggaacactaatgaggaaattgcagcttatttaataacatttgagaaacacgaagaatggctaaccacctcccctaagacaagaccacagaatggctcaatgatactctacaacaggaagaaagtgaaatacaggaaagatgggtattgctggaaaaagaggaaagatgggaaaacgaccagagaggaccacatgaaactcaaggtccagggagtggagtgcttgtacggctgctatgtccattcctccatcatccccaccttccaccggaggtgctactggctccttcagaaccccgacatcgtcctggtgcactacctgaacgtgccggccatcgaggactgcggcaagccttgcggccccatcctctgctccatcaacaccgacaagaaggagtgggcgaaatggacgaaagaagagctcatcgggcagctgaaacccatgttccatggcatcaagtggacctgcagcaatgggaacagcagctcaggcttctcggtggaacagctggtgcagcagatcctcgacagccaccagaccaagccccagccgcggacccacaactgcctctgcaccggcagcctgggagctggcggcagcgtgcatcacaagtgtaacagcgccaaacaccgcatcatctcgcccaaggtggagccacggacaggggggtacgggagccactcggaggtgcagcacaatgacgtgtcggagggcaagcacgagcacagccacagcaagggctccagccgtgagaagaggaacggcaaggtggccaagcccgtgctcctgcaccagagcagcaccgaggtctcctccaccaaccaggtggaagtccccgacaccacccagagctcccctgtgtccatcagcagcgggctcaacagcgacccggacatggtggacagcccggtggtcacaggtgtgtccggtatggcggtggcctctgtgatggggagcttgtcccagagcgccacggtgttcatgtcagaggtcaccaatgaggccgtgtacaccatgtcccccaccgctggccccaaccaccacctcctctcacctgacgcctctcagggcctcgtcctggccgtgagctctgatggccacaagttcgcctttcccaccacgggcagctcngagagcctgtccatgctgcccaccaacgtgtccgaagagctggtcctctccaccaccctcgacggtggccggaagattccagaaaccaccatgaactttgaccccgactgtttccttaataacccaaagcagggccagacgtacgggggtggaggcctgaaagccgagatggtcagctccaacatccggcactcgccacccggggagcggagcttcagctttaccaccgtcctcaccaaggagatcaagaccgaggacacctccttcgagcagcagatggccaaagaagcgtactcctcctccgcggcggctgtggcagccagctccctcaccctgaccgccggctccagcctcctgccgtcgggcggcggcctgagtcccagcaccaccctggagcagatggacttcagcgccatcgactccaacaaggactacacgtccagcttcagccagacgggccacagcccccacatccaccagaccccctccccgagcttcttcctgcaggacgccagcaaacccctccccgtcgagcagaacacccacagcagcctgagtgactctgggggcaccttcgtgatgcccacggtgaaaacggaggcctcgtcccaaaccagctcctgcagcggtcacgtggagacgcggatcgagtccacttcctccctccacctcatgcagttccaggccaacttccaggccatgacggcagaaggggaggtcaccatggagacctcgcaggcggcggaagggagcgaggtcctgctcaagtctggggagctgcaggcttgcagctctgagcactacctgcagccggagaccaacggggtaatccgaagcgccggcggcgtccccatcctcccgggcaacgtggtgcagggactctaccccgtggcccagcccagcctcggcaacgcctccaacatggagctcagcctggaccactttgacatctccttcagcaaccagttctccgacctgatcaacgacttcatctccgtggaggggggcagcagcaccatctatgggcaccagctggtgtcgggggacagcacggcgctctcacagtcagaggacggggcgcgggcccccttcacccaggcagagatgtgcctcccctgctgtagcccccagcagggtagcctgcagctgagcagctcggagggcggggccagcaccatggcctacatgcacgtcgccgaggtggtctcggccgcctcggcccagggcaccctaggcatgctgcagcagagcggacgggtgttcatggtgaccgactactccccagagtggtcttacccagagggaggagtgaaggtcctcatcacaggcccgtggcaagaagccagcaataactacagctgcctgtttgaccagatctcagtgcctgcatccctgattcagcctggggtgctgcgctgctactgcccagcccatgacactggtcttgtgaccctacaagttgccttcaacaaccagatcatctccaactcggtggtgtttgagtacaaagcccgggctctgcccacgctcccttcctcccagcacgactggctgtcgttggacgataaccagttcaggatgtccatcctggaacgactggagcagatggagaggaggatggccgagatgacggggtcccagcagcacaaacaggcgagcggaggcggcagcagtggaggcggcagcgggagcgggaatggagggagccaggcacagtgtgcttctgggactggggccttggggagctgctttgagagccgtgtggtcgtggtatgcgagaagatgatgagccgagcctgctgggcgaagtccaagcacttgatccactcaaagactttccgcggaatgaccctactccacctggccgctgcccagggctatgccaccctaatccagaccctcatcaaatggcgtacaaagcacgcggatagcattgacctggaactggaagttgaccccttgaatgtggaccacttctcctgtactcctctgatgtgggcgtgtgccctagggcacttggaagctgccgtcgtgctgtacaagtgggaccgtcgggccatctcgattcccgactctctaggaaggctgcctttgggaattgccaggtcacggggtcatgtgaaattagcagagtgtctggagcacctgcagagagatgagcaggctcagctgggacagaaccccagaatccactgtcctgcaagcgaagagcccagcacagagagctggatggcccagtggcacagcgaagccatcagctctccagaaatacccaagggagtcactgttattgcaagcaccaacccagagctgagaagacctcgttctgaaccctctaattactacagcagtgagagccacaaagattatccggctcccaaaaagcataaattgaaccctgagtacttccagacaaggcaggagaagctgcttcccactgcactgagtctggaagagccaaatatcaggaagcaaagccctagttctaagcagtctgtccccgagacactcagccccagtgaaggagtgagggacttcagccgggaactctcccctcccactccagagactgcagcatttcaagcctctggatctcagcctgtaggaaagtggaattccaaagatctttacattggtgtgtctacagtacaggtgactggaaatccgaaggggaccagtgtaggaaaggaggcagcaccttcacaggtgcgtccacgggaaccaatgagtgtcctgatgatggctaacagagaggtggtgaatacagagctggggtcctaccgtgatagtgcagaaaatgaagaatgcggccagcccatggatgacatacaggtgaacatgatgaccttggcagaacacattattgaagccacacctgaccgaatcaagcaggagaattttgtgcccatggagtcctcaggattggaaagaacagaccctgccaccattagcagtacaatgagctggctggccagttatctagcggatgctgactgccttcccagtgctgcccagatccgaagtgcatataacgagcctctaaccccttcttctaataccagcttgagccctgttggctctcccgtcagtgaaatcgctttcgagaaacctaaccttccctccgccgcggattggtcagaattcctgagtgcatctaccagtgagaaggtagagaatgagtttgctcagctcactctgtctgatcatgaacagagagaactctatgaggctgccaggcttgtccagacagctttccggaaatacaagggccgacccttgcgggaacagcaagaagtagctgctgctgttattcagcgttgttacagaaaatataaacagctgacatggttagccttgaagtacgcactttataaaaagatgacacaggctgccatccttatccagagcaaattccgaagttactatgaacaaaaaaaattccagcagagccgacgggctgctgtgctcatccaaaagtactaccgaagttataagaaatgtggcaaaagacggcaggctcgccggacggctgtgattgtacaacagaaactcaggagcagtttgctaaccaaaaagcaggatcaagctgctcgaaaaataatgaggtttcttcgccgctgtcgccacagagtgaaagaattgaaaaaggccaaggaacttgaagacatacagcagcatcccttagcaatgtgacattgcttttcagactgttttcatttctgtttttagcagagacatgcaacaacaacacacacgcacacacgcacacacacacacgtacacacacatacaaaatccctctgcagttttggggagatcagctgcaggattttaacaggaatgttttggtcattgcatttgcactttcatggacaacttttaatttgatcagcaagacatcttggaactcaatcttctgttggatcacgggaaatcaagacacccaggaggaattgaaagaggcttcctcttctcaggaagaagccatttccttctcatatagggctgtattcaaacatcgtgtggaactgtacaaatatttataccaaaaatatagataagaaaaggtggggctatactagcaacaaaaaaagaatgctgttcctgcacctgccggttatttccaagaagctgaatctttgggactgattctcagtggagggcttagatcatacaaaaatctttattgggtccgtgtgttctcatttccttcactgtttatttttgtttgtttgtttgtttgttttaatctctacagcacatttaatgcaacttttgaaatctgcaggtttttaatgtcttgtggaaatttgcagaggggcaggtgtgtggtaaacgggtaatgcatgggaaataatgagaagcagctcacagagtttaaactattttcttgtccccaccaccttccaagaacctgcgagggtagtaatcatcttgtcccctttttcatgttcagcactttaatttttttgccttactttcatgtgcaatgagaattacttaagaattggtaacgcatgtagccttttttagtaaccttggaagctgtagtaattctaaggaatcatgaaccttgcctggacatttgccacctaaacgatcagtgtggtgctgcgttctggccagtaaattccatgtttttggctatatctcatccaaactgagcagtttctgtgtatatatagaaggtagaaatgaaaagtgagaaaatatttgaaagggattatattaattgctaaatattttattcacaaaggtcaataacatggcaagataaaattatttgtatagttttgtctgaatgagcgagaaaaatgtggatgtactgtttgtatatattgtatatattaaaacagagatatgtgcatgaaatcaagaaaaaagaaatgaacaaaagcaaagcattagtggctatggtctgtaaaatgaaacaaaaaaactttatttcactataagagtactttattttaaatgttctttaggagaacattttgctaaagcatgactaaactgcaaaaaaaaaaaaagagctactgtatttagacttaggaaaaaaggcagagtaacattacttaaaaaaaaaaggatatgtttacatttaattttggctaccaggagtttagtttattttatttaaaatttttttgccaatggtgccaagtaatgtgaatgctaatactgcttaagaaaattaagttacttttgcaaaacagataatcataagatgaatcagtatgtagcttaacaccatccactcactccaacaaagaacacttagaatgataaaaaaaaaaaaaaaaaacctgacaaaagaaatagtatgaaaagtagaaaaatgtcacgtttccatatctcctgctggaaatcagaaaatataataaaattgcacaaaaaaaaaaatgaaaaagatgcagactggtcttttagagacggcatggtatattactatttccacataatgaggagccaaagaaatctgatgtttttaacaattaaactgctaatgttaaattgagagaataaagttcgtatttgctgatgccagtttaaaattcccaggttacgtctgaggatcagttggtgtaaagctgagatgttttttcttggttctggctgccaactgtgagttaaaactcaaggcttgttgtgaagcctaaaaatattcacaaataagcttttaaactggtgtctttggaaggaaggtagatacaaaaagattgtgggtaaaaactggggtcagtgctcttggtgccttttctataattgtacttgttttttaattacttcctttcactgccaacctcgaattactgtacagtatatgtctttctgcttgtgatcagctttgacaacagtgacagccccacaactagtagccacctgtacatttgtaaactgacctgactccattttgtttttaaatgtgtgggttatgttgcagctgttgcagtcccccagatacctattattttacacaatttgacctataggaggacactgagtaatttacaaacacaactgcattcataaatgggaatagaacgtgaaagccagctctttcagaatatcctctattaatactgaatttagatatctttattccatttattatggtacaaataactgatgttttaaccagagtaatgacctcagtggatttgctttaaccctcacattttttttttaatgtttcacatgttacattattagctgaatacgttagaaaatgacagatggtagagacttccatagaattaagagggttctcatggaggggataggaagtaggtttaaagcctaccagtgtaacctaccagtacaactgtgaatcctaggcgaggcaaaaatgcacttccactgaaacgaagcatttctgaccgctttttcttggttatgaatcttaatttcgaatataagatgataggtaagcgcagctttcttggataatctgaattcccaagtgccaggagtaggatttcattataaaattaatagctaatcttattctatctcctgaagatttaattgctattgttacccattcgaaatcagctgtactgtgtgaacgaaataaagacaataatacgaacccctctctggctgcacggtcgcttatggcagttccacacagtagttggcgcccaatggggggtccctgagacttgcatgtaaaactagtctagatgtcttctttttttgtaagttttatttttgtaattgtgcatgtaaagcatcattgaatcaatggatctgttgaagaactcagctgctggaaaccatgcaaaatgttttgaattgcccttaaaatatggaaaatgttttctgaatgctttatattctttctgctgtaaattaaaaatgaagaaaatttccccata

SEQ ID NO: 414391 - DNA, 1081 bp, Homo sapiens
gagaagattagcatggcccctgcgccaaggatgacacgcaaattcgtgaagcgttccatatttctgttttatcctctgtgaaatgtagatactgtgtgtctcccacttgctttttagggttgttgggaggataaatgaaactgtatgacagacacactgggaactcagaagaaaggtgctgttgaaactgaacctcatcctatggctgtgccgttggcaggcataaccggtgtgctgagaggcagtggtagtgaaccccgtggtgaaaggccaggaccatgggctctggagccaggctgccttggttcgaatcccacctcgacctcttgcaagtggtctgaccacagcaaatcacccaacctctctgtgcctgagtttccccctctttaaattggggatgataatagtacccactaaaggatcctggtcttaaaattttggtagcagaaagcaaatgtgcaaagagcaatggaaaacaagtcagaagctgctgtctgattccagaggaactcgtattttatgttaaaaaaaatgctctcaccacacacttgttcatgggcgcagcaaagaagagggatccacagagctggagccatgagggctgacacattggaatgaaagctggcagaattcgtagggagagctttcccatcctgccagccccatgtctggctttaagacagttctattagtgaattaactgttctcaaaaccccaaattaatttgaaccgaatgttactaaaaatgaaatagaataaagtgacctactcttgcctcatccggagttattacgaaggagctccgcagcctgactgagctctggagagcagggctctgtgcacacgcctcctggtccagaggcctccgtgaccatccatgatgccactctgtcccctcagcaagctgcctttttcttcctagcacctgccccagcggtggtatgttttccagtcagttaccacctgtctcatcagaatggaagctccatgagagcagggcctttgtcttgtccccttgtatctccagtgcataggacagtgctgacacagtgcagagtctaaataaacgctgttgaacgaa

SEQ ID NO: 414392 - DNA, 888 bp, Homo sapiens
aaaaaatttttgtggcctcttaaagataaaacctacaacccaataaaagtcatgctgtaacgattgcaaaaagaccattgtatgagacccagttttggattatcataggcgaagaagtcagacatatatggttgtatgtacatgtgtatagtatgtgggtgggggtagatacatacctgttcatctgtatacgtatgtgtgtgtttaatatatactttagtttgcctttacccagatgtctcctcctctctctgcctctggaaatggggcaaatttttcttcagttaaaaacagaaatagaagcgacggttttgacccattttacacctatttatttcaggctctcaccacacacttgttcatgggcgcagcaaagaagagggatccacagagctggagccatgagggctgacacattggaatgaaagctggcagaattcgtagggagagctttcccatcctgccagccccatgtctggctttaagacagttctattagtgaattaactgttctcaaaaccccaaattaatttgaaccgaatgttactaaaaatgaaatagaataaagtgacctactcttgcctcatccggagttattacgaaggagctccgcagcctgactgagctctggagagcagggctctgtgcacacgcctcctggtccagaggcctccgtgaccatccatgatgccactctgtcccctcagcaagctgcctttttcttcctagcacctgccccagcggtggtatgttttccagtcagttaccacctgtctcatcagaatggaagctccatgagagcagggcctttgtcttgtccccttgtatctccagtgcataggacagtgctgacacagtgcagagtctaaataaacgctgttgaacgaa

SEQ ID NO: 414393 - DNA, 1172 bp, Homo sapiens
cgcggggcggcggggtggctgggccggcggcggcggcggtacgaggcgcgcgctcggggtcccggtcgcgaggaggaggaggatgtggcgcgcggaggggaaatggctgccgaaaacaagccggaagagcgtttcccaaagtgtattctgcggaactagcacctactgtgttctcaacaccgtgccacctatagaagatgatcatgggaacagcaatagtagtcatgtaaaaatctttttaccgaaaaagctgcttgaatgtctgccgaaatgttcaagtttaccaaaagagaggcaccgctggaacactaatgagagatcatgatgcagccgtccttttggatttctttttaataatgtgtgacccttcacctttgatcccctgacctgcattaccttggctctcaccacacacttgttcatgggcgcagcaaagaagagggatccacagagctggagccatgagggctgacacattggaatgaaagctggcagaattcgtagggagagctttcccatcctgccagccccatgtctggctttaagacagttctattagtgaattaactgttctcaaaaccccaaattaatttgaaccgaatgttactaaaaatgaaatagaataaagtgacctactcttgcctcatccggagttattacgaaggagctccgcagcctgactgagctctggagagcagggctctgtgcacacgcctcctggtccagaggcctccgtgaccatccatgatgccactctgtcccctcagcaagctgcctttttcttcctagcacctgccccagcggtggtatgttttccagtcagttaccacctgtctcatcagaatggaagctccatgagagcagggcctttgtcttgtccccttgtatctccagtgcataggacagtgctgacacagtgcagagtctaaataaacgctgttgaacgaaaaaaaaaagtatattgtttattaatataatgtgtagatgggaccataaagtattgatacgtatattatggcggagaaagcaacaaaaaaaaggggggggttattatgtgtggggagagatgcaattttagaagggttaataagtatttgagggggggaaggggagatgcgtttttggactttgggatatacacaaagggaaattggttatagggggggagaaaa

SEQ ID NO: 414394 - DNA, 561 bp, Homo sapiens
cgcggggcggcggggtggctgggccggcggcggcggcggtacgaggcgcgcgctcggggtcccggtcgcgaggaggaggaggatgtggcgcgcggaggggaaatggctgccgaaaacaagccggaagatgatcatgggaacagcaatagtagtcatgtaaaaatctttttaccgaaaaagctgcttgaatgtctgccgaaatgttcaagtttaccaaaagagaggcaccgctggaacactaatgagagatcatgatgcagccgtccttttggatttctttttaataatgtgtgacccttcacctttgatcccctgacctgcattaccttggtaaccatttcattttttaatttaatttcattttttaattttggtgtacaagctgtaacatttcatctttcaaagtgtaacacgctgatttcctcaaatagagatacccctttgagtgataaatttgcaaaatgctgtcttcattttctgtattaaaattcatttcagttttaaaataaagtgtaatctgtgttttcatccttttaaaaaaaaaaaaactctccaggcgct

SEQ ID NO: 414395 - DNA, 5311 bp, Homo sapiens
  misc_feature (108)..(108): n is a, c, g, or t
  misc_feature (1429)..(1429): n is a, c, g, or t
aacctctgcggatgatgacatggcttcactcgtgtttcattcaacaagcatgtgcagtgaccacagatttggggatcttgaaatgatgtcttctcaaaatagcgaggngagtgagaaagagaagagcgtttcccaaagtgtattctgcggaactagcacctactgtgttctcaacaccgtgccacctatagaagatgatcatgggaacagcaatagtagtcatgtaaaaatctttttaccgaaaaagctgcttgaatgtctgccgaaatgttcaagtttaccaaaagagaggcaccgctggaacactaatgaggaaattgcagcttatttaataacatttgagaaacacgaagaatggctaaccacctcccctaagacaagaccacagaatggctcaatgatactctacaacaggaagaaagtgaaatacaggaaagatgggtattgctggaaaaagaggaaagatgggaaaacgaccagagaggaccacatgaaactcaaggtccagggagtggagtgcttgtacggctgctatgtccattcctccatcatccccaccttccaccggaggtgctactggctccttcagaaccccgacatcgtcctggtgcactacctgaacgtgccggccatcgaggactgcggcaagccttgcggccccatcctctgctccatcaacaccgacaagaaggagtgggcgaaatggacgaaagaagagctcatcgggcagctgaaacccatgttccatggcatcaagtggacctgcagcaatgggaacagcagctcaggcttctcggtggaacagctggtgcagcagatcctcgacagccaccagaccaagccccagccgcggacccacaactgcctctgcaccggcagcctgggagctggcggcagcgtgcatcacaagtgtaacagcgccaaacaccgcatcatctcgcccaaggtggagccacggacaggggggtacgggagccactcggaggtgcagcacaatgacgtgtcggagggcaagcacgagcacagccacagcaagggctccagccgtgagaagaggaacggcaaggtggccaagcccgtgctcctgcaccagagcagcaccgaggtctcctccaccaaccaggtggaagtccccgacaccacccagagctcccctgtgtccatcagcagcgggctcaacagcgacccggacatggtggacagcccggtggtcacaggtgtgtccggtatggcggtggcctctgtgatggggagcttgtcccagagcgccacggtgttcatgtcagaggtcaccaatgaggccgtgtacaccatgtcccccaccgctggccccaaccaccacctcctctcacctgacgcctctcagggcctcgtcctggccgtgagctctgatggccacaagttcgcctttcccaccacgggcagctcngagagcctgtccatgctgcccaccaacgtgtccgaagagctggtcctctccaccaccctcgacggtggccggaagattccagaaaccaccatgaactttgaccccgactgtttccttaataacccaaagcagggccagacgtacgggggtggaggcctgaaagccgagatggtcagctccaacatccggcactcgccacccggggagcggagcttcagctttaccaccgtcctcaccaaggagatcaagaccgaggacacctccttcgagcagcagatggccaaagaagcgtactcctcctccgcggcggctgtggcagccagctccctcaccctgaccgccggctccagcctcctgccgtcgggcggcggcctgagtcccagcaccaccctggagcagatggacttcagcgccatcgactccaacaaggactacacgtccagcttcagccagacgggccacagcccccacatccaccagaccccctccccgagcttcttcctgcaggacgccagcaaacccctccccgtcgagcagaacacccacagcagcctgagtgactctgggggcaccttcgtgatgcccacggtgaaaacggaggcctcgtcccaaaccagctcctgcagcggtcacgtggagacgcggatcgagtccacttcctccctccacctcatgcagttccaggccaacttccaggccatgacggcagaaggggaggtcaccatggagacctcgcaggcggcggaagggagcgaggtcctgctcaagtctggggagctgcaggcttgcagctctgagcactacctgcagccggagaccaacggggtaatccgaagcgccggcggcgtccccatcctcccgggcaacgtggtgcagggactctaccccgtggcccagcccagcctcggcaacgcctccaacatggagctcagcctggaccactttgacatctccttcagcaaccagttctccgacctgatcaacgacttcatctccgtggaggggggcagcagcaccatctatgggcaccagctggtgtcgggggacagcacggcgctctcacagtcagaggacggggcgcgggcccccttcacccaggcagagatgtgcctcccctgctgtagcccccagcagggtagcctgcagctgagcagctcggagggcggggccagcaccatggcctacatgcacgtcgccgaggtggtctcggccgcctcggcccagggcaccctaggcatgctgcagcagagcggacgggtgttcatggtgaccgactactccccagagtggtcttacccagagggaggagtgaaggtcctcatcacaggcccgtggcaagaagccagcaataactacagctgcctgtttgaccagatctcagtgcctgcatccctgattcagcctggggtgctgcgctgctactgcccagcccatgacactggtcttgtgaccctacaagttgccttcaacaaccagatcatctccaactcggtggtgtttgagtacaaagcccgggctctgcccacgctcccttcctcccagcacgactggctgtcgttggacgataaccagttcaggatgtccatcctggaacgactggagcagatggagaggaggatggccgagatgacggggtcccagcagcacaaacaggcgagcggaggcggcagcagtggaggcggcagcgggagcgggaatggagggagccaggcacagtgtgcttctgggactggggccttggggagctgctttgagagccgtgtggtcgtggtatgcgagaagatgatgagccgagcctgctgggcgaagtccaagcacttgatccactcaaagactttccgcggaatgaccctactccacctggccgctgcccagggctatgccaccctaatccagaccctcatcaaatggcgtacaaagcacgcggatagcattgacctggaactggaagttgaccccttgaatgtggaccacttctcctgtactcctctgatgtgggcgtgtgccctagggcacttggaagctgccgtcgtgctgtacaagtgggaccgtcgggccatctcgattcccgactctctaggaaggctgcctttgggaattgccaggtcacggggtcatgtgaaattagcagagtgtctggagcacctgcagagagatgagcaggctcagctgggacagaaccccagaatccactgtcctgcaagcgaagagcccagcacagagagctggatggcccagtggcacagcgaagccatcagctctccagaaatacccaagggagtcactgttattgcaagcaccaacccagagctgagaagacctcgttctgaaccctctaattactacagcagtgagagccacaaagattatccggctcccaaaaagcataaattgaaccctgagtacttccagacaaggcaggagaagctgcttcccactgcactgagtctggaagagccaaatatcaggaagcaaagccctagttctaagcagtctgtccccgagacactcagccccagtgaaggagtgagggacttcagccgggaactctcccctcccactccagagactgcagcatttcaagcctctggatctcagcctgtaggaaagtggaattccaaagatctttacattggtgtgtctacagtacaggtgactggaaatccgaaggggaccagtgtaggaaaggaggcagcaccttcacaggtgcgtccacgggaaccaatgagtgtcctgatgatggctaacagagaggtggtgaatacagagctggggtcctaccgtgatagtgcagaaaatgaagaatgcggccagcccatggatgacatacaggtgaacatgatgaccttggcagaacacattattgaagccacacctgaccgaatcaagcaggagaattttgtgcccatggagtcctcaggattggaaagaacagaccctgccaccattagcagtacaatgagctggctggccagttatctagcggatgctgactgccttcccagtgctgcccagatccgaagtgcatataacgagcctctaaccccttcttctaataccagcttgagccctgttggctctcccgtcagtgaaatcgctttcgagaaacctaaccttccctccgccgcggattggtcagaattcctgagtgcatctaccagtgagaaggtagagaatgagtttgctcagctcactctgtctgatcatgaacagagagaactctatgaggctgccaggcttgtccagacagctttccggaaatacaagggccgacccttgcgggaacagcaagaagtagctgctgctgttattcagcgttgttacagaaaatataaacagctgacatggttagccttgaagtacgcactttataaaaagatgacacaggctgccatccttatccagagcaaattccgaagttactatgaacaaaaaaaattccagcagagccgacgggctgctgtgctcatccaaaagtactaccgaagttataagaaatgtggcaaaagacggcaggctcgccggacggctgtgattgtacaacagaaactcaggtgggtggagaagagctcatggaggtaaagctccctagggaagagaactctgacttctttgaaagacttgtcctgggctgacattggagtctggggtgggcctaaagcattggcagtcactgtgttccagaacgttttaggcatggtggctgataagtacacctgtgctgagtctggttttgaatatttagctctttctctccacctcccacccaattattttgatattgccacccaattttaccttatatcagaatttggcagcaccagtttctactcagaaagttaccactcaattatagtagtttaacccatttcctgtttagga

SEQ ID NO: 414396 - DNA, 410 bp, Homo sapiens
caggatctccaagtcaccgcgtactatagaagatgatcatgggaacagcaatagtagtcatgtaaaaatctttttaccgaaaaagctgcttgaatgtctgccgaaatgttcaagtttaccaaaagagaggcaccgctggaacactaatgagagatcatgatgcagccgtccttttggatttctttttaataatgtgtgacccttcacctttgatcccctgacctgcattaccttggtaaccatttcattttttaatttaatttcattttttaattttggtgtacaagctgtaacatttcatctttcaaagtgtaacacgctgatttcctcaaatagagatacccctttgagtgataaatttgcaaaatgctgtcttcattttctgtattaaaattcatttcagttttaaa

SEQ ID NO: 414397 - DNA, 539 bp, Homo sapiens
acatgtaagtgctacgcaagtaacgccttttgacccacagtttgggaccttaggccgcaggcctctcttaatatccaccgctacagtatcacagagttaattacaccagacctgcactaaagggaataatagaaagattggtctttggcagaagagaaatgatcctgcatggcagctttaagatgcgtggaaaagtgaagaccaaagaaaggagaaataagatgagatcatgatgcagccgtccttttggatttctttttaataatgtgtgacccttcacctttgatcccctgacctgcattaccttggtaaccatttcattttttaatttaatttcattttttaattttggtgtacaagctgtaacatttcatctttcaaagtgtaacacgctgatttcctcaaatagagatacccctttgagtgataaatttgcaaaatgctgtcttcattttctgtattaaaattcatttcagttttaaaataaagtgtaatctgtgttttcatccttttaaaaaaaaaaaaactctccaggcgct

SEQ ID NO: 414398 - DNA, 706 bp, Homo sapiens
  misc_feature (108)..(108): n is a, c, g, or t
aacctctgcggatgatgacatggcttcactcgtgtttcattcaacaagcatgtgcagtgaccacagatttggggatcttgaaatgatgtcttctcaaaatagcgaggngagtgagaaagagaagagcgtttcccaaagtgtattctgcggaactagcacctactgtgttctcaacaccgtgccacctatagaagatgatcatgggaacagcaatagtagtcatgtaaaaatctttttaccgaaaaagctgcttgaatgtctgccgaaatgttcaagtttaccaaaagagaggcaccgctggaacactaatgaggaaattgcagcttatttaataacatttgagaaacacgaagaatggctaaccacctcccctaagacaagaccacagaatggctcaatgatactctacaacaggaagaaagtgaaatacaggaaagatgggtattgctggaaaaagaggaaagatgggaaaacgaccagagaggaccacatgaaactcaaggtccagggagtggagactgacagcagcaatcacagtcacattccacagcctctccagcacccagccagctctccgcgggggcagcagggactggtccacccaacaacagcagccatgtcctcacctcttgctacagcagcaactttatttgatttgatgtatatgaagaaataaaactcagaagtcaattgacttaaacatgga

SEQ ID NO: 414399 - DNA, 478 bp, Homo sapiens
attatttttaagcacaagcgaagattctttgaagtttaatgtattcttgaaactcttattctttagaatgaaacataatttgtgcaatctttttcacatattatgaaagtatacagtggaaatgagctgtttgtttttacctttaacaactgaaagagaactggattctggggttactatcagaaacaacgttgggggtgggagtccacatcaaggagaacgtgacagaagaaaccagttctgatgtgtagacttggtttgactcattctgatttttaggacgaggtcccggttactctgggccctttggcaggctttgcttcttgcttaaggccacccaaggaatctgcacctgccttggcctgtcatggagatggcaagtccacagtggacaaatgggctcctggcagcctttggatggaggcaggggctggagtgctctttgtgagggggcttagtcccatgtcacctagccctg

SEQ ID NO: 414400 - DNA, 392 bp, Homo sapiens
ttgaatagttaaatttttattaagataaacatgtgattgtcacacttgatttaatacattagactttgattttgctctattcttagagcgctcgatgtagagcaaagctttagaatgatttttttttcaccttaagtagggtcacgtctttcctttgaatattttccccaacaatttcacaggagtttcttttgccgtcaatcctcaaaacggttttagtcttggcttttcagttcagagggagtggtaatacccctttcctttacttggtcacaattcactatagagttatcgcctgctgttttgttttgtttctcttccagagtgaaagaattgaaaaaggccaaggaacttgaagacatacagcagcatcccttagcaatgtgacattg

SEQ ID NO: 414401 - DNA, 501 bp, Homo sapiens
tttgtctaacataccttcctttcttgctgtgattgctttcttctactagtttaatttaaattgtatttatttattttacttgctctagagggctctctaccagatctcatgtcagggtttccgttggggaatttgacaaagaaactagggggcaggaacctgaacctctttttgatctttgacaaaaagagaatttctggtcttttatccgagaacttcgggctgctgaaggtgccaccatcctgtgtgaggtggtgacagattcacgatcgtgctggggaactctggctggcggagacctctctggtttggtgaagttacggacggcatttggatgctggtcccgcaaggctggcgaggccacgtgttgactgcttttcttccagaacacaacctcactcttcctcctgctctgccctagataaccagttcaggatgtccatcctggaacgactggagcagatggagaggaggatggccgagatgacggggtcccagcag

SEQ ID NO: 414402 - DNA, 623 bp, Homo sapiens
ttggactagcaaagtctctggatatgttactggtatctgttgaggtagtcacacaaaactgaaatactccaacagaaagacttcagaagactttcattttggtgtaaaaacagtgaaattagctgtttgacttaaaatataggagttgtaagacatttcatcgatgctacttctgttttatcctctgtgaaatgtagatactgtgtgtctcccacttgctttttagggttgttgggaggataaatgaaactgtatgacagacacactgggaactcagaagaaaggtgctgttgaaactgaacctcatcctatggctgtgccgttggcaggcataaccggtgtgctgagaggcagtggtagtgaaccccgtggtgaaaggccaggaccatgggctctggagccaggctgccttggttcgaatcccacctcgacctcttgcaagtggtctgaccacagcaaatcacccaacctctctgtgcctgagtttccccctctttaaattggggatgataatagtacccactaaaggatcctggtgagttttagctgagcacatgtccacaaagtccttagagcagtgcctgccatgtagtgtggctgatcctcacacccagaaaacccca

SEQ ID NO: 414403 - DNA, 631 bp, Homo sapiens
cgcggggcggcggggtggctgggccggcggcggcggcggtacgaggcgcgcgctcggggtcccggtcgcgaggaggaggaggatgtggcgcgcggaggggaaatggctgccgaaaacaagccggaagagcgtttcccaaagtgtattctgcggaactagcacctactgtgttctcaacaccgtgccacctatagaagatgatcatgggaacagcaatagtagtcatgtaaaaatctttttaccgaaaaagctgcttgaatgtctgccgaaatgttcaagtttaccaaaagagaggcaccgctggaacactaatgagagatcatgatgcagccgtccttttggatttctttttaataatgtgtgacccttcacctttgatcccctgacctgcattaccttggtaaccatttcattttttaatttaatttcattttttaattttggtgtacaagctgtaacatttcatctttcaaagtgtaacacgctgatttcctcaaatagagatacccctttgagtgataaatttgcaaaatgctgtcttcattttctgtattaaaattcatttcagttttaaaataaagtgtaatctgtgttttcatccttttaaaaaaaaaaaaactctccaggcgct

SEQ ID NO: 414404 - DNA, 505 bp, Homo sapiens
cgcggggcggcggggtggctgggccggcggcggcggcggtacgaggcgcgcgctcggggtcccggtcgcgaggaggaggaggatgtggcgcgcggaggggaaatggctgccgaaaacaagccggaagatgatcatgggaacagcaatagtagtcatgtaaaaatctttttaccgaaaaagctgcttgaatgtctgccgaaatgttcaagtttaccaaaagagaggcaccgctggaacactaatgagagatcatgatgcagccgtccttttggatttctttttaataatgtgtgacccttcacctttgatcccctgacctgcattaccttggtaaccatttcattttttaatttaatttcattttttaattttggtgtacaagctgtaacatttcatctttcaaagtgtaacacgctgatttcctcaaatagagatacccctttgagtgataaatttgcaaaatgctgtcttcattttctgtattaaaattcatttcagttttaaa

SEQ ID NO: 414405 - DNA, 882 bp, Homo sapiens
cgcggcgacggcggtccggtgcgaggcagagtgctagcgggagcgcgagccagcaagaggcgcctgcgcgatgtccgggcccctgagcccgcggcgctgagccagccgggacggacatgcgcgggagggcgccgcggggcagccgccgctcctccgggggaatgaaagctactggttgattttaaagtgcctgggcctcacaggtttggagatgtcccagaataaggcacaatgtcaatagcaggagttgctgctcaggagatcagagtcccattaaaaactggatttctacataatggccgagccatggggaatatgaggaagacctactggagcagtcgcagtgagtttaaaaacaactttttaaatattgacccgataaccatggcctacagtctgaactcttctgctcaggagcgcctaataccacttgggcatgcttccaaatctgctccgatgaatggccactgctttgcagaaaatggtccatctcaaaagtccagcttgccccctcttcttattcccccaagtgaaaacttgggaccacatgaagaggatcaagttgtatgtggttttaagaaactcacagtgaatggggtttgtgcttccacccctccactgacacccataactcttccaccgttgccaatctctgaagccctctctctggatgacacagactgtgaggtggaattcctaactagctcagatacagacttccttttagaagactctacactttctgatttcaaatatgatgttcctggcaggcgaagcttccgtgggtgtggacaaatcaactatgcatattgataccagctgtctgagagatctagttggctgacaaatgagtgccgatcaatctctcactagacacgaata

SEQ ID NO: 414406 - DNA, 3193 bp, Homo sapiens
cgcggggcggcggggtggctgggccggcggcggcggcggtacgaggcgcgcgctcggggtcccggtcgcgaggaggaggaggatgtggcgcgcggaggggaaatggctgccgaaaacaagccggaagatgatcatgggaacagcaatagtagtcatgtaaaaatctttttaccgaaaaagctgcttgaatgtctgccgaaatgttcaagtttaccaaaagagaggcaccgctggaacactaatgagggaatgaaagctactggttgattttaaagtgcctgggcctcacaggtttggagatgtcccagaataaggcacaatgtcaatagcaggagttgctgctcaggagatcagagtcccattaaaaactggatttctacataatggccgagccatggggaatatgaggaagacctactggagcagtcgcagtgagtttaaaaacaactttttaaatattgacccgataaccatggcctacagtctgaactcttctgctcaggagcgcctaataccacttgggcatgcttccaaatctgctccgatgaatggccactgctttgcagaaaatggtccatctcaaaagtccagcttgccccctcttcttattcccccaagtgaaaacttgggaccacatgaagaggatcaagttgtatgtggttttaagaaactcacagtgaatggggtttgtgcttccacccctccactgacacccataaaaaactccccttcccttttcccctgtgcccctctttgtgaacggggttctaggcctcttccaccgttgccaatctctgaagccctctctctggatgacacagactgtgaggtggaattcctaactagctcagatacagacttccttttagaagactctacactttctgatttcaaatatgatgttcctggcaggcgaagcttccgtgggtgtggacaaatcaactatgcatattttgataccccagctgtttctgcagcagatctcagctatgtgtctgaccaaaatggaggtgtcccagatccaaatcctcctccacctcagacccaccgaagattaagaaggtctcattcgggaccagctggctcctttaacaagccagccataaggatatccaactgttgtatacacagagcttctcctaactccgatgaagacaaacctgaggttccccccagagttcccatacctcctagaccagtaaagccagattatagaagatggtcagcagaagttacttcgagcacctatagtgatgaagacaggcctcccaaagtaccgccaagagaacctttgtcaccgagtaactcgcgcacaccgagtcccaaaagccttccgtcttacctcaatggggtcatgcccccgacacagagctttgcccctgatcccaagtatgtcagcagcaaagcactgcaaagacagaacagcgaaggatctgccagtaaggttccttgcattctgcccattattgaaaatgggaagaaggttagttcaacacattattacctactacctgaacgaccaccatacctggacaaatatgaaaaattttttagggaagcagaagaaacaaatggaggcgcccaaatccagccattacctgctgactgcggtatatcttcagccacagaaaagccagactcaaaaacaaaaatggatctgggtggccacgtgaagcgtaaacatttatcctatgtggtttctccttagaccttggggtcatggttcagcagaggttacataggagcaaatggttctcaattttccagtttgattgaagtgcagagaaaaatcccttagattgcaaaataaaatagttgaactctctgtcttcatgtggaaggtttagagcagttgtgagatgctgttatgctgagaaaccctgactttgttagtgttggaaaaaagtcttacaagtctataatttaaagatgtgatggtggggaggggaggatggggaagctttttatatatgcatacattacatacctatatataaacttgtggtataaccatagaccatagctgcaggttaaccaattagttactatcgtagagtaatatatattcagaataataaactcaagctggagaaatgagtcctgatagactgaaaattgagcaaatggaagaagatacagtattgtttagatcagaatcattaaaaaatatttttgtttagtaagtttgaagatttctggcttttaggccttttctattttgttccatttatttttgcaggcaatcttttccatggagggcagggtatccattctttaccatgggtgtacctgcttaggttaaaaatcataccaaggcctcatacttccaggtttcatgttgcgtcttgttgagggagggagagcaggttacttggcaaccatattgtcacctgtacctgtcacacatcttgaaaaataaaacgataatagaactagtgactaattttcccttacagttcctgcttggtcccacccactgaagtagctcatcgtagtgcgggccgtattagaggcagtggggtacgttagactcagatggaaaagtattctaggtgccagtgttaggatgtcagttttacaaaataatgaagcaattagctatgtgattgagagttattgtttggggatgtgtgttgtggttttgctttttttttttagactgtattaataaacatacaacacaagctggccttgtgttgctggttcctattcagtatttcctggggattgtttgctttttaagtaaaacacttctgacccatagctcagtatgtctgaattccagaggtcacatcagcatctttctgctttgaaaactctcacagctgtggctgcttcacttagatgcagtgagacacatagttggtgttccgattttcacatccttccatgtatttatcttgaagagataagcacagaagagaaggtgctcactaacagaggtacattactgcaatgttctcttaacagttaaacaagctgtttacagtttaaactgctgaatattatttgagctatttaaagcttattatattttagtatgaactaaatgaaggttaaaacatgcttaagaaaaatgcactgatttctgcattatgtgtacagtattggacaaaggattttattcattttgttgcattattttgaatattgtcttttcattttaataaagttataatacttatttatgata

SEQ ID NO: 414407 - DNA, 3260 bp, Homo sapiens
  misc_feature (108)..(108): n is a, c, g, or t
aacctctgcggatgatgacatggcttcactcgtgtttcattcaacaagcatgtgcagtgaccacagatttggggatcttgaaatgatgtcttctcaaaatagcgaggngagtgagaaagagaagagcgtttcccaaagtgtattctgcggaactagcacctactgtgttctcaacaccgtgccacctatagaagatgatcatgggaacagcaatagtagtcatgtaaaaatctttttaccgaaaaagctgcttgaatgtctgccgaaatgttcaagtttaccaaaagagaggcaccgctggaacactaatgagggaatgaaagctactggttgattttaaagtgcctgggcctcacaggtttggagatgtcccagaataaggcacaatgtcaatagcaggagttgctgctcaggagatcagagtcccattaaaaactggatttctacataatggccgagccatggggaatatgaggaagacctactggagcagtcgcagtgagtttaaaaacaactttttaaatattgacccgataaccatggcctacagtctgaactcttctgctcaggagcgcctaataccacttgggcatgcttccaaatctgctccgatgaatggccactgctttgcagaaaatggtccatctcaaaagtccagcttgccccctcttcttattcccccaagtgaaaacttgggaccacatgaagaggatcaagttgtatgtggttttaagaaactcacagtgaatggggtttgtgcttccacccctccactgacacccataaaaaactccccttcccttttcccctgtgcccctctttgtgaacggggttctaggcctcttccaccgttgccaatctctgaagccctctctctggatgacacagactgtgaggtggaattcctaactagctcagatacagacttccttttagaagactctacactttctgatttcaaatatgatgttcctggcaggcgaagcttccgtgggtgtggacaaatcaactatgcatattttgataccccagctgtttctgcagcagatctcagctatgtgtctgaccaaaatggaggtgtcccagatccaaatcctcctccacctcagacccaccgaagattaagaaggtctcattcgggaccagctggctcctttaacaagccagccataaggatatccaactgttgtatacacagagcttctcctaactccgatgaagacaaacctgaggttccccccagagttcccatacctcctagaccagtaaagccagattatagaagatggtcagcagaagttacttcgagcacctatagtgatgaagacaggcctcccaaagtaccgccaagagaacctttgtcaccgagtaactcgcgcacaccgagtcccaaaagccttccgtcttacctcaatggggtcatgcccccgacacagagctttgcccctgatcccaagtatgtcagcagcaaagcactgcaaagacagaacagcgaaggatctgccagtaaggttccttgcattctgcccattattgaaaatgggaagaaggttagttcaacacattattacctactacctgaacgaccaccatacctggacaaatatgaaaaattttttagggaagcagaagaaacaaatggaggcgcccaaatccagccattacctgctgactgcggtatatcttcagccacagaaaagccagactcaaaaacaaaaatggatctgggtggccacgtgaagcgtaaacatttatcctatgtggtttctccttagaccttggggtcatggttcagcagaggttacataggagcaaatggttctcaattttccagtttgattgaagtgcagagaaaaatcccttagattgcaaaataaaatagttgaactctctgtcttcatgtggaaggtttagagcagttgtgagatgctgttatgctgagaaaccctgactttgttagtgttggaaaaaagtcttacaagtctataatttaaagatgtgatggtggggaggggaggatggggaagctttttatatatgcatacattacatacctatatataaacttgtggtataaccatagaccatagctgcaggttaaccaattagttactatcgtagagtaatatatattcagaataataaactcaagctggagaaatgagtcctgatagactgaaaattgagcaaatggaagaagatacagtattgtttagatcagaatcattaaaaaatatttttgtttagtaagtttgaagatttctggcttttaggccttttctattttgttccatttatttttgcaggcaatcttttccatggagggcagggtatccattctttaccatgggtgtacctgcttaggttaaaaatcataccaaggcctcatacttccaggtttcatgttgcgtcttgttgagggagggagagcaggttacttggcaaccatattgtcacctgtacctgtcacacatcttgaaaaataaaacgataatagaactagtgactaattttcccttacagttcctgcttggtcccacccactgaagtagctcatcgtagtgcgggccgtattagaggcagtggggtacgttagactcagatggaaaagtattctaggtgccagtgttaggatgtcagttttacaaaataatgaagcaattagctatgtgattgagagttattgtttggggatgtgtgttgtggttttgctttttttttttagactgtattaataaacatacaacacaagctggccttgtgttgctggttcctattcagtatttcctggggattgtttgctttttaagtaaaacacttctgacccatagctcagtatgtctgaattccagaggtcacatcagcatctttctgctttgaaaactctcacagctgtggctgcttcacttagatgcagtgagacacatagttggtgttccgattttcacatccttccatgtatttatcttgaagagataagcacagaagagaaggtgctcactaacagaggtacattactgcaatgttctcttaacagttaaacaagctgtttacagtttaaactgctgaatattatttgagctatttaaagcttattatattttagtatgaactaaatgaaggttaaaacatgcttaagaaaaatgcactgatttctgcattatgtgtacagtattggacaaaggattttattcattttgttgcattattttgaatattgtcttttcattttaataaagttataatacttatttatgata

SEQ ID NO: 414408 - DNA, 4016 bp, Homo sapiens
cgcggcgacggcggtccggtgcgaggcagagtgctagcgggagcgcgagccagcaagaggcgcctgcgcgatgtccgggcccctgagcccgcggcgctgagccagccgggacggacatgcgcgggagggcgccgcggggcagccgccgctcctccgggggaatgaaagctactggttgattttaaagtgcctgggcctcacaggtttggagatgtcccagaataaggcacaatgtcaatagcaggagttgctgctcaggagatcagagtcccattaaaaactggatttctacataatggccgagccatggggaatatgaggaagacctactggagcagtcgcagtgagtttaaaaacaactttttaaatattgacccgataaccatggcctacagtctgaactcttctgctcaggagcgcctaataccacttggtatgtattctgaaaatctgatcacagtaagcatttgagaagaacagtctggattcgggttagcttgtcctccagcattattttttaaatgaggaaacctgaactatttccaacaacagcctgacccctagtggcaacagattcagaagataactgtgtttttctcaagctattgtactcgactgccttcattctgagtcactgattgctaagtaggactgttcatggacgtgggatcttctaaaatcaagaattagttctcattccagctctgatgcatactttacttcatgaaaccttaggcgagatttcccacctttcttactagtatcgaatgcatgtttgacagtaatagatgaaaatagtataaatgttcctcaaaacttaaaaaatagtatttttaatgtgaatattctgttccttggatctttgtcaagagctgtgtgtgaactgaacacattgcaggcaagtccattcactcacaatattatgatgtgccagcaataaggactttgtcttatctcattggtaccctacgtgcctagtatggtcgcatgtcttaaatggcaaggctggtacagtatggtattcatgtaaattatatgctattcatcttccgcgaattttacacacgtcacaaaacttgcctgtgatgtgtgggtgtgcgctgtgcacatgtccaagggagatagaggagatagtttgttctttgaaccacaccatgtgcgttaagaatcttctgctctctaattacacctgtggtggttgcatgggtgttctcggggtgacagcagtcaagtgtttcactcaggaagaaagctgtggaagcataggtagctggggtgctctctccctcacacaggtggagagaggattgttgatcttttattaatatctctcgttcattccagggcatgcttccaaatctgctccgatgaatggccactgctttgcagaaaatggtccatctcaaaagtccagcttgccccctcttcttattcccccaagtgaaaacttgggaccacatgaagaggatcaagttgtatgtggttttaagaaactcacagtgaatggggtttgtgcttccacccctccactgacacccataaaaaactccccttcccttttcccctgtgcccctctttgtgaacggggttctaggcctcttccaccgttgccaatctctgaagccctctctctggatgacacagactgtgaggtggaattcctaactagctcagatacagacttccttttagaagactctacactttctgatttcaaatatgatgttcctggcaggcgaagcttccgtgggtgtggacaaatcaactatgcatattttgataccccagctgtttctgcagcagatctcagctatgtgtctgaccaaaatggaggtgtcccagatccaaatcctcctccacctcagacccaccgaagattaagaaggtctcattcgggaccagctggctcctttaacaagccagccataaggatatccaactgttgtatacacagagcttctcctaactccgatgaagacaaacctgaggttccccccagagttcccatacctcctagaccagtaaagccagattatagaagatggtcagcagaagttacttcgagcacctatagtgatgaagacaggcctcccaaagtaccgccaagagaacctttgtcaccgagtaactcgcgcacaccgagtcccaaaagccttccgtcttacctcaatggggtcatgcccccgacacagagctttgcccctgatcccaagtatgtcagcagcaaagcactgcaaagacagaacagcgaaggatctgccagtaaggttccttgcattctgcccattattgaaaatgggaagaaggttagttcaacacattattacctactacctgaacgaccaccatacctggacaaatatgaaaaattttttagggaagcagaagaaacaaatggaggcgcccaaatccagccattacctgctgactgcggtatatcttcagccacagaaaagccagactcaaaaacaaaaatggatctgggtggccacgtgaagcgtaaacatttatcctatgtggtttctccttagaccttggggtcatggttcagcagaggttacataggagcaaatggttctcaattttccagtttgattgaagtgcagagaaaaatcccttagattgcaaaataaaatagttgaactctctgtcttcatgtggaaggtttagagcagttgtgagatgctgttatgctgagaaaccctgactttgttagtgttggaaaaaagtcttacaagtctataatttaaagatgtgatggtggggaggggaggatggggaagctttttatatatgcatacattacatacctatatataaacttgtggtataaccatagaccatagctgcaggttaaccaattagttactatcgtagagtaatatatattcagaataataaactcaagctggagaaatgagtcctgatagactgaaaattgagcaaatggaagaagatacagtattgtttagatcagaatcattaaaaaatatttttgtttagtaagtttgaagatttctggcttttaggccttttctattttgttccatttatttttgcaggcaatcttttccatggagggcagggtatccattctttaccatgggtgtacctgcttaggttaaaaatcataccaaggcctcatacttccaggtttcatgttgcgtcttgttgagggagggagagcaggttacttggcaaccatattgtcacctgtacctgtcacacatcttgaaaaataaaacgataatagaactagtgactaattttcccttacagttcctgcttggtcccacccactgaagtagctcatcgtagtgcgggccgtattagaggcagtggggtacgttagactcagatggaaaagtattctaggtgccagtgttaggatgtcagttttacaaaataatgaagcaattagctatgtgattgagagttattgtttggggatgtgtgttgtggttttgctttttttttttagactgtattaataaacatacaacacaagctggccttgtgttgctggttcctattcagtatttcctggggattgtttgctttttaagtaaaacacttctgacccatagctcagtatgtctgaattccagaggtcacatcagcatctttctgctttgaaaactctcacagctgtggctgcttcacttagatgcagtgagacacatagttggtgttccgattttcacatccttccatgtatttatcttgaagagataagcacagaagagaaggtgctcactaacagaggtacattactgcaatgttctcttaacagttaaacaagctgtttacagtttaaactgctgaatattatttgagctatttaaagcttattatattttagtatgaactaaatgaaggttaaaacatgcttaagaaaaatgcactgatttctgcattatgtgtacagtattggacaaaggattttattcattttgttgcattattttgaatattgtcttttcattttaataaagttataatacttatttatgata

SEQ ID NO: 414409 - DNA, 3966 bp, Homo sapiens
cgcggcgacggcggtccggtgcgaggcagagtgctagcgggagcgcgagccagcaagaggcgcctgcgcgatgtccgggcccctgagcccgcggcgctgagccagccgggacggacatgcgcgggagggcgccgcggggcagccgccgctcctccgggggaatgaaagctactggttgattttaaagtgcctgggcctcacaggtttggagatgtcccagaataaggcacaatgtcaatagcaggagttgctgctcaggagatcagagtcccattaaaaactggatttctacataatggccgagccatggggaatatgaggaagacctactggagcagtcgcagtgagtttaaaaactgctcaggagcgcctaataccacttggtatgtattctgaaaatctgatcacagtaagcatttgagaagaacagtctggattcgggttagcttgtcctccagcattattttttaaatgaggaaacctgaactatttccaacaacagcctgacccctagtggcaacagattcagaagataactgtgtttttctcaagctattgtactcgactgccttcattctgagtcactgattgctaagtaggactgttcatggacgtgggatcttctaaaatcaagaattagttctcattccagctctgatgcatactttacttcatgaaaccttaggcgagatttcccacctttcttactagtatcgaatgcatgtttgacagtaatagatgaaaatagtataaatgttcctcaaaacttaaaaaatagtatttttaatgtgaatattctgttccttggatctttgtcaagagctgtgtgtgaactgaacacattgcaggcaagtccattcactcacaatattatgatgtgccagcaataaggactttgtcttatctcattggtaccctacgtgcctagtatggtcgcatgtcttaaatggcaaggctggtacagtatggtattcatgtaaattatatgctattcatcttccgcgaattttacacacgtcacaaaacttgcctgtgatgtgtgggtgtgcgctgtgcacatgtccaagggagatagaggagatagtttgttctttgaaccacaccatgtgcgttaagaatcttctgctctctaattacacctgtggtggttgcatgggtgttctcggggtgacagcagtcaagtgtttcactcaggaagaaagctgtggaagcataggtagctggggtgctctctccctcacacaggtggagagaggattgttgatcttttattaatatctctcgttcattccagggcatgcttccaaatctgctccgatgaatggccactgctttgcagaaaatggtccatctcaaaagtccagcttgccccctcttcttattcccccaagtgaaaacttgggaccacatgaagaggatcaagttgtatgtggttttaagaaactcacagtgaatggggtttgtgcttccacccctccactgacacccataaaaaactccccttcccttttcccctgtgcccctctttgtgaacggggttctaggcctcttccaccgttgccaatctctgaagccctctctctggatgacacagactgtgaggtggaattcctaactagctcagatacagacttccttttagaagactctacactttctgatttcaaatatgatgttcctggcaggcgaagcttccgtgggtgtggacaaatcaactatgcatattttgataccccagctgtttctgcagcagatctcagctatgtgtctgaccaaaatggaggtgtcccagatccaaatcctcctccacctcagacccaccgaagattaagaaggtctcattcgggaccagctggctcctttaacaagccagccataaggatatccaactgttgtatacacagagcttctcctaactccgatgaagacaaacctgaggttccccccagagttcccatacctcctagaccagtaaagccagattatagaagatggtcagcagaagttacttcgagcacctatagtgatgaagacaggcctcccaaagtaccgccaagagaacctttgtcaccgagtaactcgcgcacaccgagtcccaaaagccttccgtcttacctcaatggggtcatgcccccgacacagagctttgcccctgatcccaagtatgtcagcagcaaagcactgcaaagacagaacagcgaaggatctgccagtaaggttccttgcattctgcccattattgaaaatgggaagaaggttagttcaacacattattacctactacctgaacgaccaccatacctggacaaatatgaaaaattttttagggaagcagaagaaacaaatggaggcgcccaaatccagccattacctgctgactgcggtatatcttcagccacagaaaagccagactcaaaaacaaaaatggatctgggtggccacgtgaagcgtaaacatttatcctatgtggtttctccttagaccttggggtcatggttcagcagaggttacataggagcaaatggttctcaattttccagtttgattgaagtgcagagaaaaatcccttagattgcaaaataaaatagttgaactctctgtcttcatgtggaaggtttagagcagttgtgagatgctgttatgctgagaaaccctgactttgttagtgttggaaaaaagtcttacaagtctataatttaaagatgtgatggtggggaggggaggatggggaagctttttatatatgcatacattacatacctatatataaacttgtggtataaccatagaccatagctgcaggttaaccaattagttactatcgtagagtaatatatattcagaataataaactcaagctggagaaatgagtcctgatagactgaaaattgagcaaatggaagaagatacagtattgtttagatcagaatcattaaaaaatatttttgtttagtaagtttgaagatttctggcttttaggccttttctattttgttccatttatttttgcaggcaatcttttccatggagggcagggtatccattctttaccatgggtgtacctgcttaggttaaaaatcataccaaggcctcatacttccaggtttcatgttgcgtcttgttgagggagggagagcaggttacttggcaaccatattgtcacctgtacctgtcacacatcttgaaaaataaaacgataatagaactagtgactaattttcccttacagttcctgcttggtcccacccactgaagtagctcatcgtagtgcgggccgtattagaggcagtggggtacgttagactcagatggaaaagtattctaggtgccagtgttaggatgtcagttttacaaaataatgaagcaattagctatgtgattgagagttattgtttggggatgtgtgttgtggttttgctttttttttttagactgtattaataaacatacaacacaagctggccttgtgttgctggttcctattcagtatttcctggggattgtttgctttttaagtaaaacacttctgacccatagctcagtatgtctgaattccagaggtcacatcagcatctttctgctttgaaaactctcacagctgtggctgcttcacttagatgcagtgagacacatagttggtgttccgattttcacatccttccatgtatttatcttgaagagataagcacagaagagaaggtgctcactaacagaggtacattactgcaatgttctcttaacagttaaacaagctgtttacagtttaaactgctgaatattatttgagctatttaaagcttattatattttagtatgaactaaatgaaggttaaaacatgcttaagaaaaatgcactgatttctgcattatgtgtacagtattggacaaaggattttattcattttgttgcattattttgaatattgtcttttcattttaataaagttataatacttatttatgata

SEQ ID NO: 414410 - DNA, 3051 bp, Homo sapiens
cgcggcgacggcggtccggtgcgaggcagagtgctagcgggagcgcgagccagcaagaggcgcctgcgcgatgtccgggcccctgagcccgcggcgctgagccagccgggacggacatgcgcgggagggcgccgcggggcagccgccgctcctccgggggaatgaaagctactggttgattttaaagtgcctgggcctcacaggtttggagatgtcccagaataaggcacaatgtcaatagcaggagttgctgctcaggagatcagagtcccattaaaaactggatttctacataatggccgagccatggggaatatgaggaagacctactggagcagtcgcagtgagtttaaaaacaactttttaaatattgacccgataaccatggcctacagtctgaactcttctgctcaggagcgcctaataccacttgggcatgcttccaaatctgctccgatgaatggccactgctttgcagaaaatggtccatctcaaaagtccagcttgccccctcttcttattcccccaagtgaaaacttgggaccacatgaagaggatcaagttgtatgtggttttaagaaactcacagtgaatggggtttgtgcttccacccctccactgacacccataaaaaactccccttcccttttcccctgtgcccctctttgtgaacggggttctaggcctcttccaccgttgccaatctctgaagccctctctctggatgacacagactgtgaggtggaattcctaactagctcagatacagacttccttttagaagactctacactttctgatttcaaatatgatgttcctggcaggcgaagcttccgtgggtgtggacaaatcaactatgcatattttgataccccagctgtttctgcagcagatctcagctatgtgtctgacctaagaaggtctcattcgggaccagctggctcctttaacaagccagccataaggatatccaactgttgtatacacagagcttctcctaactccgatgaagacaaacctgaggttccccccagagttcccatacctcctagaccagtaaagccagattatagaagatggtcagcagaagttacttcgagcacctatagtgatgaagacaggcctcccaaagtaccgccaagagaacctttgtcaccgagtaactcgcgcacaccgagtcccaaaagccttccgtcttacctcaatggggtcatgcccccgacacagagctttgcccctgatcccaagtatgtcagcagcaaagcactgcaaagacagaacagcgaaggatctgccagtaaggttccttgcattctgcccattattgaaaatgggaagaaggttagttcaacacattattacctactacctgaacgaccaccatacctggacaaatatgaaaaattttttagggaagcagaagaaacaaatggaggcgcccaaatccagccattacctgctgactgcggtatatcttcagccacagaaaagccagactcaaaaacaaaaatggatctgggtggccacgtgaagcgtaaacatttatcctatgtggtttctccttagaccttggggtcatggttcagcagaggttacataggagcaaatggttctcaattttccagtttgattgaagtgcagagaaaaatcccttagattgcaaaataaaatagttgaactctctgtcttcatgtggaaggtttagagcagttgtgagatgctgttatgctgagaaaccctgactttgttagtgttggaaaaaagtcttacaagtctataatttaaagatgtgatggtggggaggggaggatggggaagctttttatatatgcatacattacatacctatatataaacttgtggtataaccatagaccatagctgcaggttaaccaattagttactatcgtagagtaatatatattcagaataataaactcaagctggagaaatgagtcctgatagactgaaaattgagcaaatggaagaagatacagtattgtttagatcagaatcattaaaaaatatttttgtttagtaagtttgaagatttctggcttttaggccttttctattttgttccatttatttttgcaggcaatcttttccatggagggcagggtatccattctttaccatgggtgtacctgcttaggttaaaaatcataccaaggcctcatacttccaggtttcatgttgcgtcttgttgagggagggagagcaggttacttggcaaccatattgtcacctgtacctgtcacacatcttgaaaaataaaacgataatagaactagtgactaattttcccttacagttcctgcttggtcccacccactgaagtagctcatcgtagtgcgggccgtattagaggcagtggggtacgttagactcagatggaaaagtattctaggtgccagtgttaggatgtcagttttacaaaataatgaagcaattagctatgtgattgagagttattgtttggggatgtgtgttgtggttttgctttttttttttagactgtattaataaacatacaacacaagctggccttgtgttgctggttcctattcagtatttcctggggattgtttgctttttaagtaaaacacttctgacccatagctcagtatgtctgaattccagaggtcacatcagcatctttctgctttgaaaactctcacagctgtggctgcttcacttagatgcagtgagacacatagttggtgttccgattttcacatccttccatgtatttatcttgaagagataagcacagaagagaaggtgctcactaacagaggtacattactgcaatgttctcttaacagttaaacaagctgtttacagtttaaactgctgaatattatttgagctatttaaagcttattatattttagtatgaactaaatgaaggttaaaacatgcttaagaaaaatgcactgatttctgcattatgtgtacagtattggacaaaggattttattcattttgttgcattattttgaatattgtcttttcattttaataaagttataatacttatttatgata

SEQ ID NO: 414411 - DNA, 3051 bp, Homo sapiens
cgcggcgacggcggtccggtgcgaggcagagtgctagcgggagcgcgagccagcaagaggcgcctgcgcgatgtccgggcccctgagcccgcggcgctgagccagccgggacggacatgcgcgggagggcgccgcggggcagccgccgctcctccgggggaatgaaagctactggttgattttaaagtgcctgggcctcacaggtttggagatgtcccagaataaggcacaatgtcaatagcaggagttgctgctcaggagatcagagtcccattaaaaactggatttctacataatggccgagccatggggaatatgaggaagacctactggagcagtcgcagtgagtttaaaaacaactttttaaatattgacccgataaccatggcctacagtctgaactcttctgctcaggagcgcctaataccacttgggcatgcttccaaatctgctccgatgaatggccactgctttgcagaaaatggtccatctcaaaagtccagcttgccccctcttcttattcccccaagtgaaaacttgggaccacatgaagaggatcaagttgtatgtggttttaagaaactcacagtgaatggggtttgtgcttccacccctccactgacacccataaaaaactccccttcccttttcccctgtgcccctctttgtgaacggggttctaggcctcttccaccgttgccaatctctgaagccctctctctggatgacacagactgtgaggtggaattcctaactagctcagatacagacttccttttagaagactctacactttctgatttcaaatatgatgttcctggcaggcgaagcttccgtgggtgtggacaaatcaactatgcatattttgataccccagctgtttctgcagcagatctcagctatgtgtctgaccaaaatggaggtgtcccagatccaaatcctcctccacctcagacccaccgaagattaagaaggtctcattcgggaccagctggctcctttaacaagccagccataaggatatccaactgttgtatacacagagcttctcctaactccgatgaagacaaacctgaggttccccccagagttcccatacctcctagaccagtaaagccagattatagaagatggtcagcagaagttacttcgagcacctatagtgatgaagacaggcctcccaaagtaccgccaagagaacctttgtcaccgagtaactcgcgcacaccgagtccccctgatcccaagtatgtcagcagcaaagcactgcaaagacagaacagcgaaggatctgccagtaaggttccttgcattctgcccattattgaaaatgggaagaaggttagttcaacacattattacctactacctgaacgaccaccatacctggacaaatatgaaaaattttttagggaagcagaagaaacaaatggaggcgcccaaatccagccattacctgctgactgcggtatatcttcagccacagaaaagccagactcaaaaacaaaaatggatctgggtggccacgtgaagcgtaaacatttatcctatgtggtttctccttagaccttggggtcatggttcagcagaggttacataggagcaaatggttctcaattttccagtttgattgaagtgcagagaaaaatcccttagattgcaaaataaaatagttgaactctctgtcttcatgtggaaggtttagagcagttgtgagatgctgttatgctgagaaaccctgactttgttagtgttggaaaaaagtcttacaagtctataatttaaagatgtgatggtggggaggggaggatggggaagctttttatatatgcatacattacatacctatatataaacttgtggtataaccatagaccatagctgcaggttaaccaattagttactatcgtagagtaatatatattcagaataataaactcaagctggagaaatgagtcctgatagactgaaaattgagcaaatggaagaagatacagtattgtttagatcagaatcattaaaaaatatttttgtttagtaagtttgaagatttctggcttttaggccttttctattttgttccatttatttttgcaggcaatcttttccatggagggcagggtatccattctttaccatgggtgtacctgcttaggttaaaaatcataccaaggcctcatacttccaggtttcatgttgcgtcttgttgagggagggagagcaggttacttggcaaccatattgtcacctgtacctgtcacacatcttgaaaaataaaacgataatagaactagtgactaattttcccttacagttcctgcttggtcccacccactgaagtagctcatcgtagtgcgggccgtattagaggcagtggggtacgttagactcagatggaaaagtattctaggtgccagtgttaggatgtcagttttacaaaataatgaagcaattagctatgtgattgagagttattgtttggggatgtgtgttgtggttttgctttttttttttagactgtattaataaacatacaacacaagctggccttgtgttgctggttcctattcagtatttcctggggattgtttgctttttaagtaaaacacttctgacccatagctcagtatgtctgaattccagaggtcacatcagcatctttctgctttgaaaactctcacagctgtggctgcttcacttagatgcagtgagacacatagttggtgttccgattttcacatccttccatgtatttatcttgaagagataagcacagaagagaaggtgctcactaacagaggtacattactgcaatgttctcttaacagttaaacaagctgtttacagtttaaactgctgaatattatttgagctatttaaagcttattatattttagtatgaactaaatgaaggttaaaacatgcttaagaaaaatgcactgatttctgcattatgtgtacagtattggacaaaggattttattcattttgttgcattattttgaatattgtcttttcattttaataaagttataatacttatttatgata

SEQ ID NO: 414412 - DNA, 3051 bp, Homo sapiens
cgcggcgacggcggtccggtgcgaggcagagtgctagcgggagcgcgagccagcaagaggcgcctgcgcgatgtccgggcccctgagcccgcggcgctgagccagccgggacggacatgcgcgggagggcgccgcggggcagccgccgctcctccgggggaatgaaagctactggttgattttaaagtgcctgggcctcacaggtttggagatgtcccagaataaggcacaatgtcaatagcaggagttgctgctcaggagatcagagtcccattaaaaactggatttctacataatggccgagccatggggaatatgaggaagacctactggagcagtcgcagtgagtttaaaaacaactttttaaatattgacccgataaccatggcctacagtctgaactcttctgctcaggagcgcctaataccacttgggcatgcttccaaatctgctccgatgaatggccactgctttgcagaaaatggtccatctcaaaagtccagcttgccccctcttcttattcccccaagtgaaaacttgggaccacatgaagaggatcaagttgtatgtggttttaagaaactcacagtgaatggggtttgtgcttccacccctccactgacacccataaaaaactccccttcccttttcccctgtgcccctctttgtgaacggggttctaggcctcttccaccgttgccaatctctgaagccctctctctggatgacacagactgtgaggtggaattcctaactagctcagatacagacttccttttagaagactctacactttctgatttcaaatatgatgttcctggcaggcgaagcttccgtgggtgtggacaaatcaactatgcatattttgataccccagctgtttctgcagcagatctcagctatgtgtctgaccaaaatggaggtgtcccagatccaaatcctcctccacctcagacccaccgaagattaagaaggtctcattcgggaccagctggctcctttaacaagccagccataaggatatccaactgttgtatacacagagcttctcctaactccgatgaagacaaacctgaggttccccccagagttcccatacctcctagaccagtaaagccagattatagaagatggtcagcagaagttacttcgagcacctatagtgatgaagacaggcctcccaaagtaccgccaagagaacctttgtcaccgagtaactcgcgcacaccgagtcccaaaagccttccgtcttacctcaatggggtcatgcccccgacacagagctttgcccctgatcccaagtatgtcagcagcaaagcactgcaaagacagaacagcgaaggatctgccagtaaggttccttgcattctgcccattattgaaaatgggaagaaggttagttcaacacattattacctactacctgaacgaccaccatacctggacaaatatgaaaaattttttagggaagcagaagaaacaaatggaggcgcccaaatccagccattacctgctgactgcggtatatcttcagccacagaaaagccagactcaaaaacaaaaatggatctgggtggccacgtgaagcgtaaacatttatcctatgtggtttctccttagaccttggggtcatggttcagcagaggttacataggagcaaatggttctcaattttccagtttgattgaagtgcagagaaaaatcccttagattgcaaaataaaatagttgaactctctgtcttcatgtggaaggtttagagcagttgtgagatgctgttatgctgagaaaccctgactttgttagtgttggaaaaaagtcttacaagtctataatttaaagatgtgatggtggggaggggaggatggggaagctttttatatatgcatacattacatacctatatataaacttgtggtataaccatagaccatagctgcaggttaaccaattagttactatcgtagagtaatatatattcagaataataaactcaagctggagaaatgagtcctgatagactgaaaattgagcaaatggaagaagatacagtattgtttagatcagaatcattaaaaaatatttttgtttagtaagtttgaagatttctggcttttaggccttttctattttgttccatttatttttgcaggcaatcttttccatggagggcagggtatccattctttaccatgggtgtacctgcttaggttaaaaatcataccaaggcctcatacttccaggtttcatgttgcgtcttgttgagggagggagagcaggttacttggcaaccatattgtcacctgtacctgtcacacatcttgaaaaataaaacgataatagaactagtgactaattttcccttacagttcctgcttggtcccacccactgaagtagctcatcgtagtgcgggccgtattagaggcagtggggtacgttagactcagatggaaaagtattctaggtgccagtgttaggatgtcagttttacttgtggttttgctttttttttttagactgtattaataaacatacaacacaagctggccttgtgttgctggttcctattcagtatttcctggggattgtttgctttttaagtaaaacacttctgacccatagctcagtatgtctgaattccagaggtcacatcagcatctttctgctttgaaaactctcacagctgtggctgcttcacttagatgcagtgagacacatagttggtgttccgattttcacatccttccatgtatttatcttgaagagataagcacagaagagaaggtgctcactaacagaggtacattactgcaatgttctcttaacagttaaacaagctgtttacagtttaaactgctgaatattatttgagctatttaaagcttattatattttagtatgaactaaatgaaggttaaaacatgcttaagaaaaatgcactgatttctgcattatgtgtacagtattggacaaaggattttattcattttgttgcattattttgaatattgtcttttcattttaataaagttataatacttatttatgata

SEQ ID NO: 414413 - DNA, 3661 bp, Homo sapiens
cgcggcgacggcggtccggtgcgaggcagagtgctagcgggagcgcgagccagcaagaggcgcctgcgcgatgtccgggcccctgagcccgcggcgctgagccagccgggacggacatgcgcgggagggcgccgcggggcagccgccgctcctccgggggaatgaaagctactggttgattttaaagtgcctgggcctcacaggtttggagatgtcccagaataaggcacaatgtcaatagcaggagttgctgctcaggagatcagagtcccattaaaaactggatttctacataatggccgagccatggggaatatgaggaagacctactggagcagtcgcagtgagtttaaaaacaactttttaaatattgacccgataaccatggcctacagtctgaactcttctgctcaggagcgcctaataccacttgggcatgcttccaaatctgctccgatgaatggccactgctttgcagaaaatggtccatctcaaaagtccagcttgccccctcttcttattcccccaagtgaaaacttgggaccacatgaagaggatcaagttgtatgtggttttaagaaactcacagtgaatggggtttgtgcttccacccctccactgacacccataaaaaactccccttcccttttcccctgtgcccctctttgtgaacggggttctaggcctcttccaccgttgccaatctctgaagccctctctctggatgacacagactgtgaggtggaattcctaactagctcagatacagacttccttttagaagactctacactttctgatttcaaatatgatgttcctggcaggcgaagcttccgtgggtgtggacaaatcaactatgcatattttgataccccagctgtttctgcagcagatctcagctatgtgtctgaccaaaatggaggtgtcccagatccaaatcctcctccacctcagacccaccgaagattaagaaggtctcattcgggaccagctggctcctttaacaagccagccataaggatatccaactgttgtatacacagagcttctcctaactccgatgaagacaaacctgaggttccccccagagttcccatacctcctagaccagtaaagccagattatagaagatggtcagcagaagttacttcgagcacctatagtgatgaagacaggcctcccaaagtaccgccaagagaacctttgtcaccgagtaactcgcgcacaccgagtcccaaaagccttccgtcttacctcaatggggtcatgcccccgacacagagctttgcccctgatcccaagtatgtcagcagcaaagcactgcaaagacagaacagcgaaggatctgccagtaaggttccttgcattctgcccattattgaaaatgggaagaaggttagttcaacacattattacctactacctgaacgaccaccatacctggacaaatatgaaaaattttttagggaagcagaagaaacaaatggaggcgcccaaatccagccattacctgctgactgcggtatatcttcagccacagaaaagccagactcaaaaacaaaaatggatctgggtggccacgtgaagcgtaaacatttatcctatgtggtttctccttagaccttggggtcatggttcagcagaggttacataggagcaaatggttctcaattttccagtttgattgaagtgcagagaaaaatcccttagattgcaaaataaaatagttgaactctctgtcttcatgtggaaggtttagagcagttgtgagatgctgttatgctgagaaaccctgactttgttagtgttggaaaaaagtcttacaagtctataatttaaagatgtgatggtggggaggggaggatggggaagctttttatatatgcatacattacatacctatatataaacttgtggtataaccatagaccatagctgcaggttaaccaattagttactatcgtagagtaatatatattcagaataataaactcaagctggagaaatgagtcctgatagactgaaaattgagcaaatggaagaagatacagtattgtttagatcagaatcattaaaaaatatttttgtttagtaagtttgaagatttctggcttttaggccttttctattttgttccatttatttttgcaggcaatcttttccatggagggcagggtatccattctttaccatgggtgtacctgcttaggttaaaaatcataccaaggcctcatacttccaggtttcatgttgcgtcttgttgagggagggagagcaggttacttggcaaccatattgtcacctgtacctgtcacacatcttgaaaaataaaacgataatagaactagtgactaattttcccttacagttcctgcttggtcccacccactgaagtagctcatcgtagtgcgggccgtattagaggcagtggggtacgttagactcagatggaaaagtattctaggtgccagtgttaggatgtcagttttacaaaataatgaagcaattagctatgtgattgagagttattgtttggggatgtgtgttgtggttttgctttttttttttagactgtattaataaacatacaacacaagctggccttgtgttgctggttcctattcagtatttcctggggattgtttgctttttaagtaaaacacttctgacccatagctcagtatgtctgaattccagaggtcacatcagcatctttctgctttgaaaactctcacagctgtggctgcttcacttagatgcagtgagacacatagttggtgttccgattttcacatccttccatgtatttatcttgaagagataagcacagaagagaaggtgctcactaacagaggtacattactgcaatgttctcttaacagttaaacaagctgtttacagtttaaactgctgaatattatttgagctatttaaagcttattatattttagtatgaactaaatgaaggttaaaacatgcttaagaaaaatgcactgatttctgcattatgtgtacagtattggacaaaggattttattcattttgttgcattattttgaatattgtcttttcattttaataaagttataatacttatttatgataaaaaaaaaaaaacaaaaaaacaaaacaaaaaaaaaaaacaaaacacaacaaaaaaaaaacaacaaaaaaaacacacaacaacagcagacggggggggcaacacgcaacaacagagaagagacgaaacaaaacaaataaagatgaacagcagaatacaagagagacaacagaaagtaagaacataaaacagagacgacagaaagcaatagtaagcagcagcagcagagagacaacacgatgacgcagcagacagataaggagagagaaacatatagagagtatagtcagacacgagacacaccagaagagacgacgaagagaagagacacgagcagagagaaagacagagacagagctagacgaagagagagaacagcgagacaagaaatcatcactggagcatagagcgaaagagaaggagaaaacacgaacagagaaaacagacagaaaagagagaagagaaagagaagaagaaacaaaaaacacaaagagaaaagagaagagaagaaacaagaaaagacacaacagagacagaagaggagaagaaaaagacaat

SEQ ID NO: 414414 - DNA, 8053 bp, Homo sapiens
  misc_feature (1432)..(1432): n is a, c, g, or t
cgcggggcggcggggtggctgggccggcggcggcggcggtacgaggcgcgcgctcggggtcccggtcgcgaggaggaggaggatgtggcgcgcggaggggaaatggctgccgaaaacaagccggaagagcgtttcccaaagtgtattctgcggaactagcacctactgtgttctcaacaccgtgccacctatagaagatgatcatgggaacagcaatagtagtcatgtaaaaatctttttaccgaaaaagctgcttgaatgtctgccgaaatgttcaagtttaccaaaagagaggcaccgctggaacactaatgaggaaattgcagcttatttaataacatttgagaaacacgaagaatggctaaccacctcccctaagacaagaccacagaatggctcaatgatactctacaacaggaagaaagtgaaatacaggaaagatgggtattgctggaaaaagaggaaagatgggaaaacgaccagagaggaccacatgaaactcaaggtccagggagtggagtgcttgtacggctgctatgtccattcctccatcatccccaccttccaccggaggtgctactggctccttcagaaccccgacatcgtcctggtgcactacctgaacgtgccggccatcgaggactgcggcaagccttgcggccccatcctctgctccatcaacaccgacaagaaggagtgggcgaaatggacgaaagaagagctcatcgggcagctgaaacccatgttccatggcatcaagtggacctgcagcaatgggaacagcagctcaggcttctcggtggaacagctggtgcagcagatcctcgacagccaccagaccaagccccagccgcggacccacaactgcctctgcaccggcagcctgggagctggcggcagcgtgcatcacaagtgtaacagcgccaaacaccgcatcatctcgcccaaggtggagccacggacaggggggtacgggagccactcggaggtgcagcacaatgacgtgtcggagggcaagcacgagcacagccacagcaagggctccagccgtgagaagaggaacggcaaggtggccaagcccgtgctcctgcaccagagcagcaccgaggtctcctccaccaaccaggtggaagtccccgacaccacccagagctcccctgtgtccatcagcagcgggctcaacagcgacccggacatggtggacagcccggtggtcacaggtgtgtccggtatggcggtggcctctgtgatggggagcttgtcccagagcgccacggtgttcatgtcagaggtcaccaatgaggccgtgtacaccatgtcccccaccgctggccccaaccaccacctcctctcacctgacgcctctcagggcctcgtcctggccgtgagctctgatggccacaagttcgcctttcccaccacgggcagctcngagagcctgtccatgctgcccaccaacgtgtccgaagagctggtcctctccaccaccctcgacggtggccggaagattccagaaaccaccatgaactttgaccccgactgtttccttaataacccaaagcagggccagacgtacgggggtggaggcctgaaagccgagatggtcagctccaacatccggcactcgccacccggggagcggagcttcagctttaccaccgtcctcaccaaggagatcaagaccgaggacacctccttcgagcagcagatggccaaagaagcgtactcctcctccgcggcggctgtggcagccagctccctcaccctgaccgccggctccagcctcctgccgtcgggcggcggcctgagtcccagcaccaccctggagcagatggacttcagcgccatcgactccaacaaggactacacgtccagcttcagccagacgggccacagcccccacatccaccagaccccctccccgagcttcttcctgcaggacgccagcaaacccctccccgtcgagcagaacacccacagcagcctgagtgactctgggggcaccttcgtgatgcccacggtgaaaacggaggcctcgtcccaaaccagctcctgcagcggtcacgtggagacgcggatcgagtccacttcctccctccacctcatgcagttccaggccaacttccaggccatgacggcagaaggggaggtcaccatggagacctcgcaggcggcggaagggagcgaggtcctgctcaagtctggggagctgcaggcttgcagctctgagcactacctgcagccggagaccaacggggtaatccgaagcgccggcggcgtccccatcctcccgggcaacgtggtgcagggactctaccccgtggcccagcccagcctcggcaacgcctccaacatggagctcagcctggaccactttgacatctccttcagcaaccagttctccgacctgatcaacgacttcatctccgtggaggggggcagcagcaccatctatgggcaccagctggtgtcgggggacagcacggcgctctcacagtcagaggacggggcgcgggcccccttcacccaggcagagatgtgcctcccctgctgtagcccccagcagggtagcctgcagctgagcagctcggagggcggggccagcaccatggcctacatgcacgtcgccgaggtggtctcggccgcctcggcccagggcaccctaggcatgctgcagcagagcggacgggtgttcatggtgaccgactactccccagagtggtcttacccagagggaggagtgaaggtcctcatcacaggcccgtggcaagaagccagcaataactacagctgcctgtttgaccagatctcagtgcctgcatccctgattcagcctggggtgctgcgctgctactgcccagcccatgacactggtcttgtgaccctacaagttgccttcaacaaccagatcatctccaactcggtggtgtttgagtacaaagcccgggctctgcccacgctcccttcctcccagcacgactggctgtcgttggacgataaccagttcaggatgtccatcctggaacgactggagcagatggagaggaggatggccgagatgacggggtcccagcagcacaaacaggcgagcggaggcggcagcagtggaggcggcagcgggagcgggaatggagggagccaggcacagtgtgcttctgggactggggccttggggagctgctttgagagccgtgtggtcgtggtatgcgagaagatgatgagccgagcctgctgggcgaagtccaagcacttgatccactcaaagactttccgcggaatgaccctactccacctggccgctgcccagggctatgccaccctaatccagaccctcatcaaatggcgtacaaagcacgcggatagcattgacctggaactggaagttgaccccttgaatgtggaccacttctcctgtactcctctgatgtgggcgtgtgccctagggcacttggaagctgccgtcgtgctgtacaagtgggaccgtcgggccatctcgattcccgactctctaggaaggctgcctttgggaattgccaggtcacggggtcatgtgaaattagcagagtgtctggagcacctgcagagagatgagcaggctcagctgggacagaaccccagaatccactgtcctgcaagcgaagagcccagcacagagagctggatggcccagtggcacagcgaagccatcagctctccagaaatacccaagggagtcactgttattgcaagcaccaacccagagctgagaagacctcgttctgaaccctctaattactacagcagtgagagccacaaagattatccggctcccaaaaagcataaattgaaccctgagtacttccagacaaggcaggagaagctgcttcccactgcactgagtctggaagagccaaatatcaggaagcaaagccctagttctaagcagtctgtccccgagacactcagccccagtgaaggagtgagggacttcagccgggaactctcccctcccactccagagactgcagcatttcaagcctctggatctcagcctgtaggaaagtggaattccaaagatctttacattggtgtgtctacagtacaggtgactggaaatccgaaggggaccagtgtaggaaaggaggcagcaccttcacaggtgcgtccacgggaaccaatgagtgtcctgatgatggctaacagagaggtggtgaatacagagctggggtcctaccgtgatagtgcagaaaatgaagaatgcggccagcccatggatgacatacaggtgaacatgatgaccttggcagaacacattattgaagccacacctgaccgaatcaagcaggagaattttgtgcccatggagtcctcaggattggaaagaacagaccctgccaccattagcagtacaatgagctggctggccagttatctagcggatgctgactgccttcccagtgctgcccagatccgaagtgcatataacgagcctctaaccccttcttctaataccagcttgagccctgttggctctcccgtcagtgaaatcgctttcgagaaacctaaccttccctccgccgcggattggtcagaattcctgagtgcatctaccagtgagaaggtagagaatgagtttgctcagctcactctgtctgatcatgaacagagagaactctatgaggctgccaggcttgtccagacagctttccggaaatacaagggccgacccttgcgggaacagcaagaagtagctgctgctgttattcagcgttgttacagaaaatataaacagtacgcactttataaaaagatgacacaggctgccatccttatccagagcaaattccgaagttactatgaacaaaaaaaattccagcagagccgacgggctgctgtgctcatccaaaagtactaccgaagttataagaaatgtggcaaaagacggcaggctcgccggacggctgtgattgtacaacagaaactcaggagcagtttgctaaccaaaaagcaggatcaagctgctcgaaaaataatgaggtttcttcgccgctgtcgccacagccccctggtggaccataggctgtacaaaaggagtgaaagaattgaaaaaggccaaggaacttgaagacatacagcagcatcccttagcaatgtgacattgcttttcagactgttttcatttctgtttttagcagagacatgcaacaacaacacacacgcacacacgcacacacacacacgtacacacacatacaaaatccctctgcagttttggggagatcagctgcaggattttaacaggaatgttttggtcattgcatttgcactttcatggacaacttttaatttgatcagcaagacatcttggaactcaatcttctgttggatcacgggaaatcaagacacccaggaggaattgaaagaggcttcctcttctcaggaagaagccatttccttctcatatagggctgtattcaaacatcgtgtggaactgtacaaatatttataccaaaaatatagataagaaaaggtggggctatactagcaacaaaaaaagaatgctgttcctgcacctgccggttatttccaagaagctgaatctttgggactgattctcagtggagggcttagatcatacaaaaatctttattgggtccgtgtgttctcatttccttcactgtttatttttgtttgtttgtttgtttgttttaatctctacagcacatttaatgcaacttttgaaatctgcaggtttttaatgtcttgtggaaatttgcagaggggcaggtgtgtggtaaacgggtaatgcatgggaaataatgagaagcagctcacagagtttaaactattttcttgtccccaccaccttccaagaacctgcgagggtagtaatcatcttgtcccctttttcatgttcagcactttaatttttttgccttactttcatgtgcaatgagaattacttaagaattggtaacgcatgtagccttttttagtaaccttggaagctgtagtaattctaaggaatcatgaaccttgcctggacatttgccacctaaacgatcagtgtggtgctgcgttctggccagtaaattccatgtttttggctatatctcatccaaactgagcagtttctgtgtatatatagaaggtagaaatgaaaagtgagaaaatatttgaaagggattatattaattgctaaatattttattcacaaaggtcaataacatggcaagataaaattatttgtatagttttgtctgaatgagcgagaaaaatgtggatgtactgtttgtatatattgtatatattaaaacagagatatgtgcatgaaatcaagaaaaaagaaatgaacaaaagcaaagcattagtggctatggtctgtaaaatgaaacaaaaaaactttatttcactataagagtactttattttaaatgttctttaggagaacattttgctaaagcatgactaaactgcaaaaaaaaaaaaagagctactgtatttagacttaggaaaaaaggcagagtaacattacttaaaaaaaaaaggatatgtttacatttaattttggctaccaggagtttagtttattttatttaaaatttttttgccaatggtgccaagtaatgtgaatgctaatactgcttaagaaaattaagttacttttgcaaaacagataatcataagatgaatcagtatgtagcttaacaccatccactcactccaacaaagaacacttagaatgataaaaaaaaaaaaaaaaaacctgacaaaagaaatagtatgaaaagtagaaaaatgtcacgtttccatatctcctgctggaaatcagaaaatataataaaattgcacaaaaaaaaaaatgaaaaagatgcagactggtcttttagagacggcatggtatattactatttccacataatgaggagccaaagaaatctgatgtttttaacaattaaactgctaatgttaaattgagagaataaagttcgtatttgctgatgccagtttaaaattcccaggttacgtctgaggatcagttggtgtaaagctgagatgttttttcttggttctggctgccaactgtgagttaaaactcaaggcttgttgtgaagcctaaaaatattcacaaataagcttttaaactggtgtctttggaaggaaggtagatacaaaaagattgtgggtaaaaactggggtcagtgctcttggtgccttttctataattgtacttgttttttaattacttcctttcactgccaacctcgaattactgtacagtatatgtctttctgcttgtgatcagctttgacaacagtgacagccccacaactagtagccacctgtacatttgtaaactgacctgactccatttttttttaatgtttcacatgttacattattagctgaatacgttagaaaatgacagatggtagagacttccatagaattaagagggttctcatggaggggataggaagtaggtttaaagcctaccagtgtaacctaccagtacaactgtgaatcctaggcgaggcaaaaatgcacttccactgaaacgaagcatttctgaccgctttttcttggttatgaatcttaatttcgaatataagatgataggtaagcgcagctttcttggataatctgaattcccaagtgccaggagtaggatttcattataaaattaatagctaatcttattctatctcctgaagatttaattgctattgttacccattcgaaatcagctgtactgtgtgaacgaaataaagacaataatacgaacccctctctggctgcacggtcgcttatggcagttccacacagtagttggcgcccaatggggggtccctgagacttgcatgtaaaactagtctagatgtcttctttttttgtaagttttatttttgtaattgtgcatgtaaagcatcattgaatcaatggatctgttgaagaactcagctgctggaaaccatgcaaaatgttttgaattgcccttaaaatatggaaaatgttttctgaatgctttatattctttctgctgtaaattaaaaatgaagaaaatttccccata

SEQ ID NO: 414415 - DNA, 8286 bp, Homo sapiens
  misc_feature (108)..(108): n is a, c, g, or t
  misc_feature (1429)..(1429): n is a, c, g, or t
aacctctgcggatgatgacatggcttcactcgtgtttcattcaacaagcatgtgcagtgaccacagatttggggatcttgaaatgatgtcttctcaaaatagcgaggngagtgagaaagagaagagcgtttcccaaagtgtattctgcggaactagcacctactgtgttctcaacaccgtgccacctatagaagatgatcatgggaacagcaatagtagtcatgtaaaaatctttttaccgaaaaagctgcttgaatgtctgccgaaatgttcaagtttaccaaaagagaggcaccgctggaacactaatgaggaaattgcagcttatttaataacatttgagaaacacgaagaatggctaaccacctcccctaagacaagaccacagaatggctcaatgatactctacaacaggaagaaagtgaaatacaggaaagatgggtattgctggaaaaagaggaaagatgggaaaacgaccagagaggaccacatgaaactcaaggtccagggagtggagtgcttgtacggctgctatgtccattcctccatcatccccaccttccaccggaggtgctactggctccttcagaaccccgacatcgtcctggtgcactacctgaacgtgccggccatcgaggactgcggcaagccttgcggccccatcctctgctccatcaacaccgacaagaaggagtgggcgaaatggacgaaagaagagctcatcgggcagctgaaacccatgttccatggcatcaagtggacctgcagcaatgggaacagcagctcaggcttctcggtggaacagctggtgcagcagatcctcgacagccaccagaccaagccccagccgcggacccacaactgcctctgcaccggcagcctgggagctggcggcagcgtgcatcacaagtgtaacagcgccaaacaccgcatcatctcgcccaaggtggagccacggacaggggggtacgggagccactcggaggtgcagcacaatgacgtgtcggagggcaagcacgagcacagccacagcaagggctccagccgtgagaagaggaacggcaaggtggccaagcccgtgctcctgcaccagagcagcaccgaggtctcctccaccaaccaggtggaagtccccgacaccacccagagctcccctgtgtccatcagcagcgggctcaacagcgacccggacatggtggacagcccggtggtcacaggtgtgtccggtatggcggtggcctctgtgatggggagcttgtcccagagcgccacggtgttcatgtcagaggtcaccaatgaggccgtgtacaccatgtcccccaccgctggccccaaccaccacctcctctcacctgacgcctctcagggcctcgtcctggccgtgagctctgatggccacaagttcgcctttcccaccacgggcagctcngagagcctgtccatgctgcccaccaacgtgtccgaagagctggtcctctccaccaccctcgacggtggccggaagattccagaaaccaccatgaactttgaccccgactgtttccttaataacccaaagcagggccagacgtacgggggtggaggcctgaaagccgagatggtcagctccaacatccggcactcgccacccggggagcggagcttcagctttaccaccgtcctcaccaaggagatcaagaccgaggacacctccttcgagcagcagatggccaaagaagcgtactcctcctccgcggcggctgtggcagccagctccctcaccctgaccgccggctccagcctcctgccgtcgggcggcggcctgagtcccagcaccaccctggagcagatggacttcagcgccatcgactccaacaaggactacacgtccagcttcagccagacgggccacagcccccacatccaccagaccccctccccgagcttcttcctgcaggacgccagcaaacccctccccgtcgagcagaacacccacagcagcctgagtgactctgggggcaccttcgtgatgcccacggtgaaaacggaggcctcgtcccaaaccagctcctgcagcggtcacgtggagacgcggatcgagtccacttcctccctccacctcatgcagttccaggccaacttccaggccatgacggcagaaggggaggtcaccatggagacctcgcaggcggcggaagggagcgaggtcctgctcaagtctggggagctgcaggcttgcagctctgagcactacctgcagccggagaccaacggggtaatccgaagcgccggcggcgtccccatcctcccgggcaacgtggtgcagggactctaccccgtggcccagcccagcctcggcaacgcctccaacatggagctcagcctggaccactttgacatctccttcagcaaccagttctccgacctgatcaacgacttcatctccgtggaggggggcagcagcaccatctatgggcaccagctggtgtcgggggacagcacggcgctctcacagtcagaggacggggcgcgggcccccttcacccaggcagagatgtgcctcccctgctgtagcccccagcagggtagcctgcagctgagcagctcggagggcggggccagcaccatggcctacatgcacgtcgccgaggtggtctcggccgcctcggcccagggcaccctaggcatgctgcagcagagcggacgggtgttcatggtgaccgactactccccagagtggtcttacccagagggaggagtgaaggtcctcatcacaggcccgtggcaagaagccagcaataactacagctgcctgtttgaccagatctcagtgcctgcatccctgattcagcctggggtgctgcgctgctactgcccagcccatgacactggtcttgtgaccctacaagttgccttcaacaaccagatcatctccaactcggtggtgtttgagtacaaagcccgggctctgcccacgctcccttcctcccagcacgactggctgtcgttggacgataaccagttcaggatgtccatcctggaacgactggagcagatggagaggaggatggccgagatgacggggtcccagcagcacaaacaggcgagcggaggcggcagcagtggaggcggcagcgggagcgggaatggagggagccaggcacagtgtgcttctgggactggggccttggggagctgctttgagagccgtgtggtcgtggtatgcgagaagatgatgagccgagcctgctgggcgaagtccaagcacttgatccactcaaagactttccgcggaatgaccctactccacctggccgctgcccagggctatgccaccctaatccagaccctcatcaaatggcgtacaaagcacgcggatagcattgacctggaactggaagttgaccccttgaatgtggaccacttctcctgtactcctctgatgtgggcgtgtgccctagggcacttggaagctgccgtcgtgctgtacaagtgggaccgtcgggccatctcgattcccgactctctaggaaggctgcctttgggaattgccaggtcacggggtcatgtgaaattagcagagtgtctggagcacctgcagagagatgagcaggctcagctgggacagaaccccagaatccactgtcctgcaagcgaagagcccagcacagagagctggatggcccagtggcacagcgaagccatcagctctccagaaatacccaagggagtcactgttattgcaagcaccaacccagagctgagaagacctcgttctgaaccctctaattactacagcagtgagagccacaaagattatccggctcccaaaaagcataaattgaaccctgagtacttccagacaaggcaggagaagctgcttcccactgcactgagtctggaagagccaaatatcaggaagcaaagccctagttctaagcagtctgtccccgagacactcagccccagtgaaggagtgagggacttcagccgggaactctcccctcccactccagagactgcagcatttcaagcctctggatctcagcctgtaggaaagtggaattccaaagatctttacattggtgtgtctacagtacaggtgactggaaatccgaaggggaccagtgtaggaaaggaggcagcaccttcacaggtgcgtccacgggaaccaatgagtgtcctgatgatggctaacagagaggtggtgaatacagagctggggtcctaccgtgatagtgcagaaaatgaagaatgcggccagcccatggatgacatacaggtgaacatgatgaccttggcagaacacattattgaagccacacctgaccgaatcaagcaggagaattttgtgcccatggagtcctcaggattggaaagaacagaccctgccaccattagcagtacaatgagctggctggccagttatctagcggatgctgactgccttcccagtgctgcccagatccgaagtgcatataacgagcctctaaccccttcttctaataccagcttgagccctgttggctctcccgtcagtgaaatcgctttcgagaaacctaaccttccctccgccgcggattggtcagaattcctgagtgcatctaccagtgagaaggtagagaatgagtttgctcagctcactctgtctgatcatgaacagagagaactctatgaggctgccaggcttgtccagacagctttccggaaatacaagggccgacccttgcgggaacagcaagaagtagctgctgctgttattcagcgttgttacagaaaatataaacagtacgcactttataaaaagatgacacaggctgccatccttatccagagcaaattccgaagttactatgaacaaaaaaaattccagcagagccgacgggctgctgtgctcatccaaaagtactaccgaagttataagaaatgtggcaaaagacggcaggctcgccggacggctgtgattgtacaacagaaactcaggagcagtttgctaaccaaaaagcaggatcaagctgctcgaaaaataatgaggtttcttcgccgctgtcgccacagagtgaaagaattgaaaaaggccaaggaacttgaagacatacagcagcatcccttagcaatgtgacattgcttttcagactgttttcatttctgtttttagcagagacatgcaacaacaacacacacgcacacacgcacacacacacacgtacacacacatacaaaatccctctgcagttttggggagatcagctgcaggattttaacaggaatgttttggtcattgcatttgcactttcatggacaacttttaatttgatcagcaagacatcttggaactcaatcttctgttggatcacgggaaatcaagacacccaggaggaattgaaagaggcttcctcttctcaggaagaagccatttccttctcatatagggctgtattcaaacatcgtgtggaactgtacaaatatttataccaaaaatatagataagaaaaggtggggctatactagcaacaaaaaaagaatgctgttcctgcacctgccggttatttccaagaagctgaatctttgggactgattctcagtggagggcttagatcatacaaaaatctttattgggtccgtgtgttctcatttccttcactgtttatttttgtttgtttgtttgtttgttttaatctctacagcacatttaatgcaacttttgaaatctgcaggtttttaatgtcttgtggaaatttgcagaggggcaggtgtgtggtaaacgggtaatgcatgggaaataatgagaagcagctcacagagtttaaactattttcttgtccccaccaccttccaagaacctgcgagggtagtaatcatcttgtcccctttttcatgttcagcactttaatttttttgccttactttcatgtgcaatgagaattacttaagaattggtaacgcatgtagccttttttagtaaccttggaagctgtagtaattctaaggaatcatgaaccttgcctggacatttgccacctaaacgatcagtgtggtgctgcgttctggccagtaaattccatgtttttggctatatctcatccaaactgagcagtttctgtgtatatatagaaggtagaaatgaaaagtgagaaaatatttgaaagggattatattaattgctaaatattttattcacaaaggtcaataacatggcaagataaaattatttgtatagttttgtctgaatgagcgagaaaaatgtggatgtactgtttgtatatattgtatatattaaaacagagatatgtgcatgaaatcaagaaaaaagaaatgaacaaaagcaaagcattagtggctatggtctgtaaaatgaaacaaaaaaactttatttcactataagagtactttattttaaatgttctttaggagaacattttgctaaagcatgactaaactgcaaaaaaaaaaaaagagctactgtatttagacttaggaaaaaaggcagagtaacattacttaaaaaaaaaaggatatgtttacatttaattttggctaccaggagtttagtttattttatttaaaatttttttgccaatggtgccaagtaatgtgaatgctaatactgcttaagaaaattaagttacttttgcaaaacagataatcataagatgaatcagtatgtagcttaacaccatccactcactccaacaaagaacacttagaatgataaaaaaaaaaaaaaaaaacctgacaaaagaaatagtatgaaaagtagaaaaatgtcacgtttccatatctcctgctggaaatcagaaaatataataaaattgcacaaaaaaaaaaatgaaaaagatgcagactggtcttttagagacggcatggtatattactatttccacataatgaggagccaaagaaatctgatgtttttaacaattaaactgctaatgttaaattgagagaataaagttcgtatttgctgatgccagtttaaaattcccaggttacgtctgaggatcagttggtgtaaagctgagatgttttttcttggttctggctgccaactgtgagttaaaactcaaggcttgttgtgaagcctaaaaatattcacaaataagcttttaaactggtgtctttggaaggaaggtagatacaaaaagattgtgggtaaaaactggggtcagtgctcttggtgccttttctataattgtacttgttttttaattacttcctttcactgccaacctcgaattactgtacagtatatgtctttctgcttgtgatcagctttgacaacagtgacagccccacaactagtagccacctgtacatttgtaaactgacctgactccattttgtttttaaatgtgtgggttatgttgcagctgttgcagtcccccagatacctattattttacacaatttgacctataggaggacactgagtaatttacaaacacaactgcattcataaatgggaatagaacgtgaaagccagctctttcagaatatcctctattaatactgaatttagatatctttattccatttattatggtacaaataactgatgttttaaccagagtaatgacctcagtggatttgctttaaccctcacattttttttttaatgtttcacatgttacattattagctgaatacgttagaaaatgacagatggtagagacttccatagaattaagagggttctcatggaggggataggaagtaggtttaaagcctaccagtgtaacctaccagtacaactgtgaatcctaggcgaggcaaaaatgcacttccactgaaacgaagcatttctgaccgctttttcttggttatgaatcttaatttcgaatataagatgataggtaagcgcagctttcttggataatctgaattcccaagtgccaggagtaggatttcattataaaattaatagctaatcttattctatctcctgaagatttaattgctattgttacccattcgaaatcagctgtactgtgtgaacgaaataaagacaataatacgaacccctctctggctgcacggtcgcttatggcagttccacacagtagttggcgcccaatggggggtccctgagacttgcatgtaaaactagtctagatgtcttctttttttgtaagttttatttttgtaattgtgcatgtaaagcatcattgaatcaatggatctgttgaagaactcagctgctggaaaccatgcaaaatgttttgaattgcccttaaaatatggaaaatgttttctgaatgctttatattctttctgctgtaaattaaaaatgaagaaaatttccccata

SEQ ID NO: 414416 - DNA, 2334 bp, Homo sapiens
cgcggcgacggcggtccggtgcgaggcagagtgctagcgggagcgcgagccagcaagaggcgcctgcgcgatgtccgggcccctgagcccgcggcgctgagccagccgggacggacatgcgcgggagggcgccgcggggcagccgccgctcctccgggggaatgaaagctactggttgattttaaagtgcctgggcctcacaggtttggagatgtcccagaataaggcacaatgtcaatagcaggagttgctgctcaggagatcagagtcccattaaaaactggatttctacataatggccgagccatggggaatatgaggaagacctactggagcagtcgcagtgagtttaaaaacaactttttaaatattgacccgataaccatggcctacagtctgaactcttctgctcaggagcgcctaataccacttggtatgtattctgaaaatctgatcacagtaagcatttgagaagaacagtctggattcgggttagcttgtcctccagcattattttttaaatgaggaaacctgaactatttccaacaacagcctgacccctagtggcaacagattcagaagataactgtgtttttctcaagctattgtactcgactgccttcattctgagtcactgattgctaagtaggactgttcatggacgtgggatcttctaaaatcaagaattagttctcattccagctctgatgcatactttacttcatgaaaccttaggcgagatttcccacctttcttactagtatcgaatgcatgtttgacagtaatagatgaaaatagtataaatgttcctcaaaacttaaaaaatagtatttttaatgtgaatattctgttccttggatctttgtcaagagctgtgtgtgaactgaacacattgcaggcaagtccattcactcacaatattatgatgtgccagcaataaggactttgtcttatctcattggtaccctacgtgcctagtatggtcgcatgtcttaaatggcaaggctggtacagtatggtattcatgtaaattatatgctattcatcttccgcgaattttacacacgtcacaaaacttgcctgtgatgtgtgggtgtgcgctgtgcacatgtccaagggagatagaggagatagtttgttctttgaaccacaccatgtgcgttaagaatcttctgctctctaattacacctgtggtggttgcatgggtgttctcggggtgacagcagtcaagtgtttcactcaggaagaaagctgtggaagcataggtagctggggtgctctctccctcacacaggtggagagaggattgttgatcttttattaatatctctcgttcattccagggcatgcttccaaatctgctccgatgaatggccactgctttgcagaaaatggtccatctcaaaagtccagcttgccccctcttcttattcccccaagtgaaaacttgggaccacatgaagaggatcaagttgtatgtggttttaagaaactcacagtgaatggggtttgtgcttccacccctccactgacacccataaaaaactccccttcccttttcccctgtgcccctctttgtgaacggggttctaggcctcttccaccgttgccaatctctgaagccctctctctggatgacacagactgtgaggtggaattcctaactagctcagatacagacttccttttagaagactctacactttctgatttcaaatatgatgttcctggcaggcgaagcttccgtgggtgtggacaaatcaactatgcatattttgataccccagctgtttctgcagcagatctcagctatgtgtctgaccaaaatggaggtgtcccagatccaaatcctcctccacctcagacccaccgaagattaagaaggtctcattcgggaccagctggctcctttaacaagccagccataaggatatccaactgttgtatacacagagcttctcctaactccgatgaagacaaacctgaggttccccccagagttcccatacctcctagaccagtaaagccagattatagaagatggtcagcagaagttacttcgagcacctatagtgatgaagacaggcctcccaaagtaccgccaagagaacctttgtcaccgagtaactcgcgcacaccgagtcccaaaagccttccgtcttacctcaatggggtcatgcccccgacacagagctttgcccctgatcccaagtatgtcagcagcaaagcactgcaaagacagaacagcgaaggatctgccagtaaggttccttgcattctgcccattattgaaaatgggaagaaggttagttcgttctagatcgcgggcggcc

SEQ ID NO: 414417 - DNA, 574 bp, Homo sapiens
cgcggggcggcggggtggctgggccggcggcggcggcggtacgaggcgcgcgctcggggtcccggtcgcgaggaggaggaggatgtggcgcgcggaggggaaatggctgccgaaaacaagccggaagagcgtttcccaaagtgtattctgcggaactagcacctactgtgttctcaacaccgtgccacctatagaagatgatcatgggaacagcaatagtagtcatgtaaaaatctttttaccgaaaaagctgcttgaatgtctgccgaaatgttcaagtttaccaaaagagaggcaccgctggaacactaatgagagatcatgatgcagccgtccttttggatttctttttaataatgtgtgacccttcacctttgatcccctgacctgcattaccttggtaaccatttcattttttaatttaatttcattttttaattttggtgtacaagctgtaacatttcatctttcaaagtgtgtaccaactcatttccagatgtagccactcccctgcctgtacagaagaaactgaatctttttcacattctaataaatcaatgtgagtttttattag

SEQ ID NO: 414418 - DNA, 697 bp, Homo sapiens
gcagccgccctcggcgtcctctgtagcgggcgacctaggccgcgggacccggacggaggtagaggccagggcagcgcgtccgggagcggagtccgcgcccgccgccgccatgccggacagctgggacaaggatgtgtaccctgagcccccgcgccgcacgccggtgcagcccaatcccatcgtctacatgatgaaagcgttcgacctcatcgtggaccgacccgtgaccctcgtgagagaatttatagagcggcagcacgcaaagaacaggtattactactaccaccggcagtaccgccgcgtgccagacatcactgagtgcaaggaggaggacatcatgtgcatgtatgaagccgaaatgcagtggaagagggactacaaagtcgaccaagaaattatcaacattatgcaggatcggctcaaagcctgtcagcagagggaaggacagaactaccagcagaactgtatcaaggaagtggagcagttcacccaggtggccaaggcctaccaggaccgctatcaggacctgggggcctacagttctgccaggaagtgcctggccaaacagaggcagaggatgctgcaagagagaaaagctgcaaaagaggccgccgctgccacctcctgaggcagctgtgggtgcccctgctgtgtggctctgtatgactgttgctgaaatataaagccctgcaacctg

SEQ ID NO: 414419 - DNA, 756 bp, Homo sapiens
gcagccgccctcggcgtcctctgtagcgggcgacctaggccgcgggacccggacggaggtagaggccagggcagcgcgtccgggagcggagtccgcgcccgccgccgccatgccggacagctgggacaaggatgtgtaccctgagcccccgcgccgcacgccggtgcagcccaatcccatcgtctacatgatgaaagcgttcgacctcatcgtggaccgacccgtgaccctcgtgagagaatttatagagcggcagcacgcaaagaacaggtattactactaccaccggcagtaccgccgcgtgccagacatcactgagtgcaaggaggaggacatcatgtgcatgtatgaagccgaaatgcagtggaagagggactacaaagtcgaccaagaaattatcaacattatgcaggatcggctcaaagcctgtcagcagagggaaggacagaactaccagcagaactgtatcaaggaagtggagcagttcacccaggtggccaaggcctaccaggaccgctatcaggacctgggggcctacagttctgccaggaagtgcctggccaaacagaggcagaggatgctgcaagagagaaaagctgcaaaagaggccgccgctgccacctcctgaggcagctgtgggtgcccctgctgtgtggctctgtatgactgttgctgaaatataaagccctgcaacctgaaaaaaaaagccgcgaattcggctccttggccattccccttagggggcgattactactg

SEQ ID NO: 414420 - DNA, 664 bp, Homo sapiens
gcagccgccctcggcgtcctctgtagcgggcgacctaggccgcgggacccggacggaggtagaggccagggcagcgcgtccgggagcggagtccgcgcccgccgccgccatgccggacagctgggacaaggatgtgtaccctgagcccccgcgccgcacgccggtgcagcccaatcccatcgtctacatgatgaaagcgttcgacctcatcgtggaccgacccgtgaccctcgtgagagaatttatagagcggcagcacgcaaagaacaggtattactactaccaccggcagtaccgccgcgtgccagacatcactgagtgcaaggaggaggacatcatgtgcatcaaagtcgaccaagaaattatcaacattatgcaggatcggctcaaagcctgtcagcagagggaaggacagaactaccagcagaactgtatcaaggaagtggagcagttcacccaggtggccaaggcctaccaggaccgctatcaggacctgggggcctacagttctgccaggaagtgcctggccaaacagaggcagaggatgctgcaagagagaaaagctgcaaaagaggccgccgctgccacctcctgaggcagctgtgggtgcccctgctgtgtggctctgtatgactgttgctgaaatataaagccctgcaacctg

SEQ ID NO: 414421 - DNA, 929 bp, Homo sapiens
ttcatggatgtctatcagcgcagctactgccatccaatcgagaccctggtggacatcttccaggagtaccctgatgagatcgagtacatcttcaagccatcctgtgtgcccctgatgcgatgcgggggctgctgcaatgacgagggcctggagtgtgtgcccactgaggagtccaacatcaccatgcagattatgcggatcaaacctcaccaaggccagcacataggagagatgagcttcctacagcacaacaaatgtgaatgcagaccaaagaaagatagagcaagacaagaaaatccctgtgggccttgctcagagcggagtccgcgcccgccgccgccatgccggacagctgggacaaggatgtgtaccctgagcccccgcgccgcacgccggtgcagcccaatcccatcgtctacatgatgaaagcgttcgacctcatcgtggaccgacccgtgaccctcgtgagagaatttatagagcggcagcacgcaaagaacaggtattactactaccaccggcagtaccgccgcgtgccagacatcactgagtgcaaggaggaggacatcatgtgcatgtatgaagccgaaatgcagtggaagagggactacaaagtcgaccaagaaattatcaacattatgcaggatcggctcaaagcctgtcagcagagggaaggacagaactaccagcagaactgtatcaaggaagtggagcagttcacccaggtggccaaggcctaccaggaccgctatcaggacctgggggcctacagttctgccaggaagtgcctggccaaacagaggcagaggatgctgcaagagagaaaagctgcaaaagaggccgccgctgccacctcctgaggcagctgtgggtgcccctgctgtgtggctctgtatgactgttgctgaaatataaagccctgcaacctg

SEQ ID NO: 414422 - DNA, 923 bp, Homo sapiens
gcagccgccctcggcgtcctctgtagcgggcgacctaggccgcgggacccggacggaggtagaggccagggcagcgcgtccgggagcggagtccgcgcccgccgccgccatgccggacagctgggacaaggatgtgtaccctgagcccccgcgccgcacgccggtgcagcccaatcccatcgtctacatgatgaaagcgttcgacctcatcgtggaccgacccgtgaccctcgtgagagaatttatagagcggcagcacgcaaagaacaggtattactactaccaccggcagtaccgccgcgtgccagacatcactgagtgcaaggaggaggacatcatgtgcatgtatgaagccgaaatgcagtggaagagggactacaaagtcgaccaagaaattatcaacattatgcaggatcggctcaaagcctgtcagcagagggaaggacagaactaccagcagaactgtatcaaggaagtggagcagttcacccaggtggccaaggcctaccaggaccgctatcaggacctgggggcctacagttctgccaggaagtgcctggccaaacagaggcagaggatgctgcaagagagaaaagctgcaaaagaggccgccgctgccacctcctgaggcagctgtgggtgcccctgctgtgtggctctgtatgactgttgctgaaatataaagccctgcaacctgggctttgagccgatcctgcataatgttgataatttcttgtcgactttgtagtccctcttccactgcatttcggcttcatacatgcacatgatgtcctcctccttgcactcagtgatgtctggcacgcggcggtactgccggtggtagtagtaatacctgttctttgcgtgctgccgctctataaattctctcacgaggtcgacgcggccgcgaatttagtagtagt

SEQ ID NO: 414423 - DNA, 780 bp, Homo sapiens
gcagccgccctcggcgtcctctgtagcgggcgacctaggccgcgggacccggacggaggtagaggccagggcagcgcgtccgggagcggagtccgcgcccgccgccgccatgccggacagctgggacaaggatgtgtaccctgagcccccgcgccgcacgccggtgcagcccaatcccatcgtctacatgatgaaagcgttcgacctcatcgtggaccgacccgtgaccctcgtgagagaatttatagagcggcagcacgcaaagaacaggtattactactaccaccggcagtaccgccgcgtgccagacatcactgagtgcaaggaggaggacatcatgtgcatgtatgaagccgaaatgcagtggaagagggactacaaagtcgaccaagaaattatcaacattatgcaggatcggctcaaagcctgtcagcagagggaaggtaggcccccaggtcctgatagcggtcctggtaggccttggccacctgggtgaactgctccacttccttgatacagttctgctggtagttctgtccttccctctgctgacaggctttgagccgatcctgcataatgttgataatttcttgtcgactttgtagtccctcttccactgcatttcggcttcatacatgcacatgatgtcctcctccttgcactcagtgatgtctggcacgcggcggtactgccggtggtagtagtaatacctgttctttgcgtgctgccgctctataaattctctcacgaggtcgacgcggccgcgaatttagtagtagt

SEQ ID NO: 414424 - DNA, 857 bp, Homo sapiens
gcagccgccctcggcgtcctctgtagcgggcgacctaggccgcgggacccggacggaggtagaggccagggcagcgcgtccgggagcggagtccgcgcccgccgccgccatgccggacagctgggacaaggatgtgtaccctgagcccccgcgccgcacgccggtgcagcccaatcccatcgtctacatgatgaaagcgttcgacctcatcgtggaccgacccgtgaccctcgtgagagaatttatagagcggcagcacgcaaagaacaggtattactactaccaccggcagtaccgccgcgtgccagacatcactgagtgcaaggaggaggacatcatgtgcatgtatgaagccgaaatgcagtggaagagggactacaaagtcgaccaagaaattatcaacattatgcaggatcggctcaaagcctgtcagcagagggaaggacagaactaccagcagaactgtatcaaggaagtggagcagttcacccaggtggccaaggcctaccaggaccgctgtgcgtgccccacccacccccaaccccccaccatcctcctgaggcctgggggccagaaccattgcaaatcttccctcccctcccttgtgctcacttgactttgccccctttgcatgtagcagaggcctcggttcccagcttgtttccattgcttccccagatcaggacctgggggcctacagttctgccaggaagtgcctggccaaacagaggcagaggatgctgcaagagagaaaagctgcaaaagaggccgccgctgccacctcctgaggcagctgtgggtgcccctgctgtgtggctctgtatgactgttgctgaaatataaagccctgcaacctg

SEQ ID NO: 414425 - DNA, 284 bp, Homo sapiens
gcagccgccctcggcgtcctctgtagcgggcgacctaggccgcgggacccggacggaggtagaggccagggcagcgcgtccgggagcggagtccgcgcccgccgccgccatgccggacagctgggacaaggatgtgtaccctgagcccccgcgccgcacgccggtgcagcccaatcccatcgtctacatgatgaaagcgttcgacctcatcgtggaccgacccgtgaccctcgtgagaggtacgaagccccagcccggggctccctcgccggcctctggggacc

SEQ ID NO: 414426 - DNA, 755 bp, Homo sapiens
gcagccgccctcggcgtcctctgtagcgggcgacctaggccgcgggacccggacggaggtagaggccagggcagcgcgtccgggagcggagtccgcgcccgccgccgccatgccggacagctgggacaaggatgtgtaccctgagcccccgcgccgcacgccggtgcagcccaatcccatcgtctacatgatgaaagcgttcgacctcatcgtggaccgacccgtgaccctcgtgagagaatttatagagcggcagcacgcaaagaacaggtattactactaccaccggcagtaccgccgcgtgccagacatcactgagtgcaaggaggaggacatcatgtgcatgtatgaagccgaaatgcagtggaagagggactacaaagtcgaccaagaaattatcaacattatgcaggatcggctcaaagcctgtcagcagagggaaggacagaactaccagcagaactgtatcaaggaagtggagcagttcacccaggtggccaaggcctaccaggaccgctatcaggacctgggggcctacagttctgccaggaagtgcctggccaaacagaggcagaggatgctgcaagagagaaaagctgcaaaagaggccgccgctgccacctcctgaggcagctgtgggtgcccctgctgtgtggctctgtatgactgttgctgaaatataaagccctgcaacctgaaacacaaaaaaatcactcaacaaaaacaaacatacaccaacatccaacacaaaaggg

SEQ ID NO: 414427 - DNA, 912 bp, Homo sapiens
gcagccgccctcggcgtcctctgtagcgggcgacctaggccgcgggacccggacggaggtagaggccagggcagcgcgtccgggagcggagtccgcgcccgccgccgccatgccggacagctgggacaaggatgtgtaccctgagcccccgcgccgcacgccggtgcagcccaatcccatcgtctacatgatgaaagcgttcgacctcatcgtggaccgacccgtgaccctcgtgagagaatttatagagcggcagcacgcaaagaacaggtattactactaccaccggcagtaccgccgcgtgccagacatcactgagtgcaaggaggaggacatcatgtgcatgtatgaagccgaaatgcagtggaagagggactacaaagtcgaccaagaaattatcaacattatgcaggatcggctcaaagcctgtcagcagagggaagacagtcatacagagccacacagcaggggcacccacagctgcctcaggaggtggcagcggcggcctcttttgcagcttttctctcttgcagcatcctctgcctctgtttggccaggcacttcctggcagaactgtaggcccccaggtcctgatagcggtcctggtaggccttggccacctgggtgaactgctccacttccttgatacagttctgctggtagttctgtccttccctctgctgacaggctttgagccgatcctgcataatgttgataatttcttgtcgactttgtagtccctcttccactgcatttcggcttcatacatgcacatgatgtcctcctccttgcactcagtgatgtctggcacgcggcggtactgccggtggtagtagtaatacctgttctttgcgtgctgccgctctataaattctctcacgaggtcgacgcggccgcgaatttagtagtagt

SEQ ID NO: 414428 - DNA, 620 bp, Homo sapiens
gcagccgccctcggcgtcctctgtagcgggcgacctaggccgcgggacccggacggaggtagaggccagggcagcgcgtccgggagcggagtccgcgcccgccgccgccatgccggacagctgggacaaggatgtgtaccctgagcccccgcgccgcacgccggtgcagcccaatcccatcgtctacatgatgaaagcgttcgacctcatcgtggaccgacccgtgaccctcgtgagagaatttatagagcggcagcacgcaaagaacaggtattactactaccaccggcagtaccgccgcgtgccagacatcactgagtgcaagcctgggggccagaaccattgcaaatcttccctcccctcccttgtgctcacttgactttgccccctttgcatgtagcagaggcctcggttcccagcttgtttccattgcttccccagatcaggacctgggggcctacagttctgccaggaagtgcctggccaaacagaggcagaggatgctgcaagagagaaaagctgcaaaagaggccgccgctgccacctcctgaggcagctgtgggtgcccctgctgtgtggctctgtatgactgttgctgaaatataaagccctgcaacctg

SEQ ID NO: 414429 - DNA, 3158 bp, Homo sapiens
ccaaagctagtgccatacagcggaaaggcagggcagggcgatgtagacctggaatttgttttcgtctgttcagtagactccgattccagaatatgttggaatttcagactccggaacttttgagaatgccattacaggaactttgcttacataccaagctgttagccccagttaattgtcccattgctgattttcttatgaaagctcctgaacctccaccagctttaattgtaagaaatgctgtacaaatgcttaagacaatagatgcaatggatacatgggaagatctgactgaacttgggtatcatttggctgacttgccagtagaaccacatcttggtaaaatggtcttgtgtgctgttgttttaaagtgtctggaccccatccttacagttgcttgcacgctagcttatcgagatccttttgtactacctactcaggcctctcaaaaacgtgcagctatgctttgtaggaaacgttttactgcaggagctttcagtgaccatatggcacttctcagagcattccaggcctggcaaaaagcacgaagtgatgggtgggagcgagccttttgtgaaaagaattttctttcacaggctactatggaaataatcataggcatgagaacacagttgcttggtcaacttagagcatcaggttttgttagagcacgaggtggtggtgacattcgggacgttaacacaaactctgagaattgggctgtcgttaaagctgcattggtggcaggcatgtatcctaatttagtccacgtggacagagagaatctagtgttgacagggccaaaggagaaaaaagtacgatttcatcctgcttcagttctcagtcagcctcaatataaaaagattcctccagccaatggtcaagctgcagcaattaaggcactgcccacagattggcttatttatgatgaaatgaccagagcccatagaatagctaatattagatgttgttcagcagtgacgcctgtcactatattggtattctgtggaccagctagattggcaagtaatgctcttcaggaaccttcatcctttagagtggatggcattcccaatgacagtagtgatagtgaaatggaggacaaaactacagctaatttggcagccttgaaacttgatgagtggctccatttcacactggagccagaggcagctagtttattgctgcagctcagacagaagtggcatagcttatttttacgccgaatgagagctccatctaaaccttggtctcaagttgatgaagctaccataagagcaattatagctgttttaagcactgaagaacagtctgcaggtttacaacaaccatcggggattggccaaaggccaaggcctatgtcttcagaagagcttcctttggcctcatcttggaggtcaaataatagtaggaaaagttcagcagatactgaattttctgatgagtgtactactgcagaaagagtactgatgaaatctccatctccagcattacacccacctcagaagtacaaagatagaggaattttacatcctaaacgaggtactgaggaccgatcagatcagtcttctctgaaatctacagacagcagtagttacccaagtccttgtgctagtccttctcctccatcctcaggaaagggctcaaaatctccttcgccaagaccaaacatgcctgttcgatacttcataatgaagagtagcaatttgagaaaccttgaaatttctcaacagaagggtatctggtctacaactcctagtaatgaacggaagctaaatcgagccttttgggaaagcagcatagtttacttggtattttctgttcaaggatctggacatttccagggattttctaggatgtcttctgagattggaagggaaaagagtcaggactggggctctgctggactaggaggagtatttaaggtggagtggatacgaaaagaaagccttccctttcaatttgcacaccatttactcaatccatggaatgacaacaagaaagtgcagataagcagggatgggcaggaactagaacctcaggttggtgaacagttgctccagttatgggaacgtcttcccttgggagaaaaaaacacaactgattgacactcagaactcttagctgtggaagaacatcatgcctatttataaccactgaatgcactgactttcaaaaactgaggtggggtgtgtgttacgaatgggctttttaacacttttagagtgttgctttagaactaccatcttcatatacaggagaaaggaagcatttaaatttttatagtgattatagagaatgattatatgatgtttgtaatgaataaaatagtagtttcattatttggcacaatagcagtttattttaaacaaacaatttgaagttaaacatttcatttttaaaaacactgaattacagttcttattgatgactttttaatgcagagtaagttgtttaagaaaggcctgaatatatcagaacatctgagcaccattttagaagagtcaactcttaagattatcattagaaaacaaatacgtcaacacctatgaaaagaagcggggaaaacaacaacaaggacaacaacaaaaaaccagtgaaattctacaagtgtcccttttaaaaatagtatgtgctaactaagggctattcattctgccatttttaacttgagacacatttaagaataaagttggatgttctttttctgtgattatgaaatgcaataaaatctgaataaagggcaaagtttcttcctgatcagattagattaagtgcttagttttattcctaattctgccccttttaacctgatgtgtaccttactctttcctccctctcttcctcccttcctcctctccccactcctttcctgcatttctccctccctccttccctcgtcacatctcttatatgagcacagtaattatgacctttttgttttggctacaacttgattgaaacaagttcaaaatttaaacaagttcatacaagtttttaaaaattctcaactggtagcttgcttgctgtgcgtcttccaaactaaagcctgcaagcgccacaattctaagtgccgccttccattttttttcagtatgttttcactggcttatgttttcagatatacttattaaaatgaaattctattaaaaaaaaaa

SEQ ID NO: 414430 - DNA, 2425 bp, Homo sapiens
attttaataattttcaagataagaagatatagttgcttaagagagttccttggaaaaaaacccaacatcgaatatgctaggtttcacagtaaacctttggaagttccagctgagtgcttttgctgaatctctatgaaaaacaaaatccattatttttaggtagaaacagttccaggactccatgggaatctgttgccattttgtcacaaaagttgagagattttgcagattaactgtaatcttaaatctggaagtcaactccataaaccttaaagcaaagaattagaacaattcataccagatgattttagcatacgctggtaggaaaatgaaatttaaagtgattttcttacatttttatcagtgtaggttttggtcattaaaaattttcactccagttctttttatgtttattttgacttctgatttatctaggaactagaacctcaggttggtgaacagttgctccagttatgggaacgtcttcccttgggagaaaaaaacacaactgattgacactcaggttataccatcttgactttgagtattggcagtatttgtgatcattaggaacctttcagattatttatctttttttttcccctttcttctagaactcttagctgtggaagaacatcatgcctatttataaccactgaatgcactgactttcaaaaactgaggtggggtgtgtgttacgaatgggctttttaacacttttagagtgttgctttagaactaccatcttcatatacaggagaaaggaagcatttaaatttttatagtgattatagagaatgattatatgatgtttgtaatgaataaaatagtagtttcattatttggcacaatagcagtttattttaaacaaacaatttgaagttaaacatttcatttttaaaaacactgaattacagttcttattgatgactttttaatgcagagtaagttgtttaagaaaggcctgaatatatcagaacatctgagcaccattttagaagagtcaactcttaagattatcattagaaaacaaatacgtcaacacctatgaaaagaagcggggaaaacaacaacaaggacaacaacaaaaaaccagtgaaattctacaagtgtcccttttaaaaatagtatgtgctaactaagggctattcattctgccatttttaacttgagacacatttaagaataaagttggatgttctttttctgtgattatgaaatgcaataaaatctgaataaagggcaaagtttcttcctgatcagattagattaagtgcttagttttattcctaattctgccccttttaacctgatgtgtaccttactctttcctccctctcttcctcccttcctcctctccccactcctttcctgcatttctccctccctccttccctcgtcacatctcttatatgagcacagtaattatgacctttttgttttggctacaacttgattgaaacaagttcaaaatttaaacaagttcatacaagtttttaaaaattctcaactggtagcttgcttgctgtgcgtcttccaaactaaagcctgcaagcgccacaattctaagtgccgccttccattttttttcagtatgttttcactggcttatgttttcagatatgattttcctttttcgcatatatggtttaataaatgggggataattttttttttgtaaatccgtgcttgtgccaagtctcatatttctttgccatctcagaattatctttttaccaccactgtttataaaatttccttagagactttttgaagggaaaatagagcaacagggaaaaatgaaagaaatgtcttggttactgagctctaaatagacaggtttgatggcacttctcatgatacattttagttattcttataaaagcaaacaggcaaacatgagtgtaaattaaagacaaaaagaaaactctggttttatatttgagaacacgtgaaaaatcatgggtcaacataaaatcttgagaaccttctactttctctgggaaagcattatatagtggtgcattagtttagaaagtcagctatgattttgcctatagttctagttattagctttggggttttcttgtactttaagacatacctgtaaattgaacctatttgaattatattccactgtatgtgtattatggctcttttcctattagagcaacttgtgtttccctgataatgtgtacattttttaggcatgtacttaatagttcacaatgttctaaatttggaaggacttaaaaaaaaaacttgtttaaatttccatctgttttgtaatatctagctctatatgtaaatgatgggtttgttggtatttaaaatgaatacaacttgaatgtaattaaagtgctgttttttggaagcgataaactttaaatatacttattaaaatgaaattctattaaaaaaaaaa

SEQ ID NO: 414431 - DNA, 2503 bp, Homo sapiens
  misc_feature (6)..(6): n is a, c, g, or t
  misc_feature (23)..(26): n is a, c, g, or t
  misc_feature (38)..(38): n is a, c, g, or t
ccctangcggactgactctcttnnnnaccaccgctacngagtactgatgaaatctccatctccagcattacacccacctcagaagtacaaagatagaggaattttacatcctaaacgaggtactgaggaccgatcagatcagtcttctctgaaatctacagacagcagtagttacccaagtccttgtgctagtccttctcctccatcctcaggaaagggctcaaaatctccttcgccaagaccaaacatgcctgttcgatacttcataatgaagagtagcaatttgagaaaccttgaaatttctcaacagaagggtatctggtctacaactcctagtaatgaacggaagctaaatcgagccttttgggaaagcagcatagtttacttggtattttctgttcaaggatctggacatttccagggattttctaggatgtcttctgagattggaagggaaaagagtcaggactggggctctgctggactaggaggagtatttaaggtggagtggatacgaaaagaaagccttccctttcaatttgcacaccatttactcaatccatggaatgacaacaagaaagtgcagataagcagggatgggcaggaactagaacctcaggttggtgaacagttgctccagttatgggaacgtcttcccttgggagaaaaaaacacaactgattgacactcagaactcttagctgtggaagaacatcatgcctatttataaccactgaatgcactgactttcaaaaactgaggtggggtgtgtgttacgaatgggctttttaacacttttagagtgttgctttagaactaccatcttcatatacaggagaaaggaagcatttaaatttttatagtgattatagagaatgattatatgatgtttgtaatgaataaaatagtagtttcattatttggcacaatagcagtttattttaaacaaacaatttgaagttaaacatttcatttttaaaaacactgaattacagttcttattgatgactttttaatgcagagtaagttgtttaagaaaggcctgaatatatcagaacatctgagcaccattttagaagagtcaactcttaagattatcattagaaaacaaatacgtcaacacctatgaaaagaagcggggaaaacaacaacaaggacaacaacaaaaaaccagtgaaattctacaagtgtcccttttaaaaatagtatgtgctaactaagggctattcattctgccatttttaacttgagacacatttaagaataaagttggatgttctttttctgtgattatgaaatgcaataaaatctgaataaagggcaaagtttcttcctgatcagattagattaagtgcttagttttattcctaattctgccccttttaacctgatgtgtaccttactctttcctccctctcttcctcccttcctcctctccccactcctttcctgcatttctccctccctccttccctcgtcacatctcttatatgagcacagtaattatgacctttttgttttggctacaacttgattgaaacaagttcaaaatttaaacaagttcatacaagtttttaaaaattctcaactggtagcttgcttgctgtgcgtcttccaaactaaagcctgcaagcgccacaattctaagtgccgccttccattttttttcagtatgttttcactggcttatgttttcagatatgattttcctttttcgcatatatggtttaataaatgggggataattttttttttgtaaatccgtgcttgtgccaagtctcatatttctttgccatctcagaattatctttttaccaccactgtttataaaatttccttagagactttttgaagggaaaatagagcaacagggaaaaatgaaagaaatgtcttggttactgagctctaaatagacaggtttgatggcacttctcatgatacattttagttattcttataaaagcaaacaggcaaacatgagtgtaaattaaagacaaaaagaaaactctggttttatatttgagaacacgtgaaaaatcatgggtcaacataaaatcttgagaaccttctactttctctgggaaagcattatatagtggtgcattagtttagaaagtcagctatgattttgcctatagttctagttattagctttggggttttcttgtactttaagacatacctgtaaattgaacctatttgaattatattccactgtatgtgtattatggctcttttcctattagagcaacttgtgtttccctgataatgtgtacattttttaggcatgtacttaatagttcacaatgttctaaatttggaaggacttaaaaaaaaaacttgtttaaatttccatctgttttgtaatatctagctctatatgtaaatgatgggtttgttggtatttaaaatgaatacaacttgaatgtaattaaagtgctgttttttggaagcgataaactttaaatatacttattaaaatgaaattctattaaaaaaaaaa

SEQ ID NO: 414432 - DNA, 3854 bp, Homo sapiens
aattattgcttcagtcttttagttatatatataccaaagcaagagaacctattcacagaggagagctttttatactgcatatagatgatttatagaaatcctactttccattcttaggtagagtccagggttgacatagagattattttttggaggacaagagtggcacgattcttagatataagtgttaagaagtcttagttgaaaacctatacttttgtagagagtaaaattagcagatgcatctgagaaggcaaatatttttacattgttagtcatttaggctacttgacacttagttctctttgcgattttataaactcaatggcttttttagcatttgagtataaattaatgataaatattatttgatcataaagtcttagattttatagaaaattagaataaggcaaattcacctcgaggaattcgtgtagtgatttgtagttacttgttgcctcactaagaagcgattagtaaatgtgtcttgttatgcaattattctctttttataggcctggcaaaaagcacgaagtgatgggtgggagcgagccttttgtgaaaagaattttctttcacaggctactatggaaataatcataggcatgagaacacagttgcttggtcaacttagagcatcaggttttgttagagcacgaggtggtggtgacattcgggacgttaacacaaactctgagaattgggctgtcgttaaagctgcattggtggcaggcatgtatcctaatttagtccacgtggacagagagaatctagtgttgacagggccaaaggagaaaaaagtacgatttcatcctgcttcagttctcagtcagcctcaatataaaaagattcctccagccaatggtcaagctgcagcaattaaggcactgcccacagattggcttatttatgatgaaatgaccagagcccatagaatagctaatattagatgttgttcagcagtgacgcctgtcactatattggtattctgtggaccagctagattggcaagtaatgctcttcaggaaccttcatcctttagagtggatggcattcccaatgacagtagtgatagtgaaatggaggacaaaactacagctaatttggcagccttgaaacttgatgagtggctccatttcacactggagccagaggcagctagtttattgctgcagctcagacagaagtggcatagcttatttttacgccgaatgagagctccatctaaaccttggtctcaagttgatgaagctaccataagagcaattatagctgttttaagcactgaagaacagtctgcaggtttacaacaaccatcggggattggccaaaggccaaggcctatgtcttcagaagagcttcctttggcctcatcttggaggtcaaataatagtaggaaaagttcagcagatactgaattttctgatgagtgtactactgcagaaagagtactgatgaaatctccatctccagcattacacccacctcagaagtacaaagatagaggaattttacatcctaaacgaggtactgaggacctctgaaatctacagacagcagtagttacccaagtccttgtgctagtccttctcctccatcctcaggaaagaccaaacatgcctgttcgatacttcataatgaagagtagcaatttgagaaaccttgaaatttctcaacagaagggtatctggtctacaactctaaatcgagccttttgggaaagcagcatagtttacttggtattttctgttcaaggatctggacatttccagggattttctaggatgtcttctgagattggaagggaaaagagtcaggactggggctctgctggactaggaggagtatttaaggtggagtggatacgaaaagaaagccttccctttcaatttgcacaccatttactcaatccatggaatgacaacaagaaagtgcagataagcagggatgggcaggaactagaacctcaggttggtgaacagttgctccagttatgggaacgtcttcccttgggagaaaaaaacacaactgattgacactcagaactcttagctgtggaagaacatcatgcctatttataaccactgaatgcactgactttcaaaaactgaggtggggtgtgtgttacgaatgggctttttaacacttttagagtgttgctttagaactaccatcttcatatacaggagaaaggaagcatttaaatttttatagtgattatagagaatgattatatgatgtttgtaatgaataaaatagtagtttcattatttggcacaatagcagtttattttaaacaaacaatttgaagttaaacatttcatttttaaaaacactgaattacagttcttattgatgactttttaatgcagagtaagttgtttaagaaaggcctgaatatatcagaacatctgagcaccattttagaagagtcaactcttaagattatcattagaaaacaaatacgtcaacacctatgaaaagaagcggggaaaacaacaacaaggacaacaacaaaaaaccagtgaaattctacaagtgtcccttttaaaaatagtatgtgctaactaagggctattcattctgccatttttaacttgagacacatttaagaataaagttggatgttctttttctgtgattatgaaatgcaataaaatctgaataaagggcaaagtttcttcctgatcagattagattaagtgcttagttttattcctaattctgccccttttaacctgatgtgtaccttactctttcctccctctcttcctcccttcctcctctccccactcctttcctgcatttctccctccctccttccctcgtcacatctcttatatgagcacagtaattatgacctttttgttttggctacaacttgattgaaacaagttcaaaatttaaacaagttcatacaagtttttaaaaattctcaactggtagcttgcttgctgtgcgtcttccaaactaaagcctgcaagcgccacaattctaagtgccgccttccattttttttcagtatgttttcactggcttatgttttcagatatgattttcctttttcgcatatatggtttaataaatgggggataattttttttttgtaaatccgtgcttgtgccaagtctcatatttctttgccatctcagaattatctttttaccaccactgtttataaaatttccttagagactttttgaagggaaaatagagcaacagggaaaaatgaaagaaatgtcttggttactgagctctaaatagacaggtttgatggcacttctcatgatacattttagttattcttataaaagcaaacaggcaaacatgagtgtaaattaaagacaaaaagaaaactctggttttatatttgagaacacgtgaaaaatcatgggtcaacataaaatcttgagaaccttctactttctctgggaaagcattatatagtggtgcattagtttagaaagtcagctatgattttgcctatagttctagttattagctttggggttttcttgtactttaagacatacctgtaaattgaacctatttgaattatattccactgtatgtgtattatggctcttttcctattagagcaacttgtgtttccctgataatgtgtacattttttaggcatgtacttaatagttcacaatgttctaaatttggaaggacttaaaaaaaaaacttgtttaaatttccatctgttttgtaatatctagctctatatgtaaatgatgggtttgttggtatttaaaatgaatacaacttgaatgtaattaaagtgctgttttttggaagcgataaactttaaatatacttattaaaatgaaattctattaaaaaaaaaa

SEQ ID NO: 414433 - DNA, 3849 bp, Homo sapiens
aattattgcttcagtcttttagttatatatataccaaagcaagagaacctattcacagaggagagctttttatactgcatatagatgatttatagaaatcctactttccattcttaggtagagtccagggttgacatagagattattttttggaggacaagagtggcacgattcttagatataagtgttaagaagtcttagttgaaaacctatacttttgtagagagtaaaattagcagatgcatctgagaaggcaaatatttttacattgttagtcatttaggctacttgacacttagttctctttgcgattttataaactcaatggcttttttagcatttgagtataaattaatgataaatattatttgatcataaagtcttagattttatagaaaattagaataaggcaaattcacctcgaggaattcgtgtagtgatttgtagttacttgttgcctcactaagaagcgattagtaaatgtgtcttgttatgcaattattctctttttataggcctggcaaaaagcacgaagtgatgggtgggagcgagccttttgtgaaaagaattttctttcacaggctactatggaaataatcataggcatgagaacacagttgcttggtcaacttagagcatcaggttttgttagagcacgaggtggtggtgacattcgggacgttaacacaaactctgagaattgggctgtcgttaaagctgcattggtggcaggcatgtatcctaatttagtccacgtggacagagagaatctagtgttgacagggccaaaggagaaaaaagtacgatttcatcctgcttcagttctcagtcagcctcaatataaaaagattcctccagccaatggtcaagctgcagcaattaaggcactgcccacagattggcttatttatgatgaaatgaccagagcccatagaatagctaatattagatgttgttcagcagtgacgcctgtcactatattggtattctgtggaccagctagattggcaagtaatgctcttcaggaaccttcatcctttagagtggatggcattcccaatgacagtagtgatagtgaaatggaggacaaaactacagctaatttggcagccttgaaacttgatgagtggctccatttcacactggagccagaggcagctagtttattgctgcagctcagacagaagtggcatagcttatttttacgccgaatgagagctccatctaaaccttggtctcaagttgatgaagctaccataagagcaattatagctgttttaagcactgaagaacagtctgcaggtttacaacaaccatcggggattggccaaaggccaaggcctatgtcttcagaagagcttcctttggcctcatcttggaggtcaaataatagtaggaaaagttcagcagatactgaattttctgatgagtgtactactgcagaaagagtactgatgaaatctccatctccagcattacacccacctcagaagtacaaagatagaggaattttacatcctaaacgaggtactgaggaccgatcagatcagtcttctctgaaatctacagacagcagtagttacccaagtccttgtgctagtccttctcctccatcctcaggaaagggctcaaaatctccttcgccaagaccaaacatgcctgttcgatacttcataatgaagagtagcaatttgagaaaccttgaaatttctcaacagaagggtatctggtctacaactcctagtaatgaacggaagctaaatcgagccttttgggaaagcagcatagtttacttggtattttctgttcaaggatctggacatttccagggattttctaggatgtcttctgagattggaagggaaaagagtcaggactggggctctgctggactaggaggagtatttaaggtggagtaacaagaaagtgcagataagcagggatgggcaggaactagaacctcaggttggtgaacagttgctccagttatgggaacgtcttcccttgggagaaaaaaacacaactgattgacactcagaactcttagctgtggaagaacatcatgcctatttataaccactgaatgcactgactttcaaaaactgaggtggggtgtgtgttacgaatgggctttttaacacttttagagtgttgctttagaactaccatcttcatatacaggagaaaggaagcatttaaatttttatagtgattatagagaatgattatatgatgtttgtaatgaataaaatagtagtttcattatttggcacaatagcagtttattttaaacaaacaatttgaagttaaacatttcatttttaaaaacactgaattacagttcttattgatgactttttaatgcagagtaagttgtttaagaaaggcctgaatatatcagaacatctgagcaccattttagaagagtcaactcttaagattatcattagaaaacaaatacgtcaacacctatgaaaagaagcggggaaaacaacaacaaggacaacaacaaaaaaccagtgaaattctacaagtgtcccttttaaaaatagtatgtgctaactaagggctattcattctgccatttttaacttgagacacatttaagaataaagttggatgttctttttctgtgattatgaaatgcaataaaatctgaataaagggcaaagtttcttcctgatcagattagattaagtgcttagttttattcctaattctgccccttttaacctgatgtgtaccttactctttcctccctctcttcctcccttcctcctctccccactcctttcctgcatttctccctccctccttccctcgtcacatctcttatatgagcacagtaattatgacctttttgttttggctacaacttgattgaaacaagttcaaaatttaaacaagttcatacaagtttttaaaaattctcaactggtagcttgcttgctgtgcgtcttccaaactaaagcctgcaagcgccacaattctaagtgccgccttccattttttttcagtatgttttcactggcttatgttttcagatatgattttcctttttcgcatatatggtttaataaatgggggataattttttttttgtaaatccgtgcttgtgccaagtctcatatttctttgccatctcagaattatctttttaccaccactgtttataaaatttccttagagactttttgaagggaaaatagagcaacagggaaaaatgaaagaaatgtcttggttactgagctctaaatagacaggtttgatggcacttctcatgatacattttagttattcttataaaagcaaacaggcaaacatgagtgtaaattaaagacaaaaagaaaactctggttttatatttgagaacacgtgaaaaatcatgggtcaacataaaatcttgagaaccttctactttctctgggaaagcattatatagtggtgcattagtttagaaagtcagctatgattttgcctatagttctagttattagctttggggttttcttgtactttaagacatacctgtaaattgaacctatttgaattatattccactgtatgtgtattatggctcttttcctattagagcaacttgtgtttccctgataatgtgtacattttttaggcatgtacttaatagttcacaatgttctaaatttggaaggacttaaaaaaaaaacttgtttaaatttccatctgttttgtaatatctagctctatatgtaaatgatgggtttgttggtatttaaaatgaatacaacttgaatgtaattaaagtgctgttttttggaagcgataaactttaaatatacttattaaaatgaaattctattaaaaaaaaaa

SEQ ID NO: 414434 - DNA, 2368 bp, Homo sapiens
attttaataattttcaagataagaagatatagttgcttaagagagttccttggaaaaaaacccaacatcgaatatgctaggtttcacagtaaacctttggaagttccagctgagtgcttttgctgaatctctatgaaaaacaaaatccattatttttaggtagaaacagttccaggactccatgggaatctgttgccattttgtcacaaaagttgagagattttgcagattaactgtaatcttaaatctggaagtcaactccataaaccttaaagcaaagaattagaacaattcataccagatgattttagcatacgctggtaggaaaatgaaatttaaagtgattttcttacatttttatcagtgtaggttttggtcattaaaaattttcactccagttctttttatgtttattttgacttctgatttatctaggaactagaacctcaggttggtgaacagttgctccagttatgggaacgtcttcccttgggagatatttgtgatcattaggaacctttcagattatttatctttttttttcccctttcttctagaactcttagctgtggaagaacatcatgcctatttataaccactgaatgcactgactttcaaaaactgaggtggggtgtgtgttacgaatgggctttttaacacttttagagtgttgctttagaactaccatcttcatatacaggagaaaggaagcatttaaatttttatagtgattatagagaatgattatatgatgtttgtaatgaataaaatagtagtttcattatttggcacaatagcagtttattttaaacaaacaatttgaagttaaacatttcatttttaaaaacactgaattacagttcttattgatgactttttaatgcagagtaagttgtttaagaaaggcctgaatatatcagaacatctgagcaccattttagaagagtcaactcttaagattatcattagaaaacaaatacgtcaacacctatgaaaagaagcggggaaaacaacaacaaggacaacaacaaaaaaccagtgaaattctacaagtgtcccttttaaaaatagtatgtgctaactaagggctattcattctgccatttttaacttgagacacatttaagaataaagttggatgttctttttctgtgattatgaaatgcaataaaatctgaataaagggcaaagtttcttcctgatcagattagattaagtgcttagttttattcctaattctgccccttttaacctgatgtgtaccttactctttcctccctctcttcctcccttcctcctctccccactcctttcctgcatttctccctccctccttccctcgtcacatctcttatatgagcacagtaattatgacctttttgttttggctacaacttgattgaaacaagttcaaaatttaaacaagttcatacaagtttttaaaaattctcaactggtagcttgcttgctgtgcgtcttccaaactaaagcctgcaagcgccacaattctaagtgccgccttccattttttttcagtatgttttcactggcttatgttttcagatatgattttcctttttcgcatatatggtttaataaatgggggataattttttttttgtaaatccgtgcttgtgccaagtctcatatttctttgccatctcagaattatctttttaccaccactgtttataaaatttccttagagactttttgaagggaaaatagagcaacagggaaaaatgaaagaaatgtcttggttactgagctctaaatagacaggtttgatggcacttctcatgatacattttagttattcttataaaagcaaacaggcaaacatgagtgtaaattaaagacaaaaagaaaactctggttttatatttgagaacacgtgaaaaatcatgggtcaacataaaatcttgagaaccttctactttctctgggaaagcattatatagtggtgcattagtttagaaagtcagctatgattttgcctatagttctagttattagctttggggttttcttgtactttaagacatacctgtaaattgaacctatttgaattatattccactgtatgtgtattatggctcttttcctattagagcaacttgtgtttccctgataatgtgtacattttttaggcatgtacttaatagttcacaatgttctaaatttggaaggacttaaaaaaaaaacttgtttaaatttccatctgttttgtaatatctagctctatatgtaaatgatgggtttgttggtatttaaaatgaatacaacttgaatgtaattaaagtgctgttttttggaagcgataaactttaaatatacttattaaaatgaaattctattaaaaaaaaaa

SEQ ID NO: 414435 - DNA, 3867 bp, Homo sapiens
aattattgcttcagtcttttagttatatatataccaaagcaagagaacctattcacagaggagagctttttatactgcatatagatgatttatagaaatcctactttccattcttaggtagagtccagggttgacatagagattattttttggaggacaagagtggcacgattcttagatataagtgttaagaagtcttagttgaaaacctatacttttgtagagagtaaaattagcagatgcatctgagaaggcaaatatttttacattgttagtcatttaggctacttgacacttagttctctttgcgattttataaactcaatggcttttttagcatttgagtataaattaatgataaatattatttgatcataaagtcttagattttatagaaaattagaataaggcaaattcacctcgaggaattcgtgtagtgatttgtagttacttgttgcctcactaagaagcgattagtaaatgtgtcttgttatgcaattattctctttttataggcctggcaaaaagcacgaagtgatgggtgggagcgagccttttgtgaaaagaattttctttcacaggctactatggaaataatcataggcatgagaacacagttgcttggtcaacttagagcatcaggttttgttagagcacgaggtggtggtgacattcgggacgttaacacaaactctgagaattgggctgtcgttaaagctgcattggtggcaggcatgtatcctaatttagtccacgtggacagagagaatctagtgttgacagggccaaaggagaaaaaagtacgatttcatcctgcttcagttctcagtcagcctcaatataaaaagattcctccagccaatggtcaagctgcagcaattaaggcactgcccacagattggcttatttatgatgaaatgaccagagcccatagaatagctaatattagatgttgttcagcagtgacgcctgtcactatattggtattctgtggaccagctagattggcaagtaatgctcttcaggaaccttcatcctttagagtggatggcattcccaatgacagtagtgatagtgaaatggaggacaaaactacagctaatttggcagccttgaaacttgatgagtggctccatttcacactggagccagaggcagctagtttattgctgcagctcagacagaagtggcatagcttatttttacgccgaatgagagctccatctaaaccttggtctcaagttgatgaagctaccataagagcaattatagctgttttaagcactgaagaacagtctgcaggtttacaacaaccatcggggattggccaaaggccaaggcctatgtcttcagaagagcttcctttggcctcatcttggaggtcaaataatagtaggaaaagttcagcagatactgaattttctgatgagtgtactactgcagaaagagtactgatgaaatctccatctccagcattacacccacctcagaagtacaaagatagaggaattttacatcctaaacgaggtactgaggaccgatcagatcagtcttctctgaaatctacagacagcagtagttacccaagtccttgtgctagtccttctcctccatcctcaggaaagggctcaaaatctccttcgccaagaccaaacatgcctgttcgatacttcataatgaagagtagcaatttgagaaaccttgaaatttctcaacagaagggtatctggtctacaactcctagtaatgaacggaagctaaatcgagccttttgggaaagcagcatagtttacttggtattttctgttcaaggatctggacatttccagggattttctaggatgtcttctgagattggaagggaaaagagtcaggactggggctctgctggactaggaggagtatttaaggtggagtggatacgaaaagaaagccttccctttcaatttgcacaccatttactcaatccatggaatgacaacaagaaagtgcagataagcagggatgggcaggaactagaacctcaggttggtgaacagttgctccagttatgggaacgtcttcccttgggagaaaaaaacacaactgattgacactcagaactcttagctgtggaagaacatcatgcctatttataaccactgaatgcactgactttcaaaaactgaggtggggtgtgtgttacgaatgggctttttaacacttttagagtgttgctttagaactaccatcttcatatacaggagaaaggaagcatttaaatttttatagtgattatagagaatgattatatgatgtttgtaatgaataaaatagtagtttcattatttggcacaatagcagtttattttaaacaaacaatttgaagttaaacatttcatttttaaaaacactgaattacagttcttattgatgactttttaatgcagagtaagttgtttaagaaaggcctgaatatatcagaacatctgagcaccattttagaagagtcaactcttaagattatcattagaaaacaaatacgtcaacacctatgaaaagaagcggggaaaacaacaacaaggacaacaacaaaaaaccagtgaaattctacaagtgtcccttttaaaaatagtatgtgctaactaagggctattcattctgccatttttaacttgagacacatttaagaataaagttggatgttctttttctgtgattatgaaatgcaataaaatctgaatttttattcctaattctgccccttttaacctgatgtgtaccttactctttcctccctctcttcctcccttcctcctctccccactcctttcctgcatttctccctccctccttccctcgtcacatctcttatatgagcacagtaattatgacctttttgttttggctacaacttgattgaaacaagttcaaaatttaaacaagttcatacaagtttttaaaaattctcaactggtagcttgcttgctgtgcgtcttccaaactaaagcctgcaagcgccacaattctaagtgccgccttccattttttttcagtatgttttcactggcttatgttttcagatatgattttcctttttcgcatatatggtttaataaatgggggataattttttttttgtaaatccgtgcttgtgccaagtctcatatttctttgccatctcagaattatctttttaccaccactgtttataaaatttccttagagactttttgaagggaaaatagagcaacagggaaaaatgaaagaaatgtcttggttactgagctctaaatagacaggtttgatggcacttctcatgatacattttagttattcttataaaagcaaacaggcaaacatgagtgtaaattaaagacaaaaagaaaactctggttttatatttgagaacacgtgaaaaatcatgggtcaacataaaatcttgagaaccttctactttctctgggaaagcattatatagtggtgcattagtttagaaagtcagctatgattttgcctatagttctagttattagctttggggttttcttgtactttaagacatacctgtaaattgaacctatttgaattatattccactgtatgtgtattatggctcttttcctattagagcaacttgtgtttccctgataatgtgtacattttttaggcatgtacttaatagttcacaatgttctaaatttggaaggacttaaaaaaaaaacttgtttaaatttccatctgttttgtaatatctagctctatatgtaaatgatgggtttgttggtatttaaaatgaatacaacttgaatgtaattaaagtgctgttttttggaagcgataaactttaaatatacttattaaaatgaaattctattaaaaaaaaaa

SEQ ID NO: 414436 - DNA, 3651 bp, Homo sapiens
aattattgcttcagtcttttagttatatatataccaaagcaagagaacctattcacagaggagagctttttatactgcatatagatgatttatagaaatcctactttccattcttaggtagagtccagggttgacatagagattattttttggaggacaagagtggcacgattcttagatataagtgttaagaagtcttagttgaaaacctatacttttgtagagagtaaaattagcagatgcatctgagaaggcaaatatttttacattgttagtcatttaggctacttgacacttagttctctttgcgattttataaactcaatggcttttttagcatttgagtataaattaatgataaatattatttgatcataaagtcttagattttatagaaaattagaataaggcaaattcacctcgaggaattcgtgtagtgatttgtagttacttgttgcctcactaagaagcgattagtaaatgtgtcttgttatgcaattattctctttttataggcctggcaaaaagcacgaagtgatgggtgggagcgagccttttgtgaaaagaattttctttcacaggctactatggaaataatcataggcatgagaacacagttgcttggtcaacttagagcatcaggttttgttagagcacgaggtggtggtgacattcgggacgttaacacaaactctgagaattgggctgtcgttaaagctgcattggtggcaggcatgtatcctaatttagtccacgtggacagagagaatctagtgttgacagggccaaaggagaaaaaagtacgatttcatcctgcttcagttctcagtcagcctcaatataaaaagattcctccagccaatggtcaagctgcagcaattaaggcactgcccacagattggcttatttatgatgaaatgaccagagcccatagaatagctaatattagatgttgttcagcagtgacgcctgtcactatattggtattctgtggaccagctagattggcaagtaatgctcttcaggaaccttcatcctttagagtggatggcattcccaatgacagtagtgatagtgaaatggaggacaaaactacagctaatttggcagccttgaaacttgatgagtggctccatttcacactggagccagaggcagctagtttattgctgcagctcagacagaagtggcatagcttatttttacgccgaatgagagctccatctaaaccttggtctcaagttgatgaagctaccataagagcaattatagctgttttaagcactgaagaacagtctgcaggtttacaacaaccatcggggattggccaaaggccaaggcctatgtcttcagaagagcttcctttggcctcatcttggaggtcaaataatagtaggaaaagttcagcagatactgaattttctgatgagtgtactactgcagaaagagtactgatgaaatctccatctccagcattacacccacctcagaagtacaaagatagaggaattttacatcctaaacgaggtactgaggaccgatcagatcagtcttctctgaaatctacagacagcagtagttacccaagtccttgtgctagtccttctcctccatcctcaggaaagggctcaaaatctccttcgccaagaccaaacatgcctgttcgatacttcataatgaagagtagcaatttgagaaaccttgaaatttctcaacagaagggtatctggtctacaactcctagtaatgaacggaagctaaatcgagccttttgggaaagcagcatagtttacttggtattttctgttcaaggatctggacatttccagggattttctaggatgtcttctgagattggaagggaaaagagtcaggactggggctctgctggactaggaggagtatttaaggtggagtggatacgaaaagaaagccttccctttcaatttgcacaccatttactcaatccatggaatgacaacaagaaagtgcagataagcagggatgggcaggaactagaacctcaggttggtgaacagttgctccagttatgggaacgtcttcccttgggagaaaaaaacacaactgattgacactcagaactcttagctgtggaagaacatcatgcctatttataaccactgaatgcactgactttcaaaaactgagagtaagttgtttaagaaaggcctgaatatatcagaacatctgagcaccattttagaagagtcaactcttaagattatcattagaaaacaaatacgtcaacacctatgaaaagaagcggggaaaacaacaacaaggacaacaacaaaaaaccagtgaaattctacaagtgtcccttttaaaaatagtatgtgctaactaagggctattcattctgccatttttaacttgagacacatttaagaataaagttggatgttctttttctgtgattatgaaatgcaataaaatctgaataaagggcaaagtttcttcctgatcagattagattaagtgcttagttttattcctaattctgccccttttaacctgatgtgtaccttactctttcctccctctcttcctcccttcctcctctccccactcctttcctgcatttctccctccctccttccctcgtcacatctcttatatgagcacagtaattatgacctttttgttttggctacaacttgattgaaacaagttcaaaatttaaacaagttcatacaagtttttaaaaattctcaactggtagcttgcttgctgtgcgtcttccaaactaaagcctgcaagcgccacaattctaagtgccgccttccattttttttcagtatgttttcactggcttatgttttcagatatgattttcctttttcgcatatatggtttaataaatgggggataattttttttttgtaaatccgtgcttgtgccaagtctcatatttctttgccatctcagaattatctttttaccaccactgtttataaaatttccttagagactttttgaagggaaaatagagcaacagggaaaaatgaaagaaatgtcttggttactgagctctaaatagacaggtttgatggcacttctcatgatacattttagttattcttataaaagcaaacaggcaaacatgagtgtaaattaaagacaaaaagaaaactctggttttatatttgagaacacgtgaaaaatcatgggtcaacataaaatcttgagaaccttctactttctctgggaaagcattatatagtggtgcattagtttagaaagtcagctatgattttgcctatagttctagttattagctttggggttttcttgtactttaagacatacctgtaaattgaacctatttgaattatattccactgtatgtgtattatggctcttttcctattagagcaacttgtgtttccctgataatgtgtacattttttaggcatgtacttaatagttcacaatgttctaaatttggaaggacttaaaaaaaaaacttgtttaaatttccatctgttttgtaatatctagctctatatgtaaatgatgggtttgttggtatttaaaatgaatacaacttgaatgtaattaaagtgctgttttttggaagcgataaactttaaatatacttattaaaatgaaattctattaaaaaaaaaa

SEQ ID NO: 414437 - DNA, 2777 bp, Homo sapiens
aattattgcttcagtcttttagttatatatataccaaagcaagagaacctattcacagaggagagctttttatactgcatatagatgatttatagaaatcctactttccattcttaggtagagtccagggttgacatagagattattttttggaggacaagagtggcacgattcttagatataagtgttaagaagtcttagttgaaaacctatacttttgtagagagtaaaattagcagatgcatctgagaaggcaaatatttttacattgttagtcatttaggctacttgacacttagttctctttgcgattttataaactcaatggcttttttagcatttgagtataaattaatgataaatattatttgatcataaagtcttagattttatagaaaattagaataaggcaaattcacctcgaggaattcgtgtagtgatttgtagttacttgttgcctcactaagaagcgattagtaaatgtgtcttgttatgcaattattctctttttataggcctggcaaaaagcacgaagtgatgggtgggagcgagccttttgtgaaaagaattttctttcacaggctactatggaaataatcataggcatgagaacacagttgcttggtcaacttagagcatcaggttttgttagagcacgaggtggtggtgacattcgggacgttaacacaaactctgagaattgggctgtcgttaaagctgcattggtggcaggcatgtatcctaatttagtccacgtggacagagagaatctagtgttgacagggccaaaggagaaaaaagtacgatttcatcctgcttcagttctcagtcagcctcaatataaaaagattcctccagccaatggtcaagctgcagcaattaaggcactgcccacagattggcttatttatgatgaaatgaccagagcccatagaatagctaatattagatgttgttcagcagtgacgcctgtcactatattggtattctgtggaccagctagattggcaagtaatgctcttcaggaaccttcatcctttagagtggatggcattcccaatgacagtagtgatagtgaaatggaggacaaaactacagctaatttggcagccttgaaacttgatgagtggctccatttcacactggagccagaggcagctagtttattgctgcagctcagacagaagtggcatagcttatttttacgccgaatgagagctccatctaaaccttggtctcaagttgatgaagctaccataagagcaattatagctgttttaagcactgaagaacagtctgcaggtttacaacaaccatcggggattggccaaaggccaaggcctatgtcttcagaagagcttcctttggcctcatcttggaggtcaaataatagtaggaaaagttcagcagatactgaattttctgatgagtgtactactgcagaaagagtactgatgaaatctccatctccagcattacacccacctcagaagtacaaagatagaggaattttacatcctaaacgaggtactgaggaccgatcagatcagtcttctctgaaatctacagacagcagtagttacccaagtccttgtgctagtccttctcctccatcctcaggaaagggctcaaaatctccttcgccaagaccaaacatgcctgttcgatacttcataatgaagagtagcaatttgagaaaccttgaaatttctcaacagaagggtatctggtctacaactcctagtaatgaacggaagctaaatcgagccttttgggaaagcagcatagtttacttggtattttctgttcaaggatctggacatttccagggattttctaggatgtcttctgagattggaagggaaaagagtcaggactggggctctgctggactaggaggagtatttaaggtggagtggatacgaaaagaaagccttccctttcaatttgcacaccatttactcaatccatggaatgacaacaagaaagtgcagataagcagggatgggcaggaactagaacctcaggttggtgaacagttgctccagttatgggaacgtcttcccttgggagaaaaaaacacaactgattgacactcagaactcttagctgtggaagaacatcatgcctatttataaccactgaatgcactgactttcaaaaactgaggtggggtgtgtgttacgaatgggctttttaacacttttagagtgttgctttagaactaccatcttcatatacaggagaaaggaagcatttaaatttttatagtgattatagagaatgattatatgatgtttgtaatgaataaaatagtagtttcattatttggcacaatagcagtttattttaaacaaacaatttgaagttaaacatttcatttttaaaaacactgaattacagttcttattgatgactttttaatgcagagtaagttgtttaagaaaggcctgaatatatcagaacatctgagcaccattttagaagagtcaactcttaagattatcattagaaaacaaatacgtcaacacctatgaaaagaagcggggaaaacaacaacaaggacaacaacaaaaaaccagtgaaattctacaagtgtcccttttaaaaatagtatgtgctaactaagggctattcattctgccatttttaacttgagacacatttaagaataaagttggatgttctttttctgtgattatgaaatgcaataaaatctgaatcgatgcgacaagcaagcgcttccactacgcagcccactcacccaccaccccaaa

SEQ ID NO: 414438 - DNA, 2774 bp, Homo sapiens
aattattgcttcagtcttttagttatatatataccaaagcaagagaacctattcacagaggagagctttttatactgcatatagatgatttatagaaatcctactttccattcttaggtagagtccagggttgacatagagattattttttggaggacaagagtggcacgattcttagatataagtgttaagaagtcttagttgaaaacctatacttttgtagagagtaaaattagcagatgcatctgagaaggcaaatatttttacattgttagtcatttaggctacttgacacttagttctctttgcgattttataaactcaatggcttttttagcatttgagtataaattaatgataaatattatttgatcataaagtcttagattttatagaaaattagaataaggcaaattcacctcgaggaattcgtgtagtgatttgtagttacttgttgcctcactaagaagcgattagtaaatgtgtcttgttatgcaattattctctttttataggcctggcaaaaagcacgaagtgatgggtgggagcgagccttttgtgaaaagaattttctttcacaggctactatggaaataatcataggcatgagaacacagttgcttggtcaacttagagcatcaggttttgttagagcacgaggtggtggtgacattcgggacgttaacacaaactctgagaattgggctgtcgttaaagctgcattggtggcaggcatgtatcctaatttagtccacgtggacagagagaatctagtgttgacagggccaaaggagaaaaaagtacgatttcatcctgcttcagttctcagtcagcctcaatataaaaagattcctccagccaatggtcaagctgcagcaattaaggcactgcccacagattggcttatttatgatgaaatgaccagagcccatagaatagctaatattagatgttgttcagcagtgacgcctgtcactatattggtattctgtggaccagctagattggcaagtaatgctcttcaggaaccttcatcctttagagtggatggcattcccaatgacagtagtgatagtgaaatggaggacaaaactacagctaatttggcagccttgaaacttgatgagtggctccatttcacactggagccagaggcagctagtttattgctgcagctcagacagaagtggcatagcttatttttacgccgaatgagagctccatctaaaccttggtctcaagttgatgaagctaccataagagcaattatagctgttttaagcactgaagaacagtctgcaggtttacaacaaccatcggggattggccaaaggccaaggcctatgtcttcagaagagcttcctttggcctcatcttggaggtcaaataatagtaggaaaagttcagcagatactgaattttctgatgagtgtactactgcagaaagagtactgatgaaatctccatctccagcattacacccacctcagaagtacaaagatagaggaattttacatcctaaacgaggtactgaggaccgatcagatcagtcttctctgaaatctacagacagcagtagttacccaagtccttgtgctagtccttctcctccatcctcaggaaagggctcaaaatctccttcgccaagaccaaacatgcctgttcgatacttcataatgaagagtagcaatttgagaaaccttgaaatttctcaacagaagggtatctggtctacaactcctagtaatgaacggaagctaaatcgagccttttgggaaagcagcatagtttacttggtattttctgttcaaggatctggacatttccagggattttctaggatgtcttctgagattggaagggaaaagagtcaggactggggctctgctggactaggaggagtatttaaggtggagtggatacgaaaagaaagccttccctttcaatttgcacaccatttactcaatccatggaatgacaacaagaaagtgcagataagcagggatgggcaggaactagaacctcaggttggtgaacagttgctccagttatgggaacgtcttcccttgggagaaaaaaacacaactgattgacactcagaactcttagctgtggaagaacatcatgcctatttataaccactgaatgcactgactttcaaaaactgaggtggggtgtgtgttacgaatgggctttttaacacttttagagtgttgctttagaactaccatcttcatatacaggagaaaggaagcatttaaatttttatagtgattatagagaatgattatatgatgtttgtaatgaataaaatagtagtttcattatttggcacaatagcagtttattttaaacaaacaatttgaagttaaacatttcatttttaaaaacactgaattacagttcttattgatgactttttaatgcagagtaagttgtttaagaaaggcctgaatatatcagaacatctgagcaccattttagaagagtcaactcttaagattatcattagaaaacaaatacgtcaacacctatgaaaagaagcggggaaaacaacaacaaggacaacaacaaaaaaccagtgaaattctacaagtgtcccttttaaaaatagtatgtgctaactaagggctattcattctgccatttttaacttgagacacatttaagaataaagttggatgttctttttctgtgattatgaaatgcaataaaatctgaatcagatgtcgcccgaaactttttgtttgttttgtaatttataatataagata

SEQ ID NO: 414439 - DNA, 2043 bp, Homo sapiens
  misc_feature (469)..(471): n is a, c, g, or t
  misc_feature (473)..(473): n is a, c, g, or t
  misc_feature (752)..(752): n is a, c, g, or t
  misc_feature (754)..(755): n is a, c, g, or t
tattccttcctcccattttacctacagggattttctaggatgtcttctgagattggaagggaaaagagtcaggactggggctctgctggactaggaggagtatttaaggtggagtgaactagaacctcaggttggtgaacagttgctccagttatgggaacgtcttcccttgggagaaaaaaacacaactgattgacactcagaactcttagctgtggaagaacatcatgcctatttataaccactgaatgcactgactttcaaaaactgaggtggggtgtgtgttacgaatgggctttttaacacttttagagtgttgctttagaactaccatcttcatatacaggagaaaggaagcatttaaatttttatagtgattatagagaatgattatatgatgtttgtaatgaataaaatagtagtttcattatttggcacaatagcagtttattttaaacaagcgttaaannncnaaaaaaaaccccccaacccccccttttttataagactctttttaaaaacaaaagttttttttaaaaagggcccttatattttaaatttttgcccctccttttaaaagggtccctttttaaagtttttctcttaaaaaaaacaatttccctccccctctttttaaaaaaaaaagggggggttgaatccccccccaaggggggcccctccaaaaaaccccccgggggtttttcccccaaaggggcccccctttttataaaaaaaataaagtattggtgctnanntaagggggctattcattctgccatttttaacttgagacacatttaagaataaagttggatgttctttttctgtgattatgaaatgcaataaaatctgaataaagggcaaagtttcttcctgatcagattagattaagtgcttagttttattcctaattctgccccttttaacctgatgtgtaccttactctttcctccctctcttcctcccttcctcctctccccactcctttcctgcatttctccctccctccttccctcgtcacatctcttatatgagcacagtaattatgacctttttgttttggctacaacttgattgaaacaagttcaaaatttaaacaagttcatacaagtttttaaaaattctcaactggtagcttgcttgctgtgcgtcttccaaactaaagcctgcaagcgccacaattctaagtgccgccttccattttttttcagtatgttttcactggcttatgttttcagatatgattttcctttttcgcatatatggtttaataaatgggggataattttttttttgtaaatccgtgcttgtgccaagtctcatatttctttgccatctcagaattatctttttaccaccactgtttataaaatttccttagagactttttgaagggaaaatagagcaacagggaaaaatgaaagaaatgtcttggttactgagctctaaatagacaggtttgatggcacttctcatgatacattttagttattcttataaaagcaaacaggcaaacatgagtgtaaattaaagacaaaaagaaaactctggttttatatttgagaacacgtgaaaaatcatgggtcaacataaaatcttgagaaccttctactttctctgggaaagcattatatagtggtgcattagtttagaaagtcagctatgattttgcctatagttctagttattagctttggggttttcttgtactttaagacatacctgtaaattgaacctatttgaattatattccactgtatgtgtattatggctcttttcctattagagcaacttgtgtttccctgataatgtgtacattttttaggcatgtacttaatagttcacaatgttctaaatttggaaggacttaaaaaaaaaacttgtttaaatttccatctgttttgtaatatctagctctatatgtaaatgatgggtttgttggtatttaaaatgaatacaacttgaatgtaattaaagtgctgttttttggaagcgataaactttaaatatacttattaaaatgaaattctattaaaaaaaaaa

SEQ ID NO: 414440 - DNA, 3911 bp, Homo sapiens
aattattgcttcagtcttttagttatatatataccaaagcaagagaacctattcacagaggagagctttttatactgcatatagatgatttatagaaatcctactttccattcttaggtagagtccagggttgacatagagattattttttggaggacaagagtggcacgattcttagatataagtgttaagaagtcttagttgaaaacctatacttttgtagagagtaaaattagcagatgcatctgagaaggcaaatatttttacattgttagtcatttaggctacttgacacttagttctctttgcgattttataaactcaatggcttttttagcatttgagtataaattaatgataaatattatttgatcataaagtcttagattttatagaaaattagaataaggcaaattcacctcgaggaattcgtgtagtgatttgtagttacttgttgcctcactaagaagcgattagtaaatgtgtcttgttatgcaattattctctttttataggcctggcaaaaagcacgaagtgatgggtgggagcgagccttttgtgaaaagaattttctttcacaggctactatggaaataatcataggcatgagaacacagttgcttggtcaacttagagcatcaggttttgttagagcacgaggtggtggtgacattcgggacgttaacacaaactctgagaattgggctgtcgttaaagctgcattggtggcaggcatgtatcctaatttagtccacgtggacagagagaatctagtgttgacagggccaaaggagaaaaaagtacgatttcatcctgcttcagttctcagtcagcctcaatataaaaagattcctccagccaatggtcaagctgcagcaattaaggcactgcccacagattggcttatttatgatgaaatgaccagagcccatagaatagctaatattagatgttgttcagcagtgacgcctgtcactatattggtattctgtggaccagctagattggcaagtaatgctcttcaggaaccttcatcctttagagtggatggcattcccaatgacagtagtgatagtgaaatggaggacaaaactacagctaatttggcagccttgaaacttgatgagtggctccatttcacactggagccagaggcagctagtttattgctgcagctcagacagaagtggcatagcttatttttacgccgaatgagagctccatctaaaccttggtctcaagttgatgaagctaccataagagcaattatagctgttttaagcactgaagaacagtctgcaggtttacaacaaccatcggggattggccaaaggccaaggcctatgtcttcagaagagcttcctttggcctcatcttggaggtcaaataatagtaggaaaagttcagcagatactgaattttctgatgagtgtactactgcagaaagagtactgatgaaatctccatctccagcattacacccacctcagaagtacaaagatagaggaattttacatcctaaacgaggtactgaggaccgatcagatcagtcttctctgaaatctacagacagcagtagttacccaagtccttgtgctagtccttctcctccatcctcaggaaagggctcaaaatctccttcgccaagaccaaacatgcctgttcgatacttcataatgaagagtagcaatttgagaaaccttgaaatttctcaacagaagggtatctggtctacaactcctagtaatgaacggaagctaaatcgagccttttgggaaagcagcatagtttacttggtattttctgttcaaggatctggacatttccagggattttctaggatgtcttctgagattggaagggaaaagagtcaggactggggctctgctggactaggaggagtatttaaggtggagtggatacgaaaagaaagccttccctttcaatttgcacaccatttactcaatccatggaatgacaacaagaaagtgcagataagcagggatgggcaggaactagaacctcaggttggtgaacagttgctccagttatgggaacgtcttcccttgggagaaaaaaacacaactgattgacactcagaactcttagctgtggaagaacatcatgcctatttataaccactgaatgcactgactttcaaaaactgaggtggggtgtgtgttacgaatgggctttttaacacttttagagtgttgctttagaactaccatcttcatatacaggagaaaggaagcatttaaatttttatagtgattatagagaatgattatatgatgtttgtaatgaataaaatagtagtttcattatttggcacaatagcagtttattttaaacaaacaatttgaagttaaacatttcatttttaaaaacactgaattacagttcttattgatgactttttaatgcagagtaagttgtttaagaaaggcctgaatatatcagaacatctgagcaccattttagaagagtcaactcttaagattatcattagaaaacaaatacgtcaacacctatgaaaagaagcggggaaaacaacaacaaggacaacaacaaaaaaccagtgaaattctacaagtgtcccttttaaaaatagtatgtgctaactaagggctattcattctgccatttttaacttgagacacatttaagaataaagttggatgttctttttctgtgattatgaaatgcaataaaatctgaataaagggcaaagtttcttcctgatcagattagattaagtgcttagttttattcctaattctgccccttttaacctgatgtgtaccttactctttcctccctctcttcctcccttcctcctctccccactcctttcctgcatttctccctccctccttccctcgtcacatctcttatatgagcacagtaattatgacctttttgttttggctacaacttgattgaaacaagttcaaaatttaaacaagttcatacaagtttttaaaaattctcaactggtagcttgcttgctgtgcgtcttccaaactaaagcctgcaagcgccacaattctaagtgccgccttccattttttttcagtatgttttcactggcttatgttttcagatatgattttcctttttcgcatatatggtttaataaatgggggataattttttttttgtaaatccgtgcttgtgccaagtctcatatttctttgccatctcagaattatctttttaccaccactgtttataaaatttccttagagactttttgaagggaaaatagagcaacagggaaaaatgaaagaaatgtcttggttactgagctctaaatagacaggtttgatggcacttctcatgatacattttagttattcttataaaagcaaacaggcaaacatgagtgtaaattaaagacaaaaagaaaactctggttttatatttgagaacacgtgaaaaatcatgggtcaacataaaatcttgagaaccttctactttctctgggaaagcattatatagtggtgcattagtttagaaagtcagctatgattttgcctatagttctagttattagctttggggttttcttgtactttaagacatacctgtaaattgaacctatttgaattatattccactgtatgtgtattatggctcttttcctattagagcaacttgtgtttccctgataatgtgtacattttttaggcatgtacttaatagttcacaatgttctaaatttggaaggacttaaaaaaaaaacttgtttaaatttccatctgttttgtaatatctagctctatatgtaaatgatgggtttgttggtatttaaaatgaatacaacttgaatgtaattaaagtgctgttttttggaagcgataaactttaaatatacttattaaaatgaaattctattaaaaaaaaaa

SEQ ID NO: 414441 - DNA, 2503 bp, Homo sapiens
  misc_feature (12)..(13): n is a, c, g, or t
gcattctggaannactctcttaatctccaccgctacagcagtactgatgaaatctccatctccagcattacacccacctcagaagtacaaagatagaggaattttacatcctaaacgaggtactgaggaccgatcagatcagtcttctctgaaatctacagacagcagtagttacccaagtccttgtgctagtccttctcctccatcctcaggaaagggctcaaaatctccttcgccaagaccaaacatgcctgttcgatacttcataatgaagagtagcaatttgagaaaccttgaaatttctcaacagaagggtatctggtctacaactcctagtaatgaacggaagctaaatcgagccttttgggaaagcagcatagtttacttggtattttctgttcaaggatctggacatttccagggattttctaggatgtcttctgagattggaagggaaaagagtcaggactggggctctgctggactaggaggagtatttaaggtggagtggatacgaaaagaaagccttccctttcaatttgcacaccatttactcaatccatggaatgacaacaagaaagtgcagataagcagggatgggcaggaactagaacctcaggttggtgaacagttgctccagttatgggaacgtcttcccttgggagaaaaaaacacaactgattgacactcagaactcttagctgtggaagaacatcatgcctatttataaccactgaatgcactgactttcaaaaactgaggtggggtgtgtgttacgaatgggctttttaacacttttagagtgttgctttagaactaccatcttcatatacaggagaaaggaagcatttaaatttttatagtgattatagagaatgattatatgatgtttgtaatgaataaaatagtagtttcattatttggcacaatagcagtttattttaaacaaacaatttgaagttaaacatttcatttttaaaaacactgaattacagttcttattgatgactttttaatgcagagtaagttgtttaagaaaggcctgaatatatcagaacatctgagcaccattttagaagagtcaactcttaagattatcattagaaaacaaatacgtcaacacctatgaaaagaagcggggaaaacaacaacaaggacaacaacaaaaaaccagtgaaattctacaagtgtcccttttaaaaatagtatgtgctaactaagggctattcattctgccatttttaacttgagacacatttaagaataaagttggatgttctttttctgtgattatgaaatgcaataaaatctgaataaagggcaaagtttcttcctgatcagattagattaagtgcttagttttattcctaattctgccccttttaacctgatgtgtaccttactctttcctccctctcttcctcccttcctcctctccccactcctttcctgcatttctccctccctccttccctcgtcacatctcttatatgagcacagtaattatgacctttttgttttggctacaacttgattgaaacaagttcaaaatttaaacaagttcatacaagtttttaaaaattctcaactggtagcttgcttgctgtgcgtcttccaaactaaagcctgcaagcgccacaattctaagtgccgccttccattttttttcagtatgttttcactggcttatgttttcagatatgattttcctttttcgcatatatggtttaataaatgggggataattttttttttgtaaatccgtgcttgtgccaagtctcatatttctttgccatctcagaattatctttttaccaccactgtttataaaatttccttagagactttttgaagggaaaatagagcaacagggaaaaatgaaagaaatgtcttggttactgagctctaaatagacaggtttgatggcacttctcatgatacattttagttattcttataaaagcaaacaggcaaacatgagtgtaaattaaagacaaaaagaaaactctggttttatatttgagaacacgtgaaaaatcatgggtcaacataaaatcttgagaaccttctactttctctgggaaagcattatatagtggtgcattagtttagaaagtcagctatgattttgcctatagttctagttattagctttggggttttcttgtactttaagacatacctgtaaattgaacctatttgaattatattccactgtatgtgtattatggctcttttcctattagagcaacttgtgtttccctgataatgtgtacattttttaggcatgtacttaatagttcacaatgttctaaatttggaaggacttaaaaaaaaaacttgtttaaatttccatctgttttgtaatatctagctctatatgtaaatgatgggtttgttggtatttaaaatgaatacaacttgaatgtaattaaagtgctgttttttggaagcgataaactttaaatatacttattaaaatgaaattctattaaaaaaaaaa

SEQ ID NO: 414442 - DNA, 3945 bp, Homo sapiens
aattattgcttcagtcttttagttatatatataccaaagcaagagaacctattcacagaggagagctttttatactgcatatagatgatttatagaaatcctactttccattcttaggtagagtccagggttgacatagagattattttttggaggacaagagtggcacgattcttagatataagtgttaagaagtcttagttgaaaacctatacttttgtagagagtaaaattagcagatgcatctgagaaggcaaatatttttacattgttagtcatttaggctacttgacacttagttctctttgcgattttataaactcaatggcttttttagcatttgagtataaattaatgataaatattatttgatcataaagtcttagattttatagaaaattagaataaggcaaattcacctcgaggaattcgtgtagtgatttgtagttacttgttgcctcactaagaagcgattagtaaatgtgtcttgttatgcaattattctctttttataggcctggcaaaaagcacgaagtgatgggtgggagcgagccttttgtgaaaagaattttctttcacaggctactatggaaataatcataggcatgagaacacagttgcttggtcaacttagagcatcaggttttgttagagcacgaggtggtggtgacattcgggacgttaacacaaactctgagaattgggctgtcgttaaagctgcattggtggcaggcatgtatcctaatttagtccacgtggacagagagaatctagtgttgacagggccaaaggagaaaaaagtacgatttcatcctgcttcagttctcagtcagcctcaatataaaaagattcctccagccaatggtcaagctgcagcaattaaggcactgcccacagattggcttatttatgatgaaatgaccagagcccatagaatagctaatattagatgttgttcagcagtgacgcctgtcactatattggtattctgtggaccagctagattggcaagtaatgctcttcaggaaccttcatcctttagagtggatggcattcccaatgacagtagtgatagtgaaatggaggacaaaactacagctaatttggcagccttgaaacttgatgagtggctccatttcacactggagccagaggcagctagtttattgctgcagctcagacagaagtggcatagcttatttttacgccgaatgagagctccatctaaaccttggtctcaagttgatgaagctaccataagagcaattatagctgttttaagcactgaagaacagtctgcaggtttacaacaaccatcggggattggccaaaggccaaggcctatgtcttcagaagagcttcctttggcctcatcttggaggtcaaataatagtaggaaaagttcagcagatactgaattttctgatgagtgtactactgcagaaagagtactgatgaaatctccatctccagcattacacccacctcagaagtacaaagatagaggaattttacatcctaaacgaggtactgaggaccgatcagatcagtcttctctgaaatctacagacagcagtagttacccaagtccttgtgctagtccttctcctccatcctcaggaaagggctcaaaatctccttcgccaagaccaaacatgcctgttcgatacttcataatgaagagtagcaatttgagaaaccttgaaatttctcaacagaagggtatctggtctacaactcctagtaatgaacggaagctaaatcgagccttttgggaaagcagcatagtttacttggtattttctgttcaaggatctggacatttccagggattttctaggatgtcttctgagattggaagggaaaagagtcaggactggggctctgctggactaggaggagtatttaaggtggagtggatacgaaaagaaagccttccctttcaatttgcacaccatttactcaatccatggaatgacaacaagaaagtgcagataagcagggatgggcaggaactagaacctcaggttggtgaacagttgctccagttatgggaacgtcttcccttgggagatatttgtgatcattaggaacctttcagattatttatctttttttttcccctttcttctagaactcttagctgtggaagaacatcatgcctatttataaccactgaatgcactgactttcaaaaactgaggtggggtgtgtgttacgaatgggctttttaacacttttagagtgttgctttagaactaccatcttcatatacaggagaaaggaagcatttaaatttttatagtgattatagagaatgattatatgatgtttgtaatgaataaaatagtagtttcattatttggcacaatagcagtttattttaaacaaacaatttgaagttaaacatttcatttttaaaaacactgaattacagttcttattgatgactttttaatgcagagtaagttgtttaagaaaggcctgaatatatcagaacatctgagcaccattttagaagagtcaactcttaagattatcattagaaaacaaatacgtcaacacctatgaaaagaagcggggaaaacaacaacaaggacaacaacaaaaaaccagtgaaattctacaagtgtcccttttaaaaatagtatgtgctaactaagggctattcattctgccatttttaacttgagacacatttaagaataaagttggatgttctttttctgtgattatgaaatgcaataaaatctgaataaagggcaaagtttcttcctgatcagattagattaagtgcttagttttattcctaattctgccccttttaacctgatgtgtaccttactctttcctccctctcttcctcccttcctcctctccccactcctttcctgcatttctccctccctccttccctcgtcacatctcttatatgagcacagtaattatgacctttttgttttggctacaacttgattgaaacaagttcaaaatttaaacaagttcatacaagtttttaaaaattctcaactggtagcttgcttgctgtgcgtcttccaaactaaagcctgcaagcgccacaattctaagtgccgccttccattttttttcagtatgttttcactggcttatgttttcagatatgattttcctttttcgcatatatggtttaataaatgggggataattttttttttgtaaatccgtgcttgtgccaagtctcatatttctttgccatctcagaattatctttttaccaccactgtttataaaatttccttagagactttttgaagggaaaatagagcaacagggaaaaatgaaagaaatgtcttggttactgagctctaaatagacaggtttgatggcacttctcatgatacattttagttattcttataaaagcaaacaggcaaacatgagtgtaaattaaagacaaaaagaaaactctggttttatatttgagaacacgtgaaaaatcatgggtcaacataaaatcttgagaaccttctactttctctgggaaagcattatatagtggtgcattagtttagaaagtcagctatgattttgcctatagttctagttattagctttggggttttcttgtactttaagacatacctgtaaattgaacctatttgaattatattccactgtatgtgtattatggctcttttcctattagagcaacttgtgtttccctgataatgtgtacattttttaggcatgtacttaatagttcacaatgttctaaatttggaaggacttaaaaaaaaaacttgtttaaatttccatctgttttgtaatatctagctctatatgtaaatgatgggtttgttggtatttaaaatgaatacaacttgaatgtaattaaagtgctgttttttggaagcgataaactttaaatatacttattaaaatgaaattctattaaaaaaaaaa

SEQ ID NO: 414443 - DNA, 2243 bp, Homo sapiens
  misc_feature (12)..(13): n is a, c, g, or t
gcattctggaannactctcttaatctccaccgctacagcagtactgatgaaatctccatctccagcattacacccacctcagaagtacaaagatagaggaattttacatcctaaacgaggtactgaggaccgatcagatcagtcttctctgaaatctacagacagcagtagttacccaagtccttgtgctagtccttctcctccatcctcaggaaagggctcaaaatctccttcgccaagaccaaacatgcctgttcgatacttcataatgaagagtagcaatttgagaaaccttgaaatttctcaacagaagggtatctggtctacaactcctagtaatgaacggaagctaaatcgagccttttgggaaagcagcatagtttacttggtattttctgttcaaggatctggacatttccagggattttctaggatgtcttctgagattggaagggaaaagagtcaggactggggctctgctggactaggaggagtatttaaggtggagtggatacgaaaagaaagccttccctttcaatttgcacaccatttactcaatccatggaatgacaacaagaaagtgcagataagcagggatgggcaggaactagaacctcaggttggtgaacagttgctccagttatgggaacgtcttcccttgggagaaaaaaacacaactgattgacactcagaactcttagctgtggaagaacatcatgcctatttataaccactgaatgcactgactttcaaaaactgagagtaagttgtttaagaaaggcctgaatatatcagaacatctgagcaccattttagaagagtcaactcttaagattatcattagaaaacaaatacgtcaacacctatgaaaagaagcggggaaaacaacaacaaggacaacaacaaaaaaccagtgaaattctacaagtgtcccttttaaaaatagtatgtgctaactaagggctattcattctgccatttttaacttgagacacatttaagaataaagttggatgttctttttctgtgattatgaaatgcaataaaatctgaataaagggcaaagtttcttcctgatcagattagattaagtgcttagttttattcctaattctgccccttttaacctgatgtgtaccttactctttcctccctctcttcctcccttcctcctctccccactcctttcctgcatttctccctccctccttccctcgtcacatctcttatatgagcacagtaattatgacctttttgttttggctacaacttgattgaaacaagttcaaaatttaaacaagttcatacaagtttttaaaaattctcaactggtagcttgcttgctgtgcgtcttccaaactaaagcctgcaagcgccacaattctaagtgccgccttccattttttttcagtatgttttcactggcttatgttttcagatatgattttcctttttcgcatatatggtttaataaatgggggataattttttttttgtaaatccgtgcttgtgccaagtctcatatttctttgccatctcagaattatctttttaccaccactgtttataaaatttccttagagactttttgaagggaaaatagagcaacagggaaaaatgaaagaaatgtcttggttactgagctctaaatagacaggtttgatggcacttctcatgatacattttagttattcttataaaagcaaacaggcaaacatgagtgtaaattaaagacaaaaagaaaactctggttttatatttgagaacacgtgaaaaatcatgggtcaacataaaatcttgagaaccttctactttctctgggaaagcattatatagtggtgcattagtttagaaagtcagctatgattttgcctatagttctagttattagctttggggttttcttgtactttaagacatacctgtaaattgaacctatttgaattatattccactgtatgtgtattatggctcttttcctattagagcaacttgtgtttccctgataatgtgtacattttttaggcatgtacttaatagttcacaatgttctaaatttggaaggacttaaaaaaaaaacttgtttaaatttccatctgttttgtaatatctagctctatatgtaaatgatgggtttgttggtatttaaaatgaatacaacttgaatgtaattaaagtgctgttttttggaagcgataaactttaaatatacttattaaaatgaaattctattaaaaaaaaaa

SEQ ID NO: 414444 - DNA, 3072 bp, Homo sapiens
aattattgcttcagtcttttagttatatatataccaaagcaagagaacctattcacagaggagagctttttatactgcatatagatgatttatagaaatcctactttccattcttaggtagagtccagggttgacatagagattattttttggaggacaagagtggcacgattcttagatataagtgttaagaagtcttagttgaaaacctatacttttgtagagagtaaaattagcagatgcatctgagaaggcaaatatttttacattgttagtcatttaggctacttgacacttagttctctttgcgattttataaactcaatggcttttttagcatttgagtataaattaatgataaatattatttgatcataaagtcttagattttatagaaaattagaataaggcaaattcacctcgaggaattcgtgtagtgatttgtagttacttgttgcctcactaagaagcgattagtaaatgtgtcttgttatgcaattattctctttttataggcctggcaaaaagcacgaagtgatgggtgggagcgagccttttgtgaaaagaattttctttcacaggctactatggaaataatcataggcatgagaacacagttgcttggtcaacttagagcatcaggttttgttagagcacgaggtggtggtgacattcgggacgttaacacaaactctgagaattgggctgtcgttaaagctgcattggtggcaggcatgtatcctaatttagtccacgtggacagagagaatctagtgttgacagggccaaaggagaaaaaagtacgatttcatcctgcttcagttctcagtcagcctcaatataaaaagattcctccagccaatggtcaagctgcagcaattaaggcactgcccacagattggcttatttatgatgaaatgaccagagcccatagaatagctaatattagatgttgttcagcagtgacgcctgtcactatattggtattctgtggaccagctagattggcaagtaatgctcttcaggaaccttcatcctttagagtggatggcattcccaatgacagtagtgatagtgaaatggaggacaaaactacagctaatttggcagccttgaaacttgatgagtggctccatttcacactggagccagaggcagctagtttattgctgcagctcagacagaagtggcatagcttatttttacgccgaatgagagctccatctaaaccttggtctcaagttgatgaagctaccataagagcaattatagctgttttaagcactgaagaacagtctgcaggtttacaacaaccatcggggattggccaaaggccaaggcctatgtcttcagaagagcttcctttggcctcatcttggaggtcaaataatagtaggaaaagttcagcagatactgaattttctgatgagtgtactactgcagaaagagtactgatgaaatctccatctccagcattacacccacctcagaagtacaaagatagaggaattttacatcctaaacgaggtactgaggaccgatcagatcagtcttctctgaaatctacagacagcagtagttacccaagtccttgtgctagtccttctcctccatcctcaggaaagggctcaaaatctccttcgccaagaccaaacatgcctgttcgatacttcataatgaagagtagcaatttgagaaaccttgaaatttctcaacagaagggtatctggtctacaactcctagtaatgaacggaagctaaatcgagccttttgggaaagcagcatagtttacttggtattttctgttcaaggatctggacatttccagggattttctaggatgtcttctgagattggaagggaaaagagtcaggactggggctctgctggactaggaggagtatttaaggtggagtggatacgaaaagaaagccttccctttcaatttgcacaccatttactcaatccatggaatgacaacaagaaagtgcagataagcagggatgggcaggaactagaacctcaggttggtgaacagttgctccagttatgggaacgtcttcccttgggagaaaaaaacacaactgattgacactcagaactcttagctgtggaagaacatcatgcctatttataaccactgaatgcactgactttcaaaaactgaggtggggtgtgtgttacgaatgggctttttaacacttttagagtgttgctttagaactaccatcttcatatacaggagaaaggaagcatttaaatttttatagtgattatagagaatgattatatgatgtttgtaatgaataaaatagtagtttcattatttggcacaatagcagtttattttaaacaaacaatttgaagttaaacatttcatttttaaaaacactgaattacagttcttattgatgactttttaatgcagagtaagttgtttaagaaaggcctgaatatatcagaacatctgagcaccattttagaagagtcaactcttaagattatcattagaaaacaaatacgtcaacacctatgaaaagaagcggggaaaacaacaacaaggacaacaacaaaaaaccagtgaaattctacaagtgtcccttttaaaaatagtatgtgctaactaagggctattcattctgccatttttaacttgagacacatttaagaataaagttggatgttctttttctgtgattatgaaatgcaataaaatctgaataaaaaaaaaaaaaaaaaaaaaaacaaacacgtgtgtgcgggcacgcgcacatgcagggcccgccagcgaaaagccctctgaaaaacacaatggcagggtgagggcgcgccggggcgcccacagaagcggaaacgggaaacagtgggcacaaaaccggttcccagaggaacaccgggcgcaaggacaaagcgcgggtgggagattcgccacaccaatatagaaaacagcccccgggggggacaacgacgaagaggtttttagaaggaactcccgagaggggacgatgcgacagggcgaaccaaccgggggccatttacaacaggggagggcaaaaggaggcacgagaaag

SEQ ID NO: 414445 - DNA, 2278 bp, Homo sapiens
aattattgcttcagtcttttagttatatatataccaaagcaagagaacctattcacagaggagagctttttatactgcatatagatgatttatagaaatcctactttccattcttaggtagagtccagggttgacatagagattattttttggaggacaagagtggcacgattcttagatataagtgttaagaagtcttagttgaaaacctatacttttgtagagagtaaaattagcagatgcatctgagaaggcaaatatttttacattgttagtcatttaggctacttgacacttagttctctttgcgattttataaactcaatggcttttttagcatttgagtataaattaatgataaatattatttgatcataaagtcttagattttatagaaaattagaataaggcaaattcacctcgaggaattcgtgtagtgatttgtagttacttgttgcctcactaagaagcgattagtaaatgtgtcttgttatgcaattattctctttttataggcctggcaaaaagcacgaagtgatgggtgggagcgagccttttgtgaaaagaattttctttcacaggctactatggaaataatcataggcatgagaacacagttgcttggtcaacttagagcatcaggttttgttagagcacgaggtggtggtgacattcgggacgttaacacaaactctgagaattgggctgtcgttaaagctgcattggtggcaggcatgtatcctaatttagtccacgtggacagagagaatctagtgttgacagggccaaaggagaaaaaagtacgatttcatcctgcttcagttctcagtcagcctcaatataaaaagattcctccagccaatggtcaagctgcagcaattaaggcactgcccacagattggcttatttatgatgaaatgaccagagcccatagaatagctaatattagatgttgttcagcagtgacgcctgtcactatattggtattctgtggaccagctagattggcaagtaatgctcttcaggaaccttcatcctttagagtggatggcattcccaatgacagtagtgatagtgaaatggaggacaaaactacagctaatttggcagccttgaaacttgatgagtggctccatttcacactggagccagaggcagctagtttattgctgcagctcagacagaagtggcatagcttatttttacgccgaatgagagctccatctaaaccttggtctcaagttgatgaagctaccataagagcaattatagctgttttaagcactgaagaacagtctgcaggtttacaacaaccatcggggattggccaaaggccaaggcctatgtcttcagaagagcttcctttggcctcatcttggaggtcaaataatagtaggaaaagttcagcagatactgaattttctgatgagtgtactactgcagaaagagtactgatgaaatctccatctccagcattacacccacctcagaagtacaaagatagaggaattttacatcctaaacgaggtactgaggaccgatcagatcagtcttctctgaaatctacagacagcagtagttacccaagtccttgtgctagtccttctcctccatcctcaggaaagggctcaaaatctccttcgccaagaccaaacatgcctgttcgatacttcataatgaagagtagcaatttgagaaaccttgaaatttctcaacagaagggtatctggtctacaactcctagtaatgaacggaagctaaatcgagccttttgggaaagcagcatagtttacttggtattttctgttcaaggatctggacatttccagggattttctaggatgtcttctgagattggaagggaaaagagtcaggactggggctctgctggactaggaggagtatttaaggtggagtggatacgaaaagaaagccttccctttcaatttgcacaccatttactcaatccatggaatgacaacaagaaagtgcagataagcagggatgggcaggtatacaatggcatttttttttttatttacttttgtttctgtttgttttctgttatccagtgctttaattgaggagaaaatgtaagagtacaaattttatattccatatgcacatgggaaacaggggttcaggtttgtaaaaagatagtaaaaacctacttgtaaatgtgtctgattgctccttgcagtcagagtctcaagatgacaatagtatttaacttctctttggctttaattatgtaaagtaaataacctttttatattct

SEQ ID NO: 414446 - DNA, 1055 bp, Homo sapiens
ggagctctgtgggctcagagacaccctcttctcctgagtgttcctccctccaccatgacatcactatgaaggcaattttatttaccacaacaaatattactatagaattaacaggggcccaacacatggcagggactggaaaatacttgctgaatgagtaaaggacttgtgagtctctggggcagctgaatgagactgtttccatcacaggacccagacggggaggaggaatgccagagaagctgcagactctccggccacggagcctgagtggagcagaggtggcccactgtcagccacaggtcaagtgtcagggtggggacggggcaggctccaccagaaggcgggggcaggctccaccagaaggcggggccagaccacagggcaaggtggagatgagtctgtggcacccccaggaagtttaccagatttgccccagagcttctgaccctttggatctctctgggctgcattcttcagggtcccattgcttctttcttgaaggtggaaggaaatgttcccatcagagccttccaacaggccaccttgggggcttctcctgagagctccttgtgcacacaccccttcagggtggcttgggttgcgccctcagaccccagtggggggccgtatggcatcctccttggtcagcaagtgagccacagcagcaggcccctcacagacctcagcctggggccacaggtcccttctccccatctccgcatctggagaagcaacctgtggagcagccaagagtggcagccctggctctctacagcattcattttcagggcaagacagagcatttccactattatgctcccccccccggccttttttttttttttttgagacagggtctcactctgttgcccaggctggagtgcggtggcgcaatcatggctcactgcagcctcgaccttctggggtcaagtgatcctcccaattcagcctccaaatttctttaaacaaaaaaaaatgcaagaaaggcaaaacaagatatttatctgggctgagagggtaaagagaagctctatctttgagctgagacacaa

SEQ ID NO: 414447 - DNA, 219 bp, Homo sapiens
aacagactgcgagtagacaggctggttttagaggaaggagttgttttaccaagtgctgttctctgcaagtgatcccctaatgaagccaatcacaaacaaatttctcctgaaattctactttacagtcattagcagtgaattgaaaagctggttttcagtaagaattcacttgggaattaagtgctcatcaaggccagctgcaggcttaatcatgcagaa

SEQ ID NO: 414448 - DNA, 894 bp, Homo sapiens
ttaaactgttgaaaaacaaagaagagaaccttaaaagcagcaagagaaaaatgactctttatgtacaaaaaatcctaaggaaaattaacagctttctcatcagaagccatgaaggccaaaaggcaggtaaatgacatattcaaagagctaaaagaaaaagactgtaagaattctatatctagcaaatctattcttcaaaaatgaaagagtggaagagaagtagtagtaaaaccatctatatgcagacaacttgaccgtgtatatagaaaatcctaagggatccactaaaaaactcttggaactaagttcagcaagcttgttggaaacaacatcaccagtacacaaaaatcatttgtattctatagatttttaatgaacactctgaaaatgaacttaagaaaacaattccattttaaatagcatcaaaaaacacttatgagtacatttaacaaaagtagctaaaacttatactctaaaaatacaaaaaacattgttgaaagaaattaaagaagacctaagtaaataggaagacatcccatgttcatagattagatcttaatattgttagatggcaatactcccaaaattagtgtatcaattcagtgtaattttcttttttgagacatgaacttgctctaatattcaggctggagtgcagtggtatgatcatggctcgctgcaacctcaaactcctgggctcaagcagccctcctgcctcagtctcccaagcaactgggactataggcatgtgatgccacatctggctaatttcagtgcaatctgtatcaaaagtccaattggcttctctgcagaaatggacaggctgatcataatattcacatagaaattcaagggactctgaatgaccaacaatcatgaaagacaaaaaaaaaa

SEQ ID NO: 414449 - DNA, 725 bp, Homo sapiens
caaagagtgggagactttgtgttccaaagtgtttaaggaaattcctgtccagttgttagctgactactaagttaaatgagcattgactttagtggacacacaaatcagggaatacaaactttatagaataggagaaaatattttcaaatcatttatctgataagacagttacatctagaacatacgaaaagctcctccaactcaacaataaaaagacaacctaattttaaaacaggcaaatgatttgaatagacatttctccaaagaagatgtacagatgggcaaataagcacatgaaaagatgctcaacatcattactcattaggaaatgcaaatcaaaaccataacaggtgcagtggttcccacttacagtcccagctacatgggaggccaaggcaggaggattgcttgagcccagtagctcgaggctgtagtgcaatatgattgtgcctatgaacagccactggacaccagcttaggcaacatagcaagatcccatctcttaatttaaaaagaaacacaaaaccataagaagatatcacattctacccaccaggatggctgtaatcaaaaagaccgcacagacaagaatatgcagaaattggaaccctcatagagtaatagtgggaaagtaaagttacagccacagtggaaaaaaagaatttggcagttcctcaaaaagttaaatgtagtcttatcatatgacccggcaattccattccata

SEQ ID NO: 414450 - DNA, 161 bp, Homo sapiens
taatttttgtatttttagtagggacagggaggatacagtcttatgtagaaaaattataaagacatgtatgggaatagcagacgctgttcaaaatgatactgacttctagagaaagagggaggagggggacttcggggtacgccagcatcttgaattgtatt

SEQ ID NO: 414451 - DNA, 514 bp, Homo sapiens
gcccccagggactactccaactacattaaaaaattaggttggcatcaaatgacttattgaactctgtattgatatccttgggatttggttgtcaatctacacagtagttagtctcctttcacagcgaccgcattaagtaggaagttgtaacagttattgacgatttgagcaaattattttcctctatccagcccctacatacaacaacaatagtaataaacacagcttgagtgaaaagtatattccacatatggcatggatgctttgtttacatggtacgtggttttatttcacaataactcctaggtagatattatgtcctttctgagatttaagcattactttagtcacttaatcaaaaatcataaactgaagctcatgccattgaccccagttatataaaagaagtttgaaattttcttttgatctaggttttgcaccctgatagacttcacagataatgtaactaattagtaactgtgttttatttttgtgtacccatattctccttgcc

SEQ ID NO: 414452 - DNA, 371 bp, Homo sapiens
ggctccaggtgatccagcccctgtggcttctctgagctcatcccctaaaactaccctctccgtcactctactcacacgggggcttctgattctgcctcaaacgtggcaggcatccccactcctcagactattggcgtcccacgctccttctccttggaacgctgctctctcagattggcccatgacttgcctatttgcctctttcaagtctttattccaattcaagtttctcagcgaggttctctctcaccacccaatttagaggtcactccccatctctttctgtggtgtatgtgtatggtatgtatccctaatatagataagttatacaaagtctcagcatttatctttttttttttttttgagatgga

SEQ ID NO: 414453 - DNA, 2754 bp, Homo sapiens
taaaataaaataaaataaaaataaaagtttgcagtttacacaatcaatcctggaagcattttatttacactgtgggtcccactgctgagctaacttgcatttacaaagcacctctagatactgtcataatgtatccagaaattcaattagagagagtgtgtgtttctgggccaacagaggcaaggttagggggcagaggtaatataagtgagctggcccaagccatgcaacttagcctcatagattgaagtcatcacatgaattaaccccaaactggtacccagtgatgtcagagcatgagtccagatgtgctctgtgcgtgcatgggatggcttccaataaagtcaaatgacacagtcacgtgtcagtttaggtcctctaggaaacagacaccagagagaatgagaagtgcaagtgacatattgggggatgcctatgaaagacaaaggggagagggagcaggatgaggtgggaaggcttcagactgtgacacaggtgtgccacctgtgaaaagtgaaggggaaagaagcagcattctcagggagagcctcagaccacagtgccactctgagcaagtggccaggctgatggagcctgacactaaaggttgcccattagagaagtctcggccctagtgtcccagccacatggagtgtcccagagagcgcagctttggtgtgagctctgagggagcaagtcctctttgaggttctctgaaagaagatctaagctgtgcacttcttgggctgccttaattatgcttcaagggtcagaagggtccaactcttgtttgaaccgagactcaatcccagcctgcaaatgactttccctgattgattacaacttgctttaaaagtccagagacttttatctcttaatgaaagatatttaaatgagggtgatttattactttgaggtcgcggtgatcacgaaagtatgactgagtatatgtgattgatatgggccataatgcttcattcattcacaattcagcagaccaaattaaagagatgcgtgtttaagtttcaatcctgccatgactgtgatcttgggcaagtcacttctctctcagcttcagctccctcatgtccaaaataagtgggttgcactaaatgagatccagcatcctccagttcaattattctgtcattctccttccttcgagcttgactctgatgaggccgggaataaaaatgaatgatttctcacttgaattttcgatgcactgtgaaacatagttaatcttcctcttctctatttcagtgactgtcacaaagatcaagctagattttccaaagcttacctcttagactcaactcagctaattatcagctgatttggcagatcactgtaggaatcactaaaataactccttatgcaactttaaaaatctagcatagcattttaaatattatatgagatgttatagcttcataaatttcctattccatttactttcatcatacttgaaatcagatcactgaaaaacctatgcaaaacatattctaagtgctattttttggtgggtacagattcacaatgtcactttgtttgcatatcatattttattattattagagcaatggctttatctgaaacatgaaagataaacttttttggtgtgagccaccatgcccagccagttgtaaattttttaatatccaagttttttaaaagtcacaaataattcaatattttttgagcacccactctgtagcagacatgtcctggaagctaaggaaataaagcctcagaggggcattaggcgtcttttttatgccgggcactgtgctggcactgagaacacagcatgagcaaagttgaggtctctccctccctcccctccctcaaggagcctgtttgaacatcgagattcttaaccagaggtacacatcagaatcaccaaggtagcttcatcatagtacagatgccagcccccgcactgagagattctttcccagtaatgggtggggtcatcagtatttgagaaacctgccatgatgattctaaggctaaaacatggttttttaagataaggactgacccctattctctgaaaattgcaaaataggtacctcttctggacttctcatggagggggctgtatcaatagaatataaattcgtagaaagagaaaggtgttcataattgaatttttaaaaaaagaaagaagaataaggaagacaatactatactgaggggaaaaaaaagggatgggtagagccatgtgaataagcctctgcatgcaaagttatacgctttatcaaacaactctctagctgtgttttgtaaatatgtaaaaaggttgatcatctctgataggagagacttttagtgaatttcagataccctagaggaatggatactggagggggctagctctgtgccaagactccagggtgggttttactaacatttctttctactcctttcccaaggcagataaaagggtagttcctactgtcatcctaaatgtcccactgggattttaaaaaggatcattcaacgcctgtgctgctttacagcccttatcttctaatagaataatggccagtcccccagtggcatatagaccagaataagttcaagttaatggctacaaacaagcagggcagtgctagagctaagctcaggggctcactacctgcttcctgtacattggagagaaaagccatatacaggccgcaagaatgcaaagacacagggaagagaacggccacctcaagacagatcaataaaacagcacaggaaaga

SEQ ID NO: 414454 - DNA, 2152 bp, Homo sapiens
  misc_feature (1816)..(1816): n is a, c, g, or t
taaaataaaataaaataaaaataaaagtttgcagtttacacaatcaatcctggaagcattttatttacactgtgggtcccactgctgagctaacttgcatttacaaagcacctctagatactgtcataatgtatccagaaattcaattagagagagtgtgtgtttctgggccaacagaggcaaggttagggggcagaggtaatataagtgagctggcccaagccatgcaacttagcctcatagattgaagtcatcacatgaattaaccccaaactggtacccagtgatgtcagagcatgagtccagatgtgctctgtgcgtgcatgggatggcttccaataaagtcaaatgacacagtcacgtgtcagtttaggtcctctaggaaacagacaccagagagaatgagaagtgcaagtgacatattgggggatgcctatgaaagacaaaggggagagggagcaggatgaggtgggaaggcttcagactgtgacacaggtgtgccacctgtgaaaagtgaaggggaaagaagcagcattctcagggagagcctcagaccacagtgccactctgagcaagtggccaggctgatggagcctgacactaaaggttgcccattagagaagtctcggccctagtgtcccagccacatggagtgtcccagagagcgcagctttggtgtgagctctgagggagcaagtcctctttgaggttctctgaaagaagatctaagctgtgcacttcttgggctgccttaattatgcttcaagggtcagaagggtccaactcttgtttgaaccgagactcaatcccagcctgcaaatgactttccctgattgattacaacttgctttaaaagtccagagacttttatctcttaatgaaagatatttaaatgagggtgatttattactttgaggtcgcggtgatcacgaaagtatgactgagtatatgtgattgatatgggccataatgcttcattcattcacaattcagcagaccaaattaaagagatgcgtgtttaagtttcaatcctgccatgactgtgatcttgggcaagtcacttctctctcagcttcagctccctcatgtccaaaataagtgggttgcactaaatgagatccagcatcctccagttcaattattctgtcattctccttccttcgagcttgactctgatgaggccgggaataaaaatgaatgatttctcacttgaattttcgatgcactgtgaaacatagttaatcttcctcttctctatttcagtgactgtcacaaagatcaagctagattttccaaagcttacctcttagactcaactcagctaattatcagctgatttggcagatcactgtaggaatcactaaaataactccttatgcaactttaaaaatctagcatagcattttaaatattatatgagatgttatagcttcataaatttcctattccatttactttcatcatacttgaaatcagatcactgaaaaacctatgcaaaacatattctaagtgctattttttggtgggtacagattcacaatgtcactttgtttgcatatcatattttattattattagagcaatggctttatctgaaacatgaaagataaacttttttggctgggtgcagtggctcacgcctgtaatcccagcactttgggaggccgaggtggatggatcacgaggtcaggagatcgaaaccatcctggctaacacggtgaaacctcgtctctactaaaaatacaaaaaaattagccgggcatggtggcgggcacctgtagtcccagctactcgggaggctgaggcaggagaatgntgggagtgagcttgcagtgagccgagattgcaccactgcactccagcctgggcaacagagtgagactccgtctcaaaaaaaaaaaaagataaacttttttgaatacaaataccatatcattccattccactgcatttatatcagggcaagggcacatggagagtcaacatagaaatactgtaaaggaccatcagtgtggatggtttcagtcactagattgtaccaggtcggggaggaaccacatgttcctctaataccctctgcagccctgagaccctcttctccatttaggcctcacacaatttaagttggtaatggagccaggaatagaattcc

SEQ ID NO: 414455 - DNA, 2990 bp, Homo sapiens
gttgaaagctgctggcgcggcggggcggactccacccctgcccggcagcccagcgcctccggccgcacttccagctctctgcgcagcccgccgcgcagcccgccgccccagccatggcgaagcccctgacggaccaggagaagcggcggcagatcagcatccgcggcatcgtgggcgtggagaacgtggcagagctgaagaagagtttcaaccggcacctgcacttcacgctggtcaaggaccgcaacgtggccaccacccgcgactactacttcgcgctggcgcacacggtgcgcgaccacctggtggggcgctggatccgcacgcagcagcactactacgacaagtgccccaagagggtatattacctctctctggaattttacatgggccgaacattacagaacaccatgatcaacctcggtctgcaaaatgcctgtgatgaggccatttaccagcttggattggatatagaagagttagaagaaattgaagaagatgctggacttggcaatggtggtcttgggagacttgctgcctgcttcttggattccatggcaaccctgggacttgcagcctatggatacggcattcggtatgaatatgggattttcaatcagaagatccgagatggatggcaggtagaagaagcagatgattggctcagatatggaaacccttgggagaagtcccgcccagaattcatgctgcctgtgcacttctatggaaaagtagaacacaccaacaccgggaccaagtggattgacactcaagtggtcctggctctgccatatgacacccccgtgcccggctacatgaataacactgtcaacaccatgcgcctctggtctgctcgggcaccaaatgactttaacctcagagactttaatgttggagactacattcaggctgtgctggaccgaaacctggccgagaacatctcccgggtcctctatcccaatgacaatttttttgaagggaaggagctaagattgaagcaggaatactttgtggtggctgcaaccttgcaagatatcatccgccgtttcaaagcctccaagtttggctccacccgtggtgcaggaactgtgtttgatgccttcccggatcaggtggccatccagctgaatgacactcaccctgcactcgcgatccctgagctgatgaggatttttgtggatattgaaaaactgccctggtccaaggcatgggagctcacccagaagaccttcgcctacaccaaccacacagtgctcccggaagccctggagcgctggcccgtggacctggtggagaagctgctccctcgacatttggaaatcatttatgagataaatcagaagcatttagatagaattgtggccttgtttcctaaagatgtggaccgtctgagaaggatgtctctgatagaagaggaaggaagcaaaaggatcaacatggcccatctctgcattgtcggttcccatgctgtgaatggcgtggctaaaatccactcagacatcgtgaagactaaagtattcaaggacttcagtgagctagaacctgacaagtttcagaataaaaccaatgggatcactccaaggcgctggctcctactctgcaacccaggacttgcagagctcatagcagagaaaattggagaagactatgtgaaagacctgagccagctgacgaagctccacagcttcctgggtgatgatgtcttcctccgggaactcgccaaggtgaagcaggagaataagctgaagttttctcagttcctggagacggagtacaaagtgaagatcaacccatcctccatgtttgatgtccaggtgaagaggatacatgagtacaagcgacagctcttgaactgtctgcatgtgatcacgatgtacaaccgcattaagaaagaccctaagaagttattcgtgccaaggacagttatcattggtggtaaagctgccccaggatatcacatggccaaaatgatcataaagctgatcacttcagtggcagatgtggtgaacaatgaccctatggttggaagcaagttgaaagtcatcttcttggagaactacagagtatctcttgctgaaaaagtcattccagccacagatctgtcagagcagatttccactgcaggcaccgaagcctcggggacaggcaatatgaagttcatgctaaatggggccctaactatcgggaccatggatggggccaatgtggaaatggcagaagaagctggggaagagaacctgttcatctttggcatgaggatagatgatgtggctgctttggacaagaaagggtacgaggcaaaagaatactatgaggcacttccagagctgaagctggtcattgatcaaattgacaatggctttttttctcccaagcagcctgacctcttcaaagatatcatcaacatgctattttatcatgacaggtttaaagtctttgcagactacgaagcctatgtcaagtgtcaagataaagtgagtcagctgtacatgaatccaaaggcctggaacacaatggtactcaaaaacatagctgcctcggggaaattctccagtgaccgaacaattaaagaatatgcccaaaacatctggaacgtggaaccttcagatctaaagatttctctatccaatgaatctaacaaagtcaatggaaattgaactctagaattgtctctagaaaacatagcttcttactgaacttgaacatttttacaacattcactggtttttgttttgttagctaataatctataatagttgagtatctctgggaatggggagggaaattatatgtaatagagcttaaaaataaagtgtcaatttccaagggcaaaaaaaaatgaaagcagacacacaaacaacaaaaaaaaacaacagaaaacagggggcgggccgccgtcaagaataccaccacacaggggcacacagactaacgccttccccgaaggtctacggcacaagtgggcccccagagcgacacctacaaaacag

SEQ ID NO: 414456 - DNA, 2507 bp, Homo sapiens
gcacgagagagagagagagagagagagagagagagagagagagagagagagagagagtgttacatgggccgaacattacagaacaccatgatcaacctcggtctgcaaaatgcctgtgatgaggccatttaccagcttggattggatatagaagagttagaagaaattgaagaagatgctggacttggcaatggtggtcttgggagacttgctgcctgcttcttggattccatggcaaccctgggacttgcagcctatggatacggcattcggtatgaatatgggattttcaatcagaagatccgagatggatggcaggtagaagaagcagatgattggctcagatatggaaacccttgggagaagtcccgcccagaattcatgctgcctgtgcacttctatggaaaagtagaacacaccaacaccgggaccaagtggattgacactcaagtggtcctggctctgccatatgacacccccgtgcccggctacatgaataacactgtcaacaccatgcgcctctggtctgctcgggcaccaaatgactttaacctcagagactttaatgttggagactacattcaggctgtgctggaccgaaacctggccgagaacatctcccgggtcctctatcccaatgacaatttttttgaagggaaggagctaagattgaagcaggaatactttgtggtggctgcaaccttgcaagatatcatccgccgtttcaaagcctccaagtttggctccacccgtggtgcaggaactgtgtttgatgccttcccggatcaggtggccatccagctgaatgacactcaccctgcactcgcgatccctgagctgatgaggatttttgtggatattgaaaaactgccctggtccaaggcatgggagctcacccagaagaccttcgcctacaccaaccacacagtgctcccggaagccctggagcgctggcccgtggacctggtggagaagctgctccctcgacatttggaaatcatttatgagataaatcagaagcatttagatagaattgtggccttgtttcctaaagatgtggaccgtctgagaaggatgtctctgatagaagaggaaggaagcaaaaggatcaacatggcccatctctgcattgtcggttcccatgctgtgaatggcgtggctaaaatccactcagacatcgtgaagactaaagtattcaaggacttcagtgagctagaacctgacaagtttcagaataaaaccaatgggatcactccaaggcgctggctcctactctgcaacccaggacttgcagagctcatagcagagaaaattggagaagactatgtgaaagacctgagccagctgacgaagctccacagcttcctgggtgatgatgtcttcctccgggaactcgccaaggtgaagcaggagaataagctgaagttttctcagttcctggagacggagtacaaagtgaagatcaacccatcctccatgtttgatgtccaggtgaagaggatacatgagtacaagcgacagctcttgaactgtctgcatgtgatcacgatgtacaaccgcattaagaaagaccctaagaagttattcgtgccaaggacagttatcattggtggtaaagctgccccaggatatcacatggccaaaatgatcataaagctgatcacttcagtggcagatgtggtgaacaatgaccctatggttggaagcaagttgaaagtcatcttcttggagaactacagagtatctcttgctgaaaaagtcattccagccacagatctgtcagagcagatttccactgcaggcaccgaagcctcggggacaggcaatatgaagttcatgctaaatggggccctaactatcgggaccatggatggggccaatgtggaaatggcagaagaagctggggaagagaacctgttcatctttggcatgaggatagatgatgtggctgctttggacaagaaagggtacgaggcaaaagaatactatgaggcacttccagagctgaagctggtcattgatcaaattgacaatggctttttttctcccaagcagcctgacctcttcaaagatatcatcaacatgctattttatcatgacaggtttaaagtctttgcagactacgaagcctatgtcaagtgtcaagataaagtgagtcagctgtacatgaatccaaaggcctggaacacaatggtactcaaaaacatagctgcctcggggaaattctccagtgaccgaacaattaaagaatatgcccaaaacatctggaacgtggaaccttcagatctaaagatttctctatccaatgaatctaacaaagtcaatggaaattgaactctagaattgtctctagaaaacatagcttcttactgaacttgaacatttttacaacattcactggtttttgttttgttagctaataatctataatagttgagtatctctgggaatggggagggaaattatatgtaatagagcttaaaaataaagtgtcaatttccaagggc

SEQ ID NO: 414457 - DNA, 2728 bp, Homo sapiens
gttgaaagctgctggcgcggcggggcggactccacccctgcccggcagcccagcgcctccggccgcacttccagctctctgcgcagcccgccgcgcagcccgccgccccagccatggcgaagcccctgacggaccaggagaagcggcggcagatcagcatccgcggcatcgtgggcgtggagaacgtggcagagctgaagaagagtttcaaccggcacctgcacttcacgctggtcaaggaccgcaacgtggccaccacccgcgactactacttcgcgctggcgcacacggtgcgcgaccacctggtggggcgctggatccgcacgcagcagcactactacgacaagtgccccaagcttggattggatatagaagagttagaagaaattgaagaagatgctggacttggcaatggtggtcttgggagacttgctgcctgcttcttggattccatggcaaccctgggacttgcagcctatggatacggcattcggtatgaatatgggattttcaatcagaagatccgagatggatggcaggtagaagaagcagatgattggctcagatatggaaacccttgggagaagtcccgcccagaattcatgctgcctgtgcacttctatggaaaagtagaacacaccaacaccgggaccaagtggattgacactcaagtggtcctggctctgccatatgacacccccgtgcccggctacatgaataacactgtcaacaccatgcgcctctggtctgctcgggcaccaaatgactttaacctcagagactttaatgttggagactacattcaggctgtgctggaccgaaacctggccgagaacatctcccgggtcctctatcccaatgacaatttttttgaagggaaggagctaagattgaagcaggaatactttgtggtggctgcaaccttgcaagatatcatccgccgtttcaaagcctccaagtttggctccacccgtggtgcaggaactgtgtttgatgccttcccggatcaggtggccatccagctgaatgacactcaccctgcactcgcgatccctgagctgatgaggatttttgtggatattgaaaaactgccctggtccaaggcatgggagctcacccagaagaccttcgcctacaccaaccacacagtgctcccggaagccctggagcgctggcccgtggacctggtggagaagctgctccctcgacatttggaaatcatttatgagataaatcagaagcatttagatagaattgtggccttgtttcctaaagatgtggaccgtctgagaaggatgtctctgatagaagaggaaggaagcaaaaggatcaacatggcccatctctgcattgtcggttcccatgctgtgaatggcgtggctaaaatccactcagacatcgtgaagactaaagtattcaaggacttcagtgagctagaacctgacaagtttcagaataaaaccaatgggatcactccaaggcgctggctcctactctgcaacccaggacttgcagagctcatagcagagaaaattggagaagactatgtgaaagacctgagccagctgacgaagctccacagcttcctgggtgatgatgtcttcctccgggaactcgccaaggtgaagcaggagaataagctgaagttttctcagttcctggagacggagtacaaagtgaagatcaacccatcctccatgtttgatgtccaggtgaagaggatacatgagtacaagcgacagctcttgaactgtctgcatgtgatcacgatgtacaaccgcattaagaaagaccctaagaagttattcgtgccaaggacagttatcattggtggtaaagctgccccaggatatcacatggccaaaatgatcataaagctgatcacttcagtggcagatgtggtgaacaatgaccctatggttggaagcaagttgaaagtcatcttcttggagaactacagagtatctcttgctgaaaaagtcattccagccacagatctgtcagagcagatttccactgcaggcaccgaagcctcggggacaggcaatatgaagttcatgctaaatggggccctaactatcgggaccatggatggggccaatgtggaaatggcagaagaagctggggaagagaacctgttcatctttggcatgaggatagatgatgtggctgctttggacaagaaagggtacgaggcaaaagaatactatgaggcacttccagagctgaagctggtcattgatcaaattgacaatggctttttttctcccaagcagcctgacctcttcaaagatatcatcaacatgctattttatcatgacaggtttaaagtctttgcagactacgaagcctatgtcaagtgtcaagataaagtgagtcagctgtacatgaatccaaaggcctggaacacaatggtactcaaaaacatagctgcctcggggaaattctccagtgaccgaacaattaaagaatatgcccaaaacatctggaacgtggaaccttcagatctaaagatttctctatccaatgaatctaacaaagtcaatggaaattgaactctagaattgtctctagaaaacatagcttcttactgaacttgaacatttttacaacattcactggtttttgttttgttagctaataatctataatagttgagtatctctgggaatggggagggaaattatatgtaatagagcttaaaaataaagtgtcaatttccaagggc

SEQ ID NO: 414458 - DNA, 2775 bp, Homo sapiens
gttgaaagctgctggcgcggcggggcggactccacccctgcccggcagcccagcgcctccggccgcacttccagctctctgcgcagcccgccgcgcagcccgccgccccagccatggcgaagcccctgacggaccaggagaagcggcggcagatcagcatccgcggcatcgtgggcgtggagaacgtggcagagctgaagaagagtttcaaccggcacctgcacttcacgctggtcaaggaccgcaacgtggccaccacccgcgactactacttcgcgctggcgcacacggtgcgcgaccacctggtggggcgctggatccgcacgcagcagcactactacgacaagtgccccaagagggtatattacctctctctggaattttacatgggccgaacattacagaacaccatgatcaacctcggtctgcaaaatgcctgtgatgaggccatttaccagcttggattggatatagaagagttagaagaaattgaagaagatgctggacttggcaatggtggtcttgggagacttgctgcctgcttcttggattccatggcaaccctgggacttgcagcctatggatacggcattcggtatgaatatgggattttcaatcagaagatccgagatggatggcaggtagaagaagcagatgattggctcagatatggaaacccttgggagaagtcccgcccagaattcatgctgcctgtgcacttctatggaaaagtagaacacaccaacaccgggaccaagtggattgacactcaagtggtcctggctctgccatatgacacccccgtgcccggctacatgaataacactgtcaacaccatgcgcctctggtctgctcgggcaccaaatgactttaacctcagagactttaatgttggagactacattcaggctgtgctggaccgaaacctggccgagaacatctcccgggtcctctatcccaatgacaatttttttgaagggaaggagctaagattgaagcaggaatactttgtggtggctgcaaccttgcaagatatcatccgccgtttcaaagcctccaagtttggctccacccgtggtgcaggaactgtgtttgatgccttcccggatcaggtggccatccagctgaatgacactcaccctgcactcgcgatccctgagctgatgaggatttttgtggatattgaaaaactgccctggtccaaggcatgggagctcacccagaagaccttcgcctacaccaaccacacagtgctcccggaagccctggagcgctggcccgtggacctggtggagaagctgctccctcgacatttggaaatcatttatgagataaatcagaagcatttagatagaattgtggccttgtttcctaaagatgtggaccgtctgagaaggatgtctctgatagaagaggaaggaagcaaaaggatcaacatggcccatctctgcattgtcggttcccatgctgtgaatggcgtggctaaaatccactcagacatcgtgaagactaaagtattcaaggacttcagtgagctagaacctgacaagtttcagaataaaaccaatgggatcactccaaggcgctggctcctactctgcaacccaggacttgcagagctcatagcagagtcctgggtgatgatgtcttcctccgggaactcgccaaggtgaagcaggagaataagctgaagttttctcagttcctggagacggagtacaaagtgaagatcaacccatcctccatgtttgatgtccaggtgaagaggatacatgagtacaagcgacagctcttgaactgtctgcatgtgatcacgatgtacaaccgcattaagaaagaccctaagaagttattcgtgccaaggacagttatcattggtggtaaagctgccccaggatatcacatggccaaaatgatcataaagctgatcacttcagtggcagatgtggtgaacaatgaccctatggttggaagcaagttgaaagtcatcttcttggagaactacagagtatctcttgctgaaaaagtcattccagccacagatctgtcagagcagatttccactgcaggcaccgaagcctcggggacaggcaatatgaagttcatgctaaatggggccctaactatcgggaccatggatggggccaatgtggaaatggcagaagaagctggggaagagaacctgttcatctttggcatgaggatagatgatgtggctgctttggacaagaaagggtacgaggcaaaagaatactatgaggcacttccagagctgaagctggtcattgatcaaattgacaatggctttttttctcccaagcagcctgacctcttcaaagatatcatcaacatgctattttatcatgacaggtttaaagtctttgcagactacgaagcctatgtcaagtgtcaagataaagtgagtcagctgtacatgaatccaaaggcctggaacacaatggtactcaaaaacatagctgcctcggggaaattctccagtgaccgaacaattaaagaatatgcccaaaacatctggaacgtggaaccttcagatctaaagatttctctatccaatgaatctaacaaagtcaatggaaattgaactctagaattgtctctagaaaacatagcttcttactgaacttgaacatttttacaacattcactggtttttgttttgttagctaataatctataatagttgagtatctctgggaatggggagggaaattatatgtaatagagcttaaaaataaagtgtcaatttccaagggc

SEQ ID NO: 414459 - DNA, 2334 bp, Homo sapiens
ttcaggctggactcgccacctggatccggcgtaaggcatcaaacacagttcctgtaccaggggtggagccaaacttggaggctttgaaacgagcggatgatatcgttgcaaggttgcggccaccacaaagtattcctgcttcaatctttagactccttcccttcaaaaaaattgtcattgggatagaggacccgggcagatgttctcgggcaggtttcggtccagcacagactgaatgtaggtctccaataccgggaccaagtggattgacactcaagtggtcctggctctgccatatgacacccccgtgcccggctacatgaataacactgtcaacaccatgcgcctctggtctgctcgggcaccaaatgactttaacctcagagactttaatgttggagactacattcaggctgtgctggaccgaaacctggccgagaacatctcccgggtcctctatcccaatgacaatttttttgaagggaaggagctaagattgaagcaggaatactttgtggtggctgcaaccttgcaagatatcatccgccgtttcaaagcctccaagtttggctccacccgtggtgcaggaactgtgtttgatgccttcccggatcaggtggccatccagctgaatgacactcaccctgcactcgcgatccctgagctgatgaggatttttgtggatattgaaaaactgccctggtccaaggcatgggagctcacccagaagaccttcgcctacaccaaccacacagtgctcccggaagccctggagcgctggcccgtggacctggtggagaagctgctccctcgacatttggaaatcatttatgagataaatcagaagcatttagatagaattgtggccttgtttcctaaagatgtggaccgtctgagaaggatgtctctgatagaagaggaaggaagcaaaaggatcaacatggcccatctctgcattgtcggttcccatgctgtgaatggcgtggctaaaatccactcagacatcgtgaagactaaagtattcaaggacttcagtgagctagaacctgacaagtttcagaataaaaccaatgggatcactccaaggcgctggctcctactctgcaacccaggacttgcagagctcatagcagagaaaattggagaagactatgtgaaagacctgagccagctgacgaagctccacagcttcctgggtgatgatgtcttcctccgggaactcgccaaggtgaagcaggagaataagctgaagttttctcagttcctggagacggagtacaaagtgaagatcaacccatcctccatgtttgatgtccaggtgaagaggatacatgagtacaagcgacagctcttgaactgtctgcatgtgatcacgatgtacaaccgcattaagaaagaccctaagaagttattcgtgccaaggacagttatcattggtggtaaagctgccccaggatatcacatggccaaaatgatcataaagctgatcacttcagtggcagatgtggtgaacaatgaccctatggttggaagcaagttgaaagtcatcttcttggagaactacagagtatctcttgctgaaaaagtcattccagccacagatctgtcagagcagatttccactgcaggcaccgaagcctcggggacaggcaatatgaagttcatgctaaatggggccctaactatcgggaccatggatggggccaatgtggaaatggcagaagaagctggggaagagaacctgttcatctttggcatgaggatagatgatgtggctgctttggacaagaaagggtacgaggcaaaagaatactatgaggcacttccagagctgaagctggtcattgatcaaattgacaatggctttttttctcccaagcagcctgacctcttcaaagatatcatcaacatgctattttatcatgacaggtttaaagtctttgcagactacgaagcctatgtcaagtgtcaagataaagtgagtcagctgtacatgaatccaaaggcctggaacacaatggtactcaaaaacatagctgcctcggggaaattctccagtgaccgaacaattaaagaatatgcccaaaacatctggaacgtggaaccttcagatctaaagatttctctatccaatgaatctaacaaagtcaatggaaattgaactctagaattgtctctagaaaacatagcttcttactgaacttgaacatttttacaacattcactggtttttgttttgttagctaataatctataatagttgagtatctctgggaatggggagggaaattatatgtaatagagcttaaaaataaagtgtcaatttccaagggc

SEQ ID NO: 414460 - DNA, 1662 bp, Homo sapiens
gttgaaagctgctggcgcggcggggcggactccacccctgcccggcagcccagcgcctccggccgcacttccagctctctgcgcagcccgccgcgcagcccgccgccccagccatggcgaagcccctgacggaccaggagaagcggcggcagatcagcatccgcggcatcgtgggcgtggagaacgtggcagagctgaagaagagtttcaaccggcacctgcacttcacgctggtcaaggaccgcaacgtggccaccacccgcgactactacttcgcgctggcgcacacggtgcgcgaccacctggtggggcgctggatccgcacgcagcagcactactacgacaagtgccccaagagggtatattacctctctctggaattttacatgggccgaacattacagaacaccatgatcaacctcggtctgcaaaatgcctgtgatgaggccatttaccagcttggattggatatagaagagttagaagaaattgaagaagatgctggacttggcaatggtggtcttgggagacttgctgcctgcttcttggattccatggcaaccctgggacttgcagcctatggatacggcattcggtatgaatatgggattttcaatcagaagatccgagatggatggcaggtagaagaagcagatgattggctcagatatggaaacccttgggagaagtcccgcccagaattcatgctgcctgtgcacttctatggaaaagtagaacacaccaacaccgggaccaagtggattgacactcaagtggtcctggctctgccatatgacacccccgtgcccggctacatgaataacactgtcaacaccatgcgcctctggtctgctcgggcaccaaatgactttaacctcagagactttaatgttggagactacattcaggctgtgctggaccgaaacctggccgagaacatctcccgggtcctctatcccaatgacaatttttttgaagggaaggagctaagattgaagcaggaatactttgtggtggctgcaaccttgcaagatatcatccgccgtttcaaagcctccaagtttggctccacccgtggtgcaggaactgtgtttgatgccttcccggatcaggtggccatccagctgaatgacactcaccctgcactcgcgatccctgagctgatgaggatttttgtggatattgaaaaactgccctggtccaaggcatgggagctcacccagaagaccttcgcctacaccaaccacacagtgctcccggaagccctggagcgctggcccgtggacctggtggagaagctgctccctcgacatttggaaatcatttatgagataaatcagaagcatttagatagaattgtggccttgtttcctaaagatgtggaccgtctgagaaggatgtctctgatagaagaggaaggaagcaaaaggatcaacatggcccatctctgcattgtcggttcccatgctgtgaatggcgtggctaaaatccactcagacatcgtgaagactaaagtgtgagcctccattactctggcagtgggtctgacactgatccattaatggaatgatgctactaaatgcagggttgcacttagggatgaggaaaggccttgttcaaatgtttaaaagtattttcttctatacaaaaaactcttgccta

SEQ ID NO: 414461 - DNA, 1695 bp, Homo sapiens
gttgaaagctgctggcgcggcggggcggactccacccctgcccggcagcccagcgcctccggccgcacttccagctctctgcgcagcccgccgcgcagcccgccgccccagccatggcgaagcccctgacggaccaggagaagcggcggcagatcagcatccgcggcatcgtgggcgtggagaacgtggcagagctgaagaagagtttcaaccggcacctgcacttcacgctggtcaaggaccgcaacgtggccaccacccgcgactactacttcgcgctggcgcacacggtgcgcgaccacctggtggggcgctggatccgcacgcagcagcactactacgacaagtgccccaagagggtatattacctctctctggaattttacatgggccgaacattacagaacaccatgatcaacctcggtctgcaaaatgcctgtgatgaggccatttaccagcttggattggatatagaagagttagaagaaattgaagaagatgctggacttggcaatggtggtcttgggagacttgctgcctgcttcttggattccatggcaaccctgggacttgcagcctatggatacggcattcggtatgaatatgggattttcaatcagaagatccgagatggatggcaggtagaagaagcagatgattggctcagatatggaaacccttgggagaagtcccgcccagaattcatgctgcctgtgcacttctatggaaaagtagaacacaccaacaccgggaccaagtggattgacactcaattcagagtgctcgtatagccagcgttttgtatagtatttagtacagtagataatacattgactatgtagcatatagtggtgatattgagtatagggcatgtcgtgttttgaataatagaatatatttttgtaaataaatctgttacttctcttagcgcagcccagtcattttggagacaaaggagctgaggccaagagaggagtgacttttataagggtcattttgcaaccagctttgtcagaaaattgtcagttcttttttttttttttttttttttgccagaaaattgtcagttctatagtaaccagcatgcttacctctttggttttatattaaggtgttgatagcaaaattgaataatttgaaatgtcattcctggctgggtgcagtggctcacaactgtaatcccagcactttgggaagccgaagcgggcagatcacctgaggtcaggagttcaagaccagcctggccaacatggtgaatccctatctgtactaaaaatacgaaaattagccaggagtggtggcccatgcctatagtcccagctacatgggaggctgaggcaggagaatcgcttgaacctaggaggtggaggttgcagtgagctgagatcatgtcgctgcactccagcctgggtaacagagtgagactctgtctcaaaaaaaaaaaaagataaacttttttgaatacaaataccatatcattccattccactgcatttatatcagggcaagggcacatggagagtcaacatagaaatactgtaaaggaccatcagtgtggatggtttcagtcactagattgtaccaggtcggggaggaaccacatgttcctctaataccctctgcagccctgagaccctcttctccatttaggcctcacacaatttaagttggtaatggagccaggaatagaattcc

SEQ ID NO: 414462 - DNA, 542 bp, Homo sapiens
taactgattctgtatattctagccacaagaatcttgactgaaccctttgtgtaggactcaacaggcccaggtatccaacgataaacatccctgtaaggcgtctgtctttagctgaagctggacaattggattcacagacgttaagacagaggctctggaacacagagacctaagggcagatcttatctctatcgtttactgtttgaccttgagatcttatctctaccgtttactatttgaccttgagcagttacaattcctcatctttaaaagaggattaaatgcagtaatacatataaaatatttagagctgtattagcgagtattattgttgatgtaggctgtaaaaaagttacaaaacagtactcagtattcataagttgtttcagttaaagatgttttaaatttaatataatataattgaagtgctaggttcatatttcctgacaaataaattctaagcaatactgtatccttttgcaggtagaagaagcagatgattggctcagatatggaaacccttgggagaagtcccgcccaga

SEQ ID NO: 414463 - DNA, 440 bp, Homo sapiens
agcatagattagcgtgatctgctcaggtagtttaggcttggggaaaaagttagatattctccaccagcgatgccagtaaggtttaagaataacacacacaaatctggttctctttttctccttccactgatattcccaacttccaaatgcatcccagtgatgacattctcacatgtgagaaccataagaaggttgagggctggttaaaagtcttacaaacagaaatatgaatttggtaaaccagccatgcctgatattaagcaaaagatgattttacatggaattttagcatatatctattaatgaagattttgactgtttttttcctcttccactcacaaaataaaaggtttaaagtctttgcagactacgaagcctatgtcaagtgtcaagataaagtgagtcagctgtacatggtgagtaaattgccaagatttata

SEQ ID NO: 414464 - DNA, 383 bp, Homo sapiens
agaccacccaattcttctaggccaaaagagctctggcaccatgcactgtcttaacaggagaataagctgaagttttctcagttcctggagacggagtacaaagtgaagatcaacccatcctccatgtttgatgtccaggtgaagaggatacatgagtacaagcgacagctcttgaactgtctgcatgtgatcacgatgtacaaccgtgagtcagccctgtagccaacaagcccccttgcaggtggaagcagcagactcagcataggtctcactgccctgaccgtcagctgtcttccatttcatccacttctccatctttttcaggcattaagaaagaccctaagaagttattcgtgccaaggacagttatcattggtggtaaa

SEQ ID NO: 414465 - DNA, 391 bp, Homo sapiens
ttctgatctgaacttcactgactaagcaggcattgtatggaggaagtagggagggcatttttaaagcaattctcatgtgaagtccagcatgacggtgtgttgaaatcctttgggatttttaggaattttaggaatcccacatgacacacagcacagagccagtgagatcaagaggtttccaacaacaatggctggtttctctatttattgtttctctaactttcccctagttaatgttggagactacattcaggctgtgctggaccgaaacctggccgagaacatctcccgggtcctctatcccaatgacaatgtgagttgatcaaaggtgctttcttagtggcaacagaggcagcttatttcacaagagcctgttcagtaacctataaaa

SEQ ID NO: 414466 - DNA, 377 bp, Homo sapiens
ggtagttagaaccaaattgagcttgaaacaaacaaaaaagccttgagtttctgatctgaacttcactgactaagcaggcattgtatggaggaagtagggagggcatttttaaagcaattctcatgtgaagtccagcatgacggtgtgttgaaatcctttgggatttttaggaattttaggaatcccacatgacacacagcacagagccagtgagatcaagaggtttccaacaacaatggctggtttctctatttattgtttctctaactttcccctagttaatgttggagactacattcaggctgtgctggaccgaaacctggccgagaacatctcccgggtcctctatcccaatgacaatgtgagttgatcaaagg

SEQ ID NO: 414467 - DNA, 2830 bp, Homo sapiens
gttgaaagctgctggcgcggcggggcggactccacccctgcccggcagcccagcgcctccggccgcacttccagctctctgcgcagcccgccgcgcagcccgccgccccagccatggcgaagcccctgacggaccaggagaagcggcggcagatcagcatccgcggcatcgtgggcgtggagaacgtggcagagctgaagaagagtttcaaccggcacctgcacttcacgctggtcaaggaccgcaacgtggccaccacccgcgactactacttcgcgctggcgcacacggtgcgcgaccacctggtggggcgctggatccgcacgcagcagcactactacgacaagtgccccaagagggtatattacctctctctggaattttacatgggccgaacattacagaacaccatgatcaacctcggtctgcaaaatgcctgtgatgaggccatttaccagcttggattggatatagaagagttagaagaaattgaagaagatgctggacttggcaatggtggtcttgggagacttgctgcctgcttcttggattccatggcaaccctgggacttgcagcctatggatacggcattcggtatgaatatgggattttcaatcagaagatccgagatggatggcaggtagaagaagcagatgattggctcagatatggaaacccttgggagaagtcccgcccagaattcatgctgcctgtgcacttctatggaaaagtagaacacaccaacaccgggaccaagtggattgacactcaagtggtcctggctctgccatatgacacccccgtgcccggctacatgaataacactgtcaacaccatgcgcctctggtctgctcgggcaccaaatgactttaacctcagagactttaatgttggagactacattcaggctgtgctggaccgaaacctggccgagaacatctcccgggtcctctatcccaatgacaatttttttgaagggaaggagctaagattgaagcaggaatactttgtggtggctgcaaccttgcaagatatcatccgccgtttcaaagcctccaagtttggctccacccgtggtgcaggaactgtgtttgatgccttcccggatcaggtggccatccagctgaatgacactcaccctgcactcgcgatccctgagctgatgaggatttttgtggatattgaaaaactgccctggtccaaggcatgggagctcacccagaagaccttcgcctacaccaaccacacagtgctcccggaagccctggagcgctggcccgtggacctggtggagaagctgctccctcgacatttggaaatcatttatgagataaatcagaagcatttagatagaattgtggccttgtttcctaaagatgtggaccgtctgagaaggatgtctctgatagaagaggaaggaagcaaaaggatcaacatggcccatctctgcattgtcggttcccatgctgtgaatggcgtggctaaaatccactcagacatcgtgaagactaaagtattcaaggacttcagtgagctagaacctgacaagtttcagaataaaaccaatgggatcactccaaggcgctggctcctactctgcaacccaggacttgcagagctcatagcagagaaaattggagaagactatgtgaaagacctgagccagctgacgaagctccacagcttcctgggtgatgatgtcttcctccgggaactcgccaaggtgaagcaggagaataagctgaagttttctcagttcctggagacggagtacaaagtgaagatcaacccatcctccatgtttgatgtccaggtgaagaggatacatgagtacaagcgacagctcttgaactgtctgcatgtgatcacgatgtacaaccgcattaagaaagaccctaagaagttattcgtgccaaggacagttatcattggtggtaaagctgccccaggatatcacatggccaaaatgatcataaagctgatcacttcagtggcagatgtggtgaacaatgaccctatggttggaagcaagttgaaagtcatcttcttggagaactacagagtatctcttgctgaaaaagtcattccagccacagatctgtcagagcagatttccactgcaggcaccgaagcctcggggacaggcaatatgaagttcatgctaaatggggccctaactatcgggaccatggatggggccaatgtggaaatggcagaagaagctggggaagagaacctgttcatctttggcatgaggatagatgatgtggctgctttggacaagaaagggtacgaggcaaaagaatactatgaggcacttccagagctgaagctggtcattgatcaaattgacaatggctttttttctcccaagcagcctgacctcttcaaagatatcatcaacatgctattttatcatgacaggtttaaagtctttgcagactacgaagcctatgtcaagtgtcaagataaagtgagtcagctgtacatgaatccaaaggcctggaacacaatggtactcaaaaacatagctgcctcggggaaattctccagtgaccgaacaattaaagaatatgcccaaaacatctggaacgtggaaccttcagatctaaagatttctctatccaatgaatctaacaaagtcaatggaaattgaactctagaattgtctctagaaaacatagcttcttactgaacttgaacatttttacaacattcactggtttttgttttgttagctaataatctataatagttgagtatctctgggaatggggagggaaattatatgtaatagagcttaaaaataaagtgtcaatttccaagggc

SEQ ID NO: 414468 - DNA, 2851 bp, Homo sapiens
gttgaaagctgctggcgcggcggggcggactccacccctgcccggcagcccagcgcctccggccgcacttccagctctctgcgcagcccgccgcgcagcccgccgccccagccatggcgaagcccctgacggaccaggagaagcggcggcagatcagcatccgcggcatcgtgggcgtggagaacgtggcagagctgaagaagagtttcaaccggcacctgcacttcacgctggtcaaggaccgcaacgtggccaccacccgcgactactacttcgcgctggcgcacacggtgcgcgaccacctggtggggcgctggatccgcacgcagcagcactactacgacaagtgccccaagagggtatattacctctctctggaattttacatgggccgaacattacagaacaccatgatcaacctcggtctgcaaaatgcctgtgatgaggccatttaccagcttggattggatatagaagagttagaagaaattgaagaagatgctggacttggcaatggtggtcttgggagacttgctgcctgcttcttggattccatggcaaccctgggacttgcagcctatggatacggcattcggtatgaatatgggattttcaatcagaagatccgagatggatggcaggtagaagaagcagatgattggctcagatatggaaacccttgggagaagtcccgcccagaattcatgctgcctgtgcacttctatggaaaagtagaacacaccaacaccgggaccaagtggattgacactcaagtggtcctggctctgccatatgacacccccgtgcccggctacatgaataacactgtcaacaccatgcgcctctggtctgctcgggcaccaaatgactttaacctcagagactttaatgttggagactacattcaggctgtgctggaccgaaacctggccgagaacatctcccgggtcctctatcccaatgacaatttttttgaagggaaggagctaagattgaagcaggaatactttgtggtggctgcaaccttgcaagatatcatccgccgtttcaaagcctccaagtttggctccacccgtggtgcaggaactgtgtttgatgccttcccggatcaggtggccatccagctgaatgacactcaccctgcactcgcgatccctgagctgatgaggatttttgtggatattgaaaaactgccctggtccaaggcatgggagctcacccagaagaccttcgcctacaccaaccacacagtgctcccggaagccctggagcgctggcccgtggacctggtggagaagctgctccctcgacatttggaaatcatttatgagataaatcagaagcatttagatagaattgtggccttgtttcctaaagatgtggaccgtctgagaaggatgtctctgatagaagaggaaggaagcaaaaggatcaacatggcccatctctgcattgtcggttcccatgctgtgaatggcgtggctaaaatccactcagacatcgtgaagactaaagtattcaaggacttcagtgagctagaacctgacaagtttcagaataaaaccaatgggatcactccaaggcgctggctcctactctgcaacccaggacttgcagagctcatagcagagaaaattggagaagactatgtgaaagacctgagccagctgacgaagctccacagcttcctgggtgatgatgtcttcctccgggaactcgccaaggtgaagcaggagaataagctgaagttttctcagttcctggagacggagtacaaagtgaagatcaacccatcctccatgtttgatgtccaggtgaagaggatacatgagtacaagcgacagctcttgaactgtctgcatgtgatcacgatgtacaaccgcattaagaaagaccctaagaagttattcgtgccaaggacagttatcattggtggtaaagctgccccaggatatcacatggccaaaatgatcataaagctgatcacttcagtggcagatgtggtgaacaatgaccctatggttggaagcaagttgaaagtcatcttcttggagaactacagagtatctcttgctgaaaaagtcattccagccacagatctgtcagagcagatttccactgcaggcaccgaagcctcggggacaggcaatatgaagttcatgctaaatggggccctaactatcgggaccatggatggggccaatgtggaaatggcagaagaagctggggaagagaacctgttcatctttggcatgaggatagatgatgtggctgctttggacaagaaagggtacgaggcaaaagaatactatgaggcacttccagagctgaagctggtcattgatcaaattgacaatggctttttttctcccaagcagcctgacctcttcaaagatatcatcaacatgctattttatcatgacaggtttaaagtctttgcagactacgaagcctatgtcaagtgtcaagataaagtgagtcagctgtacatgaatccaaaggcctggaacacaatggtactcaaaaacatagctgcctcggggaaattctccagtgaccgaacaattaaagaatatgcccaaaacatctggaacgtggaaccttcagatctaaagatttctctatccaatgaatctaacaaagtcaatggaaattgaactctagaattgtctctagaaaacatagcttcttactgaacttgaacatttttacaacattcactggtttttgttttgttagctaataatctataatagttgagtatctctgggaatggggagggaaattatatgtaatagagcttaaaaataaagtgtcaatttccaagggcaaaaaaaaaaattaacgtttt

SEQ ID NO: 414469 - DNA, 2784 bp, Homo sapiens
gttgaaagctgctggcgcggcggggcggactccacccctgcccggcagcccagcgcctccggccgcacttccagctctctgcgcagcccgccgcgcagcccgccgccccagccatggcgaagcccctgacggaccaggagaagcggcggcagatcagcatccgcggcatcgtgggcgtggagaacgtggcagagctgaagaagagtttcaaccggcacctgcacttcacgctggtcaaggaccgcaacgtggccaccacccgcgactactacttcgcgctggcgcacacggtgcgcgaccacctggtggggcgctggatccgcacgcagcagcactactacgacaagtgccccaagagggtatattacctctctctggaattttacatgggccgaacattacagaacaccatgatcaacctcggtctgcaaaatgcctgtgatgaggccatttaccagcttggattggatatagaagagttagaagaaattgaagaagatgctggacttggcaatggtggtcttgggagacttgctgcctgcttcttggattccatggcaaccctgggacttgcagcctatggatacggcattcggtatgaatatgggattttcaatcagaagatccgagatggatggcaggtagaagaagcagatgattggctcagatatggaaacccttgggagaagtcccgcccagaattcatgctgcctgtgcacttctatgggtggtcctggctctgccatatgacacccccgtgcccggctacatgaataacactgtcaacaccatgcgcctctggtctgctcgggcaccaaatgactttaacctcagagactttaatgttggagactacattcaggctgtgctggaccgaaacctggccgagaacatctcccgggtcctctatcccaatgacaatttttttgaagggaaggagctaagattgaagcaggaatactttgtggtggctgcaaccttgcaagatatcatccgccgtttcaaagcctccaagtttggctccacccgtggtgcaggaactgtgtttgatgccttcccggatcaggtggccatccagctgaatgacactcaccctgcactcgcgatccctgagctgatgaggatttttgtggatattgaaaaactgccctggtccaaggcatgggagctcacccagaagaccttcgcctacaccaaccacacagtgctcccggaagccctggagcgctggcccgtggacctggtggagaagctgctccctcgacatttggaaatcatttatgagataaatcagaagcatttagatagaattgtggccttgtttcctaaagatgtggaccgtctgagaaggatgtctctgatagaagaggaaggaagcaaaaggatcaacatggcccatctctgcattgtcggttcccatgctgtgaatggcgtggctaaaatccactcagacatcgtgaagactaaagtattcaaggacttcagtgagctagaacctgacaagtttcagaataaaaccaatgggatcactccaaggcgctggctcctactctgcaacccaggacttgcagagctcatagcagagaaaattggagaagactatgtgaaagacctgagccagctgacgaagctccacagcttcctgggtgatgatgtcttcctccgggaactcgccaaggtgaagcaggagaataagctgaagttttctcagttcctggagacggagtacaaagtgaagatcaacccatcctccatgtttgatgtccaggtgaagaggatacatgagtacaagcgacagctcttgaactgtctgcatgtgatcacgatgtacaaccgcattaagaaagaccctaagaagttattcgtgccaaggacagttatcattggtggtaaagctgccccaggatatcacatggccaaaatgatcataaagctgatcacttcagtggcagatgtggtgaacaatgaccctatggttggaagcaagttgaaagtcatcttcttggagaactacagagtatctcttgctgaaaaagtcattccagccacagatctgtcagagcagatttccactgcaggcaccgaagcctcggggacaggcaatatgaagttcatgctaaatggggccctaactatcgggaccatggatggggccaatgtggaaatggcagaagaagctggggaagagaacctgttcatctttggcatgaggatagatgatgtggctgctttggacaagaaagggtacgaggcaaaagaatactatgaggcacttccagagctgaagctggtcattgatcaaattgacaatggctttttttctcccaagcagcctgacctcttcaaagatatcatcaacatgctattttatcatgacaggtttaaagtctttgcagactacgaagcctatgtcaagtgtcaagataaagtgagtcagctgtacatgaatccaaaggcctggaacacaatggtactcaaaaacatagctgcctcggggaaattctccagtgaccgaacaattaaagaatatgcccaaaacatctggaacgtggaaccttcagatctaaagatttctctatccaatgaatctaacaaagtcaatggaaattgaactctagaattgtctctagaaaacatagcttcttactgaacttgaacatttttacaacattcactggtttttgttttgttagctaataatctataatagttgagtatctctgggaatggggagggaaattatatgtaatagagcttaaaaataaagtgtcaatttccaagggc

SEQ ID NO: 414470 - DNA, 2633 bp, Homo sapiens
gttgaaagctgctggcgcggcggggcggactccacccctgcccggcagcccagcgcctccggccgcacttccagctctctgcgcagcccgccgcgcagcccgccgccccagccatggcgaagcccctgacggaccaggagaagcggcggcagatcagcatccgcggcatcgtgggcgtggagaacgtggcagagctgaagaagagtttcaaccggcacctgcacttcacgctggtcaaggaccgcaacgtggccaccacccgcgactactacttcgcgctggcgcacacggtgcgcgaccacctggtggggcgctggatccgcacgcagcagcactactacgacaagtgccccaagagggtatattacctctctctggaattttacatgggccgaacattacagaacaccatgatcaacctcggtctgcaaaatgcctgtgatgaggccatttaccagcttggattggatatagaagagttagaagaaattgaagaagatgctggacttggcaatggtggtcttgggagacttgctgcctgcttcttggattccatggcaaccctgggacttgcagcctatggatacggcattcggtatgaatatgggattttcaatcagaagatccgagatggatggcaggtagaagaagcagatgattggctcagatatggaaacccttgggagaagtcccgcccagaattcatgctgcctgtgcacttctatggaaaagtagaacacaccaacaccgggaccaagtggattgacactcaagtggtcctggctctgccatatgacacccccgtgcccggctacatgaataacactgtcaacaccatgcgcctctggtctgctcgggcaccaaatgactttaacctcagagactttaatgttggagactacattcaggctgtgctggaccgaaacctggccgagaacatctcccgggtcctctatcccaatgacaatttttttgaagggaaggagctaagattgaagcaggaatactttgtggtggctgcaaccttgcaagatatcatccgccgtttcaaagcctccaagtttggctccacccgtggtgcaggaactgtgtttgatgccttcccggatcaggtggccatccagctgaatgacactcaccctgcactcgcgatccctgagctgatgaggatttttgtggatattgaaaaactgccctggtccaaggcatgggagctcacccagaagaccttcgcctacaccaaccacacagtgctcccggaagccctggagcgctggcccgtggacctggtggagaagctgctccctcgacatttggaaatcatttatgagataaatcagaagcatttagatagaattgtggccttgtttcctaaagatgtggaccgtctgagaaggatgtctctgatagaagaggaaggaagcaaaaggatcaacatggcccatctctgcattgtcggttcccatgctgtgaatggcgtggctaaaatccactcagacatcgtgaagactaaagtattcaaggacttcagtgagctagaacctgacaagtttcagaataaaaccaatgggatcactccaaggcgctggctcctactctgcaacccaggacttgcagagctcatagcagagaaaattggagaagactatgtgaaagacctgagccagctgacgaagctccacagcttcctgggtgatgatgtcttcctccgggaactcgccaaggtgaagcaggagaataagctgaagttttctcagttcctggagacggagtacaaagtgaagatcaacccatcctccatgtttgatgtccaggtgaagaggatacatgagtacaagcgacagctcttgaactgtctgcatgtgatcacgatgtacaaccgcattaagaaagaccctaagaagttattcgtgccaaggacagttatcattggtggtaaagctgccccaggatatcacatggccaaaatgatcataaagctgatcacttcagtggcagatgtggtgaacaatgaccctatggttggaagcaagttgaaagtcatcttcttggagaactacagagtatctcttgctgaaaaagtcattccagccacagatctgtcagagcagatttccactgcaggcaccgaagcctcggggacaggcaatatgaagttcatgctaaatggggccctaactatcgggaccatggatggggccaatgtggaaatggcagaagaagctggggaagagaacctgttcatctttggcatgaggatagatgatgtggctgctttggacaagaaagggtacgaggcaaaagaatactatgaggcacttccagagctgaagctggtcattgatcaaattgacaatggctttttttctcccaagcagcctgacctcttcaaagatatcatcaacatgctattttatcatgacaggtttaaagtctttgcagactacgaagcctatgtcaagtgtcaagataaagtgagtcagctgtacatggtgagtaaattgccaagatttataaagaaaaccagtttactatgattcattaaaatgtgggttttttaattaaatgcaaatatcagatccccatgtaatatcagatccccattaagcaatcaaaaaaaaaacaacaaaaac

SEQ ID NO: 414471 - DNA, 2365 bp, Homo sapiens
gttgaaagctgctggcgcggcggggcggactccacccctgcccggcagcccagcgcctccggccgcacttccagctctctgcgcagcccgccgcgcagcccgccgccccagccatggcgaagcccctgacggaccaggagaagcggcggcagatcagcatccgcggcatcgtgggcgtggagaacgtggcagagctgaagaagagtttcaaccggcacctgcacttcacgctggtcaaggaccgcaacgtggccaccacccgcgactactacttcgcgctggcgcacacggtgcgcgaccacctggtggggcgctggatccgcacgcagcagcactactacgacaagtgccccaagagggtatattacctctctctggaattttacatgggccgaacattacagaacaccatgatcaacctcggtctgcaaaatgcctgtgatgaggccatttaccagcttggattggatatagaagagttagaagaaattgaagaagatgctggacttggcaatggtggtcttgggagacttgctgcctgcttcttggattccatggcaaccctgggacttgcagcctatggatacggcattcggtatgaatatgggattttcaatcagaagatccgagatggatggcaggtagaagaagcagatgattggctcagatatggaaacccttgggagaagtcccgcccagaattcatgctgcctgtgcacttctatggaaaagtagaacacaccaacaccgggaccaagtggattgacactcaagtggtcctggctctgccatatgacacccccgtgcccggctacatgaataacactgtcaacaccatgcgcctctggtctgctcgggcaccaaatgactttaacctcagagactttaatgttggagactacattcaggctgtgctggaccgaaacctggccgagaacatctcccgggtcctctatcccaatgacaatttttttgaagggaaggagctaagattgaagcaggaatactttgtggtggctgcaaccttgcaagatatcatccgccgtttcaaagcctccaagtttggctccacccgtggtgcaggaactgtgtttgatgccttcccggatcaggtggccatccagctgaatgacactcaccctgcactcgcgatccctgagctgatgaggatttttgtggatattgaaaaactgccctggtccaaggcatgggagctcacccagaagaccttcgcctacaccaaccacacagtgctcccggaagccctggagcgctggcccgtggacctggtggagaagctgctccctcgacatttggaaatcatttatgagataaatcagaagcatttagatagaattgtggccttgtttcctaaagatgtggaccgtctgagaaggatgtctctgatagaagaggaaggaagcaaaaggatcaacatggcccatctctgcattgtcggttcccatgctgtgaatggcgtggctaaaatccactcagacatcgtgaagactaaagtattcaaggacttcagtgagctagaacctgacaagtttcagaataaaaccaatgggatcactccaaggcgctggctcctactctgcaacccaggacttgcagagctcatagcagagaaaattggagaagactatgtgaaagacctgagccagctgacgaagctccacagcttcctgggtgatgatgtcttcctccgggaactcgccaaggtgaagcaggagaataagctgaagttttctcagttcctggagacggagtacaaagtgaagatcaacccatcctccatgtttgatgtccaggtgaagaggatacatgagtacaagcgacagctcttgaactgtctgcatgtgatcacgatgtacaaccgcattaagaaagaccctaagaagttattcgtgccaaggacagttatcattggtggtaaagctgccccaggatatcacatggccaaaatgatcataaagctgatcacttcagtggcagatgtggtgaacaatgaccctatggttggaagcaagttgaaagtcatcttcttggagaactacagagtatctcttgctgaaaaagtcattccagccacagatctgtcagagcagatttccactgcaggcaccgaagcctcggggacaggcaatatgaagttcatgctaaatggggccctaactatcgggaccatggatggggccaatgtggaaatggcagaagaagctggggaagagaacctgttcatctttggcatgaggatagatgatgtggctgctttggacaagaaagggtacgaggcaaaagaatactatgaggcacttccagagcgccagtcgacgcggccgcgaatttagtagtagtaggc

SEQ ID NO: 414472 - DNA, 1575 bp, Homo sapiens
actgaaagtgtagtatatatgtcagtgtgaagaagtcagatggaagtgactagatttggaatttttctggtaattcttttgagttgcaaatgaatttctatttaaatgacagccatagctactgtcagcctgtccctccacctttatttaacctttctaagcctgcacttggcttcttgaatataactccgaactttgtccagtgtgcaggaccctttgccgtttcagccaaattcagtgatgtgtctcctccatctccagattcaaggacttcagtgagctagaacctgacaagtttcagaataaaaccaatgggatcactccaaggcgctggctcctactctgcaacccaggacttgcagagctcatagcagagaaaattggagaagactatgtgaaagacctgagccagctgacgaagctccacagcttcctgggtgatgatgtcttcctccgggaactcgccaaggtgaagcaggagaataagctgaagttttctcagttcctggagacggagtacaaagtgaagatcaacccatcctccatgtttgatgtccaggtgaagaggatacatgagtacaagcgacagctcttgaactgtctgcatgtgatcacgatgtacaaccgcattaagaaagaccctaagaagttattcgtgccaaggacagttatcattggtggtaaagctgccccaggatatcacatggccaaaatgatcataaagctgatcacttcagtggcagatgtggtgaacaatgaccctatggttggaagcaagttgaaagtcatcttcttggagaactacagagtatctcttgctgaaaaagtcattccagccacagatctgtcagagcagatttccactgcaggcaccgaagcctcggggacaggcaatatgaagttcatgctaaatggggccctaactatcgggaccatggatggggccaatgtggaaatggcagaagaagctggggaagagaacctgttcatctttggcatgaggatagatgatgtggctgctttggacaagaaagggtacgaggcaaaagaatactatgaggcacttccagagctgaagctggtcattgatcaaattgacaatggctttttttctcccaagcagcctgacctcttcaaagatatcatcaacatgctattttatcatgacaggtttaaagtctttgcagactacgaagcctatgtcaagtgtcaagataaagtgagtcagctgtacatgaatccaaaggcctggaacacaatggtactcaaaaacatagctgcctcggggaaattctccagtgaccgaacaattaaagaatatgcccaaaacatctggaacgtggaaccttcagatctaaagatttctctatccaatgaatctaacaaagtcaatggaaattgaactctagaattgtctctagaaaacatagcttcttactgaacttgaacatttttacaacattcactggtttttgttttgttagctaataatctataatagttgagtatctctgggaatggggagggaaattatatgtaatagagcttaaaaataaagtgtcaatttccaagggc

SEQ ID NO: 414473 - DNA, 1238 bp, Homo sapiens
ctcaaaaaaaagaaaaaccagaccacccaattcttctaggcctcagttcctggagacggagtacaaagtgaagatcaacccatcctccatgtttgatgtccaggtgaagaggatacatgagtacaagcgacagctcttgaactgtctgcatgtgatcacgatgtacaaccgtgagtcagccctgtagccaacaagcccccttgcaggtggaagcagcagactcagcataggtctcactgccctgaccgtcagctgtcttccatttcatccacttctccatctttttcaggcattaagaaagaccctaagaagttattcgtgccaaggacagttatcattggtggtaaagctgccccaggatatcacatggccaaaatgatcataaagctgatcacttcagtggcagatgtggtgaacaatgaccctatggttggaagcaagttgaaagtcatcttcttggagaactacagagtatctcttgctgaaaaagtcattccagccacagatctgtcagagcagatttccactgcaggcaccgaagcctcggggacaggcaatatgaagttcatgctaaatggggccctaactatcgggaccatggatggggccaatgtggaaatggcagaagaagctggggaagagaacctgttcatctttggcatgaggatagatgatgtggctgctttggacaagaaagggtacgaggcaaaagaatactatgaggcacttccagagctgaagctggtcattgatcaaattgacaatggctttttttctcccaagcagcctgacctcttcaaagatatcatcaacatgctattttatcatgacaggtttaaagtctttgcagactacgaagcctatgtcaagtgtcaagataaagtgagtcagctgtacatgaatccaaaggcctggaacacaatggtactcaaaaacatagctgcctcggggaaattctccagtgaccgaacaattaaagaatatgcccaaaacatctggaacgtggaaccttcagatctaaagatttctctatccaatgaatctaacaaagtcaatggaaattgaactctagaattgtctctagaaaacatagcttcttactgaacttgaacatttttacaacattcactggtttttgttttgttagctaataatctataatagttgagtatctctgggaatggggagggaaattatatgtaatagagcttaaaaataaagtgtcaatttccaagggc

SEQ ID NO: 414474 - DNA, 5648 bp, Homo sapiens
ctctgccaaatccacctcctgaggagatttccacaggaactcaatccacattcagcacaatgggcacagtttccaggagaaggatctgcagaaccaacacaatggcacgagccaagattctccaggacatagacagagagcttgatcttgtggaaagggagtctgcaaaacttcgaaagaaacaagcagagcttgatgaagaagaaaaggagattgatgctaagctacgatacctggaaatgggaattaacaggaggaaagaggccctattaaaggagagagaaaagagagaacgagcctacctccagggagtagctgaggatcgtgattacatgtctgacagtgaagtgagtagcacaagaccaacccgaatagaaagtcagcatggcattgagcgaccaagaactgctccccaaactgaattcagccagtttataccaccacaaacccaaacagaatctcaactagttcctccgacaagtccttacacacaataccagtactcttcccctgctcttcctacccaagcacccacctcatacactcaacagtctcattttgagcaacaaactttgtaccatcagcaagtttcaccttatcagactcagccaacattccaagctgtggcaacaatgtccttcacacctcaagttcaacctacaccaaccccacagccttcttatcagttaccttcacagatgatggtgatacaacagaagccacggcaaactacattatatttggagcccaagataacctcaaactatgaagtgattcgcaaccaaccccttatgatagcacctgtttctacggataacacatttgctgtttcccatcttggtagtaagtacaatagtttagacttgagaataggtttggaggaaagaagtagcatggcaagcagtccaatatcaagcatatctgcagattctttctatgcagatattgatcaccatactccacgaaattatgtcctaattgacgacattggagagatcaccaaaggaacagcggcattaagcaccgcatttagccttcatgaaaaggatctgtcaaaaacagaccgtctccttcgaaccactgagacacgccggtctcaagaagtgacagatttcctagcacctttacagtcttcctctagattgcatagttatgtgaaggcggaggaagacccaatggaggatccttacgagttaaagcttctgaaacatcagattaaacaggaatttcgtagagggacagagagcttagatcaccttgctggtctttctcattattaccatgctgatactagctacagacattttccaaaatctgagaagtatagcatcagtagactcacacttgaaaaacaagcagcaaaacaactgccagcagccatactttatcaaaagcagtcaaagcataagaaatcactaattgaccctaaaatgtcaaaattttcacctattcaagaaagtagagaccttgaacctgattattcaagctatatgacttctagcacttcatctattggtggcatttcctccagggcaaggctccttcaagatgacatcacttttggcctcagaaaaaatattacagaccaacaaaaatttatgggatcttctcttggcacaggactgggcacattaggaaataccatacgctcagctctgcaggatgaagcggataagccatacagtagtggcagcaggtccagaccttcctccagaccttcctctgtctatgggcttgatttatcaattaaaagggattcttctagctcttccctaagactgaaagctcaagaggctgaagctctagatgtttcctttagtcatgcatcatcctctgccagaactaagccgaccagtttgccaattagtcaaagtagaggaagaataccaattgtggcccagaattctgaagaagaaagcccactcagtcctgttggccagccaatgggaatggccagggctgcagctggacccctgccaccaatatctgcagacaccagggatcagtttggatcaagccactcattgcctgaagttcagcaacacatgagggaagaatcacggactcgaggctatgaccgtgacatagcattcatcatggatgacttccaacatgccatgtcagacagtgaagcctatcatctgcgtcgtgaggaaacagattggtttgataaacccagggagtctcgtttggaaaatggacatggtctggaccgaaaactgccggaaagattggtccactctagaccactcagtcaacatcaagagcaaattatacagatgaacgggaaaactatgcactacatctttcctcacgcaaggataaaaataacaagagactcaaaggatcacacagtttcaggtaatggattaggaattagaattgtgggtggtaaagaaatcccgggacatagtggagaaattggagcctatattgccaagattcttcctgggggaagtgcggaacagacggggaagcttatggaagggatgcaagtattggaatggaatggaattcccttgacttctaaaacatatgaagaagttcagagtatcattagtcagcaaagtggggaagcagaaatatgtgtaagactggacctcaatatgctatcagattctgaaaattcccagcatctggaacttcatgagccaccaaaagctgtggataaggcgaaatccccaggggttgatcctaagcagttggcagcagaactccagaaggtttcactacagcagtcaccgctggttctgtcatcagttgttgaaaaaggatctcatgttcattcaggtcctacatcagcaggatccagttccgttcccagccctgggcaaccagggtccccctcagtgagcaaaaagaagcacggcagcagcaagcctaccgatggaacaaaggttgtctctcatccaattacaggagaaattcagcttcaaattaactatgatcttggaaatctcataatacatattctccaagcaagaaatcttgttcctcgagacaacaatggttattctgacccttttgtgaaagtgtaccttcttccagggagaggtcaagtcatggttgtccagaatgcaagtgctgagtacaagagaaggactaaacatgtccagaaaagtcttaatcctgagtggaatcaaacagtaatttataaaagtatttccatggaacagctcaagaagaaaacactggaggtgacagtttgggattatgatagattttcatccaacgacttccttggggaggtattgattgatttatctagcacatctcacctcgataacactccaaggtggtatcctctcaaagaacagactgaaagcattgatcatggcaagtctcattccagtcagagcagccagcagtccccaaagccatctgttatcaaaagcagaagccatggtatcttccctgacccatcaaaggacatgcaggttcccaccattgagaaatcccatagtagtcctggtagctcaaaatcatcatcagaaggccatctccgttctcatggaccatctcgcagtcaaagcaaaaccagcgtcactcagacccacctggaagatgcaggggctgccatagctgctgccgaagctgccgtgcaacaactccgcattcaaccaagtaaaagacgcaaataaattcctcagcatggcagcttaatgttcatctgttgcctttctttcctgctgtcctttcctgtttgctttcagttttcaacatcctctgctcaccctgttctctgtccctttgtctgtgtaagaacgatataaatacattaatatgctctttcttatttagattttttttatttacatagactgaaataaaactggctgtttctcctttgtttccaccatccatccaacctggctcatagcatttgatacagtgtctgtgatgtttggaagcaaagcaatgttgtgtgtcctttttgtttgcgcttaaatatcttttagaatacagaaattataagcacaagtggctgccagttttccaggacttataccaaaaaaaaaaaagtgcacacatataagtatttagagcagatttgcaattagattcttgtatctgaaaacactcaaaaagtctaggcagaagataatgcaaccaacagtcaacttctagaaccttggaggaaaagccatttcaagacagtgctttaaaacactaacaaattttgcttctgaaatatggtagctttccatgtgcaaaaaattgtagtcttctgaaaaatctgtgaagaaaatcttatttcttacattctcaaaaaactacattaaattaatatatgtataagcatatgtgataaggcaatgcaacctcactgaggagcacaattgggtccattctgttggatcacactttgtatgtgatgacagattttacagatattttttctaaccattggaaatcaagatatactatgtctggtagctataagtcaatcaaagtataacaattgacctatcttaactgctgtattttcatttcatttgtgaaaatttagtcgattgatataattatataaaaacttaatatgtgcaaatatttcacaaatgtaggtaccctgttacttctaaaaggcattagccaggcaatggagatagatcattgttctctccatctccctagtcatcattttcaaagaaacagccagttttaaacccctttagtgctgtgcatgtggtgtcattttggcatttgaaaacacaacctatttaaatagagcaaaagagcacttctgtttgcatgaataacatttaagctggttccatctgaggatacatactctgggtttccatttcacccacactgccacagcagcacataaaagcggtcagtctaatcatgccaggaagcagcacagacacagcatagcaggagtcctccccattcaaagaactcagtctgataatctgcctccaccagccaatggcaaccaagaccaaagccagctagccctcaggaaggtgatgtctgatggaccagtcaagccagaaggaggtgagcagaaaggccctgttcaaagcacacagcaagaacatccccaaatttaaagctctcatctttaatttttagagattgtctgataaaatatgtttatccactttttaatgtgcttttgtgggcatggcatttcaggacttcatcatcaccatgtaagtcccaagatcagtcccgtaatatattgactacagtgatttgtatttttctatgcactgggcatcttttgacttttgttgggaaatagattaacaatattcatattgcagaatggaatgcatgctactaacctaatctgttcaagcatgactataaatatgtttcattgtgataaaagtttaaattgctcacagttcaagttagcctaccagttggaatgtggatcagtgttttttgcctattatttcaagtgtaacttttaaaaatttagtggattttgaaaattcttagaggaaagtaaaggaaaaattgttaatgcactcatttacctttacatggtgaaagttctctcttgatcctacaaacagacattttccactcgtgtttccatagttgttaagtgtatcagatgtgttgggcatgtgaatctccaagtgcctgtgtaataaataaagtatctttatttcattcataaaaaaaaa

SEQ ID NO: 414475 - DNA, 3956 bp, Homo sapiens
ccctgtgcagagctagagctttcagtcttagggaagagctagaagaatcccttttaattgataaatcaagcccatagacagaggaaggtctggaggaaggtctggacctgctgccactactgtatggcttatccgcttcatcctgcagaactaagccgaccagtttgccaattagtcaaagtagaggaagaataccaattgtggcccagaattctgaagaagaaagcccactcagtcctgttggccagccaatgggaatggccagggctgcagctggacccctgccaccaatatctgcagacaccagggatcagtttggatcaagccactcattgcctgaagttcagcaacacatgagggaagaatcacggactcgaggctatgaccgtgacatagcattcatcatggatgacttccaacatgccatgtcagacagtgaagcctatcatctgcgtcgtgaggaaacagattggtttgataaacccagggagtctcgtttggaaaatggacatggtctggaccgaaaactgccggaaagattggtccactctagaccactcagtcaacatcaagagcaaattatacagatgaacgggaaaactatgcactacatctttcctcacgcaaggataaaaataacaagagactcaaaggatcacacagtttcaggtaatggattaggaattagaattgtgggtggtaaagaaatcccgggacatagtggagaaattggagcctatattgccaagattcttcctgggggaagtgcggaacagacggggaagcttatggaagggatgcaagtattggaatggaatggaattcccttgacttctaaaacatatgaagaagttcagagtatcattagtcagcaaagtggggaagcagaaatatgtgtaagactggacctcaatatgctatcagattctgaaaattcccagcatctggaacttcatgagccaccaaaagctgtggataaggcgaaatccccaggggttgatcctaagcagttggcagcagaactccagaaggtttcactacagcagtcaccgctggttctgtcatcagttgttgaaaaaggatctcatgttcattcaggtcctacatcagcaggatccagttccgttcccagccctgggcaaccagggtccccctcagtgagcaaaaagaagcacggcagcagcaagcctaccgatggaacaaaggttgtctctcatccaattacaggagaaattcagcttcaaattaactatgatcttggaaatctcataatacatattctccaagcaagaaatcttgttcctcgagacaacaatggttattctgacccttttgtgaaagtgtaccttcttccagggagaggtcaagtcatggttgtccagaatgcaagtgctgagtacaagagaaggactaaacatgtccagaaaagtcttaatcctgagtggaatcaaacagtaatttataaaagtatttccatggaacagctcaagaagaaaacactggaggtgacagtttgggattatgatagattttcatccaacgacttccttggggaggtattgattgatttatctagcacatctcacctcgataacactccaaggtggtatcctctcaaagaacagactgaaagcattgatcatggcaagtctcattccagtcagagcagccagcagtccccaaagccatctgttatcaaaagcagaagccatggtatcttccctgacccatcaaaggacatgcaggttcccaccattgagaaatcccatagtagtcctggtagctcaaaatcatcatcagaaggccatctccgttctcatggaccatctcgcagtcaaagcaaaaccagcgtcactcagacccacctggaagatgcaggggctgccatagctgctgccgaagctgccgtgcaacaactccgcattcaaccaagtaaaagacgcaaataaattcctcagcatggcagcttaatgttcatctgttgcctttctttcctgctgtcctttcctgtttgctttcagttttcaacatcctctgctcaccctgttctctgtccctttgtctgtgtaagaacgatataaatacattaatatgctctttcttatttagattttttttatttacatagactgaaataaaactggctgtttctcctttgtttccaccatccatccaacctggctcatagcatttgatacagtgtctgtgatgtttggaagcaaagcaatgttgtgtgtcctttttgtttgcgcttaaatatcttttagaatacagaaattataagcacaagtggctgccagttttccaggacttataccaaaaaaaaaaaagtgcacacatataagtatttagagcagatttgcaattagattcttgtatctgaaaacactcaaaaagtctaggcagaagataatgcaaccaacagtcaacttctagaaccttggaggaaaagccatttcaagacagtgctttaaaacactaacaaattttgcttctgaaatatggtagctttccatgtgcaaaaaattgtagtcttctgaaaaatctgtgaagaaaatcttatttcttacattctcaaaaaactacattaaattaatatatgtataagcatatgtgataaggcaatgcaacctcactgaggagcacaattgggtccattctgttggatcacactttgtatgtgatgacagattttacagatattttttctaaccattggaaatcaagatatactatgtctggtagctataagtcaatcaaagtataacaattgacctatcttaactgctgtattttcatttcatttgtgaaaatttagtcgattgatataattatataaaaacttaatatgtgcaaatatttcacaaatgtaggtaccctgttacttctaaaaggcattagccaggcaatggagatagatcattgttctctccatctccctagtcatcattttcaaagaaacagccagttttaaacccctttagtgctgtgcatgtggtgtcattttggcatttgaaaacacaacctatttaaatagagcaaaagagcacttctgtttgcatgaataacatttaagctggttccatctgaggatacatactctgggtttccatttcacccacactgccacagcagcacataaaagcggtcagtctaatcatgccaggaagcagcacagacacagcatagcaggagtcctccccattcaaagaactcagtctgataatctgcctccaccagccaatggcaaccaagaccaaagccagctagccctcaggaaggtgatgtctgatggaccagtcaagccagaaggaggtgagcagaaaggccctgttcaaagcacacagcaagaacatccccaaatttaaagctctcatctttaatttttagagattgtctgataaaatatgtttatccactttttaatgtgcttttgtgggcatggcatttcaggacttcatcatcaccatgtaagtcccaagatcagtcccgtaatatattgactacagtgatttgtatttttctatgcactgggcatcttttgacttttgttgggaaatagattaacaatattcatattgcagaatggaatgcatgctactaacctaatctgttcaagcatgactataaatatgtttcattgtgataaaagtttaaattgctcacagttcaagttagcctaccagttggaatgtggatcagtgttttttgcctattatttcaagtgtaacttttaaaaatttagtggattttgaaaattcttagaggaaagtaaaggaaaaattgttaatgcactcatttacctttacatggtgaaagttctctcttgatcctacaaacagacattttccactcgtgtttccatagttgttaagtgtatcagatgtgttgggcatgtgaatctccaagtgcctgtgtaataaataaagtatctttatttcattcataaaaaaaaa

SEQ ID NO: 414476 - DNA, 3318 bp, Homo sapiens
ctgagatgtgactttgccttctgccatgattgtgaggctttcccagccacgtggaactgtaatggattaggaattagaattgtgggtggtaaagaaatcccgggacatagtggagaaattggagcctatattgccaagattcttcctgggggaagtgcggaacagacggggaagcttatggaagggatgcaagtattggaatggaatggaattcccttgacttctaaaacatatgaagaagttcagagtatcattagtcagcaaagtggggaagcagaaatatgtgtaagactggacctcaatatgctatcagattctgaaaattcccagcatctggaacttcatgagccaccaaaagctgtggataaggcgaaatccccaggggttgatcctaagcagttggcagcagaactccagaaggtttcactacagcagtcaccgctggttctgtcatcagttgttgaaaaaggatctcatgttcattcaggtcctacatcagcaggatccagttccgttcccagccctgggcaaccagggtccccctcagtgagcaaaaagaagcacggcagcagcaagcctaccgatggaacaaaggttgtctctcatccaattacaggagaaattcagcttcaaattaactatgatcttggaaatctcataatacatattctccaagcaagaaatcttgttcctcgagacaacaatggttattctgacccttttgtgaaagtgtaccttcttccagggagaggtgctgagtacaagagaaggactaaacatgtccagaaaagtcttaatcctgagtggaatcaaacagtaatttataaaagtatttccatggaacagctcaagaagaaaacactggaggtgacagtttgggattatgatagattttcatccaacgacttccttggggaggtattgattgatttatctagcacatctcacctcgataacactccaaggtggtatcctctcaaagaacagactgaaagcattgatcatggcaagtctcattccagtcagagcagccagcagtccccaaagccatctgttatcaaaagcagaagccatggtatcttccctgacccatcaaaggacatgcaggttcccaccattgagaaatcccatagtagtcctggtagctcaaaatcatcatcagaaggccatctccgttctcatggaccatctcgcagtcaaagcaaaaccagcgtcactcagacccacctggaagatgcaggggctgccatagctgctgccgaagctgccgtgcaacaactccgcattcaaccaagtaaaagacgcaaataaattcctcagcatggcagcttaatgttcatctgttgcctttctttcctgctgtcctttcctgtttgctttcagttttcaacatcctctgctcaccctgttctctgtccctttgtctgtgtaagaacgatataaatacattaatatgctctttcttatttagattttttttatttacatagactgaaataaaactggctgtttctcctttgtttccaccatccatccaacctggctcatagcatttgatacagtgtctgtgatgtttggaagcaaagcaatgttgtgtgtcctttttgtttgcgcttaaatatcttttagaatacagaaattataagcacaagtggctgccagttttccaggacttataccaaaaaaaaaaaagtgcacacatataagtatttagagcagatttgcaattagattcttgtatctgaaaacactcaaaaagtctaggcagaagataatgcaaccaacagtcaacttctagaaccttggaggaaaagccatttcaagacagtgctttaaaacactaacaaattttgcttctgaaatatggtagctttccatgtgcaaaaaattgtagtcttctgaaaaatctgtgaagaaaatcttatttcttacattctcaaaaaactacattaaattaatatatgtataagcatatgtgataaggcaatgcaacctcactgaggagcacaattgggtccattctgttggatcacactttgtatgtgatgacagattttacagatattttttctaaccattggaaatcaagatatactatgtctggtagctataagtcaatcaaagtataacaattgacctatcttaactgctgtattttcatttcatttgtgaaaatttagtcgattgatataattatataaaaacttaatatgtgcaaatatttcacaaatgtaggtaccctgttacttctaaaaggcattagccaggcaatggagatagatcattgttctctccatctccctagtcatcattttcaaagaaacagccagttttaaacccctttagtgctgtgcatgtggtgtcattttggcatttgaaaacacaacctatttaaatagagcaaaagagcacttctgtttgcatgaataacatttaagctggttccatctgaggatacatactctgggtttccatttcacccacactgccacagcagcacataaaagcggtcagtctaatcatgccaggaagcagcacagacacagcatagcaggagtcctccccattcaaagaactcagtctgataatctgcctccaccagccaatggcaaccaagaccaaagccagctagccctcaggaaggtgatgtctgatggaccagtcaagccagaaggaggtgagcagaaaggccctgttcaaagcacacagcaagaacatccccaaatttaaagctctcatctttaatttttagagattgtctgataaaatatgtttatccactttttaatgtgcttttgtgggcatggcatttcaggacttcatcatcaccatgtaagtcccaagatcagtcccgtaatatattgactacagtgatttgtatttttctatgcactgggcatcttttgacttttgttgggaaatagattaacaatattcatattgcagaatggaatgcatgctactaacctaatctgttcaagcatgactataaatatgtttcattgtgataaaagtttaaattgctcacagttcaagttagcctaccagttggaatgtggatcagtgttttttgcctattatttcaagtgtaacttttaaaaatttagtggattttgaaaattcttagaggaaagtaaaggaaaaattgttaatgcactcatttacctttacatggtgaaagttctctcttgatcctacaaacagacattttccactcgtgtttccatagttgttaagtgtatcagatgtgttgggcatgtgaatctccaagtgcctgtgtaataaataaagtatctttatttcattcataaaaaaaaa

SEQ ID NO: 414477 - DNA, 2860 bp, Homo sapiens
gagacggagtttccctcttgttgcccaggctggaaatggcgcgatctcggctcacagcaacctctgcctcccggatttaagcgattctcctgcttcagcctcccgagtagctgggattacaggcatgcaccaccatgcctggctaattttgtatttctagtagagatggggtttctccatgttggtcaggctggtcttgaactcccgacctcaggtgatccacctgccttggcctcccaaagtgctgggattacaggcgtgacgactgcacctgcagccgcctagtcctcttctccttctctttgatgattcagggcctcggcttccctcacgatattgcagaaagacacagctttcctcttcctctccaaaccacctcgaagcaggggcataattggaatatcatttggagaaagtgtcatggaagttctgcgtccacagcttataagaattgatggccggaattacaggaagaatccagtccaagaacagacctatcaacatgaagaagatgaagaggacttctatcaaggctccatggagtgtgctgatgagccctgtgatgcctacgaggtggagcagaccccacaaggattccggtctactttgagggcccccagcttgctctataagcatatagttggaaagagaggggacactaggaagaaaatagaaatggagaccaaaacttctattagcattcctaaacctggacaagacggggaaattgtaatcactggccagcatcgaaatggtgtaatttcagcccgaacacggattgatgttcttttggacacttttcgaagaaagcagcccttcactcacttccttgcctttttcctcaatgaagttgaggttcaggaaggattcctgagattccaggaggaagtactggcgaagtgctccatggatcatggggttgacagcagcattttccagaatcctaaaaagcttcatctaactattgggatgttggtgcttttgagtgaggaagagatccagcagacatgtgagatgctacagcagtgtaaagaggaattcattaatgatatttctgggggtaaacccctagaagtggagatggcagggatagaatacatgaatgatgatcctggcatggtggatgttctttacgccaaagtccatatgaaagatggctccaacaggctacaagaattagttgatcgagtgctggaacgttttcaggcatctggactaatagtgaaagagtggaatagtgtgaaactgcatgctacagttatgaatacactattcaggaaagaccccaatgctgaaggcaggtacaatctctacacagcggaaggcaaatatatcttcaaggaaagagaatcatttgatggccgaaatattttaaagttgtttgagaacttctactttggctccctaaagctgaattcaattcacatctctcagaggttcaccgtagacagctttggaaactacgcttcctgtggacaaattgacttctcctgaggtggatcttggaaagcactagaaactaaacatcttcaccaggtgctgaagaaaagtgtcttcgttttaattgccaagcagggatgtggacatttggatggtgactttcctgggtggttccccatagattcaccattgcctctaatggtgtctacacccgtcatactaccagctgagatggtggtgggcataaggagaatttgtgcctataacccttagtgtgttctggttttttttcttttaatttttaaattgtcgtaaaatactcataaaacatactgtcttcaccatttttaagtgcacagttcagtaacgttaactgttaatacattcataatgctgtgtggccgtcaccgccgtccatctccataggcttctcagcttgtaaaatggaaactgtacccattaaacagtaattcccactcctcccagcccccgcagccaccattctgctttctgtctctctggttttgactattctcagtatctcatataagtggaatcatacagtgacttgtctttttgtgactggcttatttcacttagcataatgtcctcaaggttcatccatgttgtgtcaggtgacaggatttccttcctgtattatacatataatggaatgttccgttacatgtgcgtaccacactctgttcctccatcagtgaacacttggcttgcttcctcttgactattgggagtagtgctaatacagacacgggggtgcaaatatctctttgagactctgcctttaattcctttaccacccagagttttatctttagcaaaataaccattaaagttgtttgccttttaaaaaaaaaaaaaaaaaaaaaaaaaaaaaaaaaagaaaaaaaaaaaaaaaaaaaaaaaaaaaaaaaaaaaaaaaaaaaaaaaaaaaaaggaaaaaaaaaaaaaaaagaaaaaaaaaaaagggggggggggcgcacacacacatactccgccaggggggcgcagaaaaagagagcacacaacacgctagtgtatgcaaaaggaggggcaccgcaaaaagggagaccatcacaaacacgccggcacggcggcgctcaacacacatcgccctcgcatgagaggaacgagaattacctggacagaggcagtcatagtgaaggggaaggaacaacacccaccaccgtagccggggggaagaacagaatcaggtagtcggaccgacacgccagcaacgagagggcacaccacccaacagggggcgaacaagaaagaaacgagggcgagaaatgaaggggatgagacaagaaaagcacaccgagtacgggccgggcaaggagatgcgcggccagcagataggagaacaaaacaaacagacggaggagagaaagagaggggg

SEQ ID NO: 414478 - DNA, 2017 bp, Homo sapiens
agcggaaaacccggcctggggaaatttcctatcgcacgtctgctgcagcagtctcctgtttctcctcctaccttctccatttttctagtccctgcagggcataattggaatatcatttggagaaagtgtcatggaagttctgcgtccacagcttataagaattgatggccggaattacaggaagaatccagtccaagaacagacctatcaacatgaagaagatgaagaggacttctatcaaggctccatggagtgtgctgatgagccctgtgatgcctacgaggtggagcagaccccacaaggattccggtctactttgagggcccccagcttgctctataagcatatagttggaaagagaggggacactaggaagaaaatagaaatggagaccaaaacttctattagcattcctaaacctggacaagacggggaaattgtaatcactggccagcatcgaaatggtgtaatttcagcccgaacacggattgatgttcttttggacacttttcgaagaaagcagcccttcactcacttccttgcctttttcctcaatgaagttgaggttcaggaaggattcctgagattccaggaggaagtactggcgaagtgctccatggatcatggggttgacagcagcattttccagaatcctaaaaagcttcatctaactattgggatgttggtgcttttgagtgaggaagagatccagcagacatgtgagatgctacagcagtgtaaagaggaattcattaatgatatttctgggggtaaacccctagaagtggagatggcagggatagaatacatgaatgatgatcctggcatggtggatgttctttacgccaaagtccatatgaaagatggctccaacaggctacaagaattagttgatcgagtgctggaacgttttcaggcatctggactaatagtgaaagagtggaatagtgtgaaactgcatgctacagttatgaatacactattcaggaaagaccccaatgctgaaggcaggtacaatctctacacagcggaaggcaaatatatcttcaaggaaagagaatcatttgatggccgaaatattttaaagttgtttgagaacttctactttggctccctaaagctgaattcaattcacatctctcagaggttcaccgtagacagctttggaaactacgcttcctgtggacaaattgacttctcctgaggtggatcttggaaagcactagaaactaaacatcttcaccaggtgctgaagaaaagtgtcttcgttttaattgccaagcagggatgtggacatttggatggtgactttcctgggtggttccccatagattcaccattgcctctaatggtgtctacacccgtcatactaccagctgagatggtggtgggcataaggagaatttgtgcctataacccttagtgtgttctggttttttttcttttaatttttaaattgtcgtaaaatactcataaaacatactgtcttcaccatttttaagtgcacagttcagtaacgttaactgttaatacattcataatgctgtgtggccgtcaccgccgtccatctccataggcttctcagcttgtaaaatggaaactgtacccattaaacagtaattcccactcctcccagcccccgcagccaccattctgctttctgtctctctggttttgactattctcagtatctcatataagtggaatcatacagtgacttgtctttttgtgactggcttatttcacttagcataatgtcctcaaggttcatccatgttgtgtcaggtgacaggatttccttcctgtattatacatataatggaatgttccgttacatgtgcgtaccacactctgttcctccatcagtgaacacttggcttgcttcctcttgactattgggagtagtgctaatacagacacgggggtgcaaatatctctttgagactctgcctttaattcctttaccacccagagttttatctttagcaaaataaccattaaagttgtttgcctttta

SEQ ID NO: 414479 - DNA, 2095 bp, Homo sapiens
agagaacgcgctcgcgtagaggaattccgggtcctcctcctcgccctaccttggtttacctgcagccgcctagtcctcttctccttctctttgatgattcagggcctcggcttccctcacgatattgcagaaagacacagctttcctcttcctctccaaaccacctcgaagcaggggcataattggaatatcatttggagaaagtgtcatggaagttctgcgtccacagcttataagaattgatggccggaattacaggaagaatccagtccaagaacagacctatcaacatgaagaagatgaagaggacttctatcaaggctccatggagtgtgctgatgagccctgtgatgcctacgaggtggagcagaccccacaaggattccggtctactttgagggcccccagcttgctctataagcatatagttggaaagagaggggacactaggaagaaaatagaaatggagaccaaaacttctattagcattcctaaacctggacaagacggggaaattgtaatcactggccagcatcgaaatggtgtaatttcagcccgaacacggattgatgttcttttggacacttttcgaagaaagcagcccttcactcacttccttgcctttttcctcaatgaagttgaggttcaggaaggattcctgagattccaggaggaagtactggcgaagtgctccatggatcatggggttgacagcagcattttccagaatcctaaaaagcttcatctaactattgggatgttggtgcttttgagtgaggaagagatccagcagacatgtgagatgctacagcagtgtaaagaggaattcattaatgatatttctgggggtaaacccctagaagtggagatggcagggatagaatacatgaatgatgatcctggcatggtggatgttctttacgccaaagtccatatgaaagatggctccaacaggctacaagaattagttgatcgagtgctggaacgttttcaggcatctggactaatagtgaaagagtggaatagtgtgaaactgcatgctacagttatgaatacactattcaggaaagaccccaatgctgaaggcaggtacaatctctacacagcggaaggcaaatatatcttcaaggaaagagaatcatttgatggccgaaatattttaaagttgtttgagaacttctactttggctccctaaagctgaattcaattcacatctctcagaggttcaccgtagacagctttggaaactacgcttcctgtggacaaattgacttctcctgaggtggatcttggaaagcactagaaactaaacatcttcaccaggtgctgaagaaaagtgtcttcgttttaattgccaagcagggatgtggacatttggatggtgactttcctgggtggttccccatagattcaccattgcctctaatggtgtctacacccgtcatactaccagctgagatggtggtgggcataaggagaatttgtgcctataacccttagtgtgttctggttttttttcttttaatttttaaattgtcgtaaaatactcataaaacatactgtcttcaccatttttaagtgcacagttcagtaacgttaactgttaatacattcataatgctgtgtggccgtcaccgccgtccatctccataggcttctcagcttgtaaaatggaaactgtacccattaaacagtaattcccactcctcccagcccccgcagccaccattctgctttctgtctctctggttttgactattctcagtatctcatataagtggaatcatacagtgacttgtctttttgtgactggcttatttcacttagcataatgtcctcaaggttcatccatgttgtgtcaggtgacaggatttccttcctgtattatacatataatggaatgttccgttacatgtgcgtaccacactctgttcctccatcagtgaacacttggcttgcttcctcttgactattgggagtagtgctaatacagacacgggggtgcaaatatctctttgagactctgcctttaattcctttaccacccagagttttatctttagcaaaataaccattaaagttgtttgcctttta

SEQ ID NO: 414480 - DNA, 2509 bp, Homo sapiens
agcggaaaacccggcctggggaaatttcctatcgcacgtctgctgcagcagtctcctgtttctcctcctaccttctccatttttctagtccctgcagggcataattggaatatcatttggagaaagtgtcatggaagttctgcgtccacagcttataagaattgatggccggaattacaggaagaatccagtccaagaacagacctatcaacatgaagaagatgaagaggacttctatcaaggctccatggagtgtgctgatgagccctgtgatgcctacgaggtggagcagaccccacaaggattccggtctactttgagggcccccagcttgctctataagcatatagttggaaagagaggggacactaggaagaaaatagaaatggagaccaaaacttctattagcattcctaaacctggacaagacggggaaattgtaatcactggccagcatcgaaatggtgtaatttcagcccgaacacggattgatgttcttttggacacttttcgaagaaagcagcccttcactcacttccttgcctttttcctcaatgaagttgaggttcaggaaggattcctgagattccaggaggaagtactggcgaagtgctccatggatcatggggttgacagcagcattttccagaatcctaaaaagcttcatctaactattgggatgttggtgcttttgagtgaggaagagatccagcagacatgtgagatgctacagcagtgtaaagaggaattcattaatgatatttctgggggtaaacccctagaagtggagatggcagggatagaatacatgaatgatgatcctggcatggtggatgttctttacgccaaagtccatatgaaagatggctccaacaggctacaagaattagttgatcgagtgctggaacgttttcaggcatctggactaatagtgaaagagtggaatagtgtgaaactgcatgctacagttatgaatacactattcaggaaagaccccaatgctgaaggcaggtacaatctctacacagcggaaggcaaatatatcttcaaggaaagagaatcatttgatggccgaaatattttaaagttgtttgagaacttctactttggctccctaaagctgaattcaattcacatctctcagaggttcaccgtagacagctttggaaactacgcttcctgtggacaaattgacttctcctgaggtggatcttggaaagcactagaaactaaacatcttcaccaggtgctgaagaaaagtgtcttcgttttaattgccaagcagggatgtggacatttggatggtgactttcctgggtggttccccatagattcaccattgcctctaatggtgtctacacccgtcatactaccagctgagatggtggtgggcataaggagaatttgtgcctataacccttagtgtgttctggttttttttcttttaatttttaaattgtcgtaaaatactcataaaacatactgtcttcaccatttttaagtgcacagttcagtaacgttaactgttaatacattcataatgctgtgtggccgtcaccgccgtccatctccataggcttctcagcttgtaaaatggaaactgtacccattaaacagtaattcccactcctcccagcccccgcagccaccattctgctttctgtctctctggttttgactattctcagtatctcatataagtggaatcatacagtgacttgtctttttgtgactggcttatttcacttagcataatgtcctcaaggttcatccatgttgtgtcaggtgacaggatttccttcctgtattatacatataatggaatgttccgttacatgtgcgtaccacactctgttcctccatcagtgaacacttggcttgcttcctcttgactattgggagtagtgctaatacagacacgggggtgcaaatatctctttgagactctgcctttaattcctttaccacccagagttttatctttagcaaaataaccattaaagttgtttgccttttactttgcttggtctatcattttcctaccaaagtttgtcctcttaatatttgttggattcctgttccttcaccccatccccaccctcatcttcccatgcccctgatggagttgcagtgttgcagcccttttttgtttacttttcaaggcagcagcaaaagaaactgatgatatcagcaggactgtgcagagttccctggaagaatgtcagccacaggaggccctcactcctccctcaccacggaccagcagagggaggcgggaatgctggggagccccagcctcccacccctgcctcctcacattcttcctccctccatgtcctctccttcttctccttccttattcttgccttgattctttctctctttatattctttaactgcacttctgaactctgtgttaagttgctacattgtgaggactgtgtctaacagtgagatttattattgggactgcacaaatcacttgtgaataaaatgtttaacggtgaaa

SEQ ID NO: 414481 - DNA, 1897 bp, Homo sapiens
agcggaaaacccggcctggggaaatttcctatcgcacgtctgctgcagcagtctcctgtttctcctcctaccttctccatttttctagtccctgcagggcataattggaatatcatttggagaaagtgtcatggaagttctgcgtccacagcttataagaattgatggccggaattacaggaagaatccagtccaagaacagacctatcaacatgaagaagatgaagaggacttctatcaaggctccatggagtgtgctgatgagccctgtgatgcctacgaggtggagcagaccccacaaggattccggtctactttgagggcccccagcttgctctataagcatatagttggaaagagaggggacactaggaagaaaatagaaatggagaccaaaacttctattagcattcctaaacctggacaagacggggaaattgtaatcactggccagcatcgaaatggtgtaatttcagcccgaacacggattgatgttcttttggacacttttcgaagaaagcagcccttcactcacttccttgcctttttcctcaatgaagttgaggttcaggaaggattcctgagattccaggaggaagtactggcgaagtgctccatggatcatggggttgacagcagcattttccagaatcctaaaaagcttcatctaactattgggatgttggtgcttttgagtgaggaagagatccagcagacatgtgagatgctacagcagtgtaaagaggaattcattaagctacaagaattagttgatcgagtgctggaacgttttcaggcatctggactaatagtgaaagagtggaatagtgtgaaactgcatgctacagttatgaatacactattcaggaaagaccccaatgctgaaggcaggtacaatctctacacagcggaaggcaaatatatcttcaaggaaagagaatcatttgatggccgaaatattttaaagttgtttgagaacttctactttggctccctaaagctgaattcaattcacatctctcagaggttcaccgtagacagctttggaaactacgcttcctgtggacaaattgacttctcctgaggtggatcttggaaagcactagaaactaaacatcttcaccaggtgctgaagaaaagtgtcttcgttttaattgccaagcagggatgtggacatttggatggtgactttcctgggtggttccccatagattcaccattgcctctaatggtgtctacacccgtcatactaccagctgagatggtggtgggcataaggagaatttgtgcctataacccttagtgtgttctggttttttttcttttaatttttaaattgtcgtaaaatactcataaaacatactgtcttcaccatttttaagtgcacagttcagtaacgttaactgttaatacattcataatgctgtgtggccgtcaccgccgtccatctccataggcttctcagcttgtaaaatggaaactgtacccattaaacagtaattcccactcctcccagcccccgcagccaccattctgctttctgtctctctggttttgactattctcagtatctcatataagtggaatcatacagtgacttgtctttttgtgactggcttatttcacttagcataatgtcctcaaggttcatccatgttgtgtcaggtgacaggatttccttcctgtattatacatataatggaatgttccgttacatgtgcgtaccacactctgttcctccatcagtgaacacttggcttgcttcctcttgactattgggagtagtgctaatacagacacgggggtgcaaatatctctttgagactctgcctttaattcctttaccacccagagttttatctttagcaaaataaccattaaagttgtttgcctttta

SEQ ID NO: 414482 - DNA, 1636 bp, Homo sapiens
agcggaaaacccggcctggggaaatttcctatcgcacgtctgctgcagcagtctcctgtttctcctcctaccttctccatttttctagtccctgcagggcataattggaatatcatttggagaaagtgtcatggaagttctgcgtccacagcttataagaattgatggccggaattacaggaagaatccagtccaagaacagacctatcaacatgaagaagatgaagaggacttctatcaaggctccatggagtgtgctgatgagccctgtgatgcctacgaggtggagcagaccccacaaggattccggtctactttgagggcccccagcttgctctataagcatatagttggaaagagaggggacactaggaagaaaatagaaatggagaccaaaacttctattagcattcctaaacctggacaagacggggaaattgtaatcactggccagcatcgaaatggtgtaatttcagcccgaacacggattgatgttcttttggacacttttcgaagaaagcagcccttcactcacttccttgcctttttcctcaatgaagttgaggttcaggaaggattcctgagattccaggaggaagtactggcgaagtgctccatggatcatggggttgacagcagcattttccagaatcctaaaaagcttcatctaactattgggatgttggtgcttttgagtgaggaagagatccagcagacatgtgagatgctacagcagtgtaaagaggaattcattaatgatatttctgggggtaaacccctagaagtggagatggcagggatagaatacatgaatgatgatcctggcatggtggatgttctttacgccaaagtccatatgaaagatggctccaacaggctacaagaattagttgatcgagtgctggaacgttttcaggcatctggactaatagtgaaagagtggaatagtgtgaaactgcatgctacagttatgaatacactattcaggaaagaccccaatgctgaaggcaggtacaatctctacacagcggaaggcaaatatatcttcaaggaaagagaatcatttgatggccgaaatattttaaagttgtttgagaacttctactttggctccctaaagctgaattcaattcacatctctcagaggttcaccgtagacagctttggaaactacgcttcctgtggacaaattgacttctcctgaggtggatcttggaaagcactagaaactaaacatcttcaccaggtgctgaagaaaagtgtcttcgttttaattgccaagcagggatgtggacatttggatggtgactttcctgggtggttccccatagattcaccattgcctctaatggtgtctacacccgtcatactaccagctgagatggtggtgggcataaggagaatttgtgcctataacccttagtgtgttctggttttttttcttttaatttttaaattgtcgtaaaatactcataaaacatactgtcttcaccatttttaagtgcacagttcagtaacgttaactgttaatacattcataatgctgtgtggccgtcaccgccgtccatctccataggcttctcagcttgtaaaatggaaactgtacccattaaacagtaattcccactcctcccag

SEQ ID NO: 414483 - DNA, 1082 bp, Homo sapiens
  misc_feature (36)..(36): n is a, c, g, or t
gtaccataacaaaattagacaaccaaaaaacctctntgctacgccttgtgccttgctggagtacaatgatgcaatctccgctcactgcaacctgtgcctcccgggttcaagtgattctcctgcctcagcctcccaagtagctgggattacagttgtttgagaacttctactttggctccctaaagctgaattcaattcacatctctcagaggttcaccgtagacagctttggaaactacgcttcctgtggacaaattgacttctcctgaggtggatcttggaaagcactagaaactaaacatcttcaccaggtgctgaagaaaagtgtcttcgttttaattgccaagcagggatgtggacatttggatggtgactttcctgggtggttccccatagattcaccattgcctctaatggtgtctacacccgtcatactaccagctgagatggtggtgggcataaggagaatttgtgcctataacccttagtgtgttctggttttttttcttttaatttttaaattgtcgtaaaatactcataaaacatactgtcttcaccatttttaagtgcacagttcagtaacgttaactgttaatacattcataatgctgtgtggccgtcaccgccgtccatctccataggcttctcagcttgtaaaatggaaactgtacccattaaacagtaattcccactcctcccagcccccgcagccaccattctgctttctgtctctctggttttgactattctcagtatctcatataagtggaatcatacagtgacttgtctttttgtgactggcttatttcacttagcataatgtcctcaaggttcatccatgttgtgtcaggtgacaggatttccttcctgtattatacatataatggaatgttccgttacatgtgcgtaccacactctgttcctccatcagtgaacacttggcttgcttcctcttgactattgggagtagtgctaatacagacacgggggtgcaaatatctctttgagactctgcctttaattcctttaccacccagagttttatctttagcaaaataaccattaaagttgtttgcctttta

SEQ ID NO: 414484 - DNA, 1505 bp, Homo sapiens
agcggaaaacccggcctggggaaatttcctatcgcacgtctgctgcagcagtctcctgtttctcctcctaccttctccatttttctagtccctgcagggcataattggaatatcatttggagaaagtgtcatggaagttctgcgtccacagcttataagaattgatggccggaattacaggaagaatccagtccaagaacagacctatcaacatgaagaagatgaagaggacttctatcaaggctccatggagtgtgctgatgagccctgtgatgcctacgaggtggagcagaccccacaaggattccggtctactttgagggcccccagcttgctctataagcatatagttggaaagagaggggacactaggaagaaaatagaaatggagaccaaaacttctattagcattcctaaacctggacaagacggggaaattgtaatcactggccagcatcgaaatggtgtaatttcagcccgaacacggattgatgttcttttggacacttttcgaagaaagcagcccttcactcacttccttgcctttttcctcaatgaagttgaggttcaggaaggattcctgagattccaggaggaagtactggcgaagtgctccatggatcatggggttgacagcagcattttccagaatcctaaaaagcttcatctaactattgggatgttggtgcttttgagtgaggaagagatccagcagacatgtgagatgctacagcagtgtaaagaggaattcattaatgatatttctgggggtaaacccctagaagtggagatggcagggatagaatacatgaatgatgatcctggcatggtggatgttctttacgccaaagtccatatgaaagatggctccaacaggctacaagaattagttgatcgagtgctggaacgttttcaggcatctggactaatagtgaaagagtggaatagtgtgaaactgcatgctacagttatgaatacactattcaggaaagaccccaatgctgaaggcaggtacaatctctacacagcggaaggcaaatatatcttcaaggaaagagaatcatttgatggccgaaatattttaaaggtcagtatgaagcagagtgaattggaaatcctttggcacatgtcctaaataaggcaggaaaacaagtagttctccgtatatttcttcatacttcttcatactttttctcatactttttttttttaattatctaaagggaaagagaggaaaagtagctggtcctcttaaggctttggcacttctagagtatttgaaattggtggtttgtttgtttatttgtttatctgagacagtgtctcgctctgttgctcacgctggagtgcagtggtgcaaacactgctcactggagccttgacctcctgggctcaagtggtcctgccacctctgtctcccaaagtgctggaataacaggtgtgagcctctgcaccctgcctgaaattggtgatataagaaacacttaggaaaaaaaaaaaaaaag

SEQ ID NO: 414485 - DNA, 1661 bp, Homo sapiens
agagaacgcgctcgcgtagaggaattccgggtcctcctcctcgccctaccttggtttacctgcagccgcctagtcctcttctccttctctttgatgattcagggcctcggcttccctcacggggcataattggaatatcatttggagaaagtgtcatggaagttctgcgtccacagcttataagaattgatggccggaattacaggaagaatccagtccaagaacagacctatcaacatgaagaagatgaagaggacttctatcaaggctccatggagtgtgctgatgagccctgtgatgcctacgaggtggagcagaccccacaaggattccggtctactttgagggcccccagcttgctctataagcatatagttggaaagagaggggacactaggaagaaaatagaaatggagaccaaaacttctattagcattcctaaacctggacaagacggggaaattgtaatcactggccagcatcgaaatggtgtaatttcagcccgaacacggattgatgttcttttggacacttttcgaagaaagcagcccttcactcacttccttgcctttttcctcaatgaagttgaggttcaggaaggattcctgagattccaggaggaagtactggcgaagtgctccatggatcatggggttgacagcagcattttccagaatcctaaaaagcttcatctaactattgggatgttggtgcttttgagtgaggaagagatccagcagacatgtgagatgctacagcagtgtaaagaggaattcattaatgatatttctgggggtaaacccctagaagtggagatggcagggatagaatacatgaatgatgatcctggcatggtggatgttctttacgccaaagtccatatgaaagatggctccaacaggctacaagaattagttgatcgagtgctggaacgttttcaggcatctggactaatagtgaaagagtggaatagtgtgaaactgcatgctacagttatgaatacactattcaggaaagaccccaatgctgaaggcaggtacaatctctacacagcggaaggcaaatatatcttcaaggaaagagaatcatttgatggccgaaatattttaaagttgtttgagaacttctactttggctccctaaagctgaattcaattcacatctctcagaggttcaccgtagacagctttggaaactacgcttcctgtggacaaattgacttctcctgaggtggatcttggaaagcactagaaactaaacatcttcaccaggtgctgaagaaaagtgtcttcgttttaattgccaagcagggatgtggacatttggatggtgactttcctgggtggttccccatagattcaccattgcctctaatggtgtctacacccgtcatactaccagctgagatggtggtgggcataaggagaatttgtgcctataacccttagtgtgttctggttttttttcttttaatttttaaattgtcgtaaaatactcataaaacatactgtcttcaccatttttaagtgcacagttcagtaacgttaactgttaatacattcataatgctgtgtggccgtcaccgccgtccatctccataggcttctcagcttgtaaaatggaaactgtacccattaaacagtaattcccactcctcccag

SEQ ID NO: 414486 - DNA, 2214 bp, Homo sapiens
agcggaaaacccggcctggggaaatttcctatcgcacgtctgctgcagcagtctcctgtttctcctcctaccttctccatttttctagtccctgcagggcataattggaatatcatttggagaaagtgtcatggaagttctgcgtccacagcttataagaattgatggccggaattacaggaagaatccagtccaagaacagacctatcaacatgaagaagatgaagaggacttctatcaaggctccatggagtgtgctgatgagccctgtgatgcctacgaggtggagcagaccccacaaggattccggtctactttgagggcccccagcttgctctataagcatatagttggaaagagaggggacactaggaagaaaatagaaatggagaccaaaacttctattagcattcctaaacctggacaagacggggaaattgtaatcactggccagcatcgaaatggtgtaatttcagcccgaacacggattgatgttcttttggacacttttcgaagaaagcagcccttcactcacttccttgcctttttcctcaatgaagttgaggttcaggaaggattcctgagattccaggaggaagtactggcgaagtgctccatggatcatggggttgacagcagcattttccagaatcctaaaaagcttcatctaactattgggatgttggtgcttttgagtgaggaagagatccagcagacatgtgagatgctacagcagtgtaaagaggaattcattaatgatatttctgggggtaaacccctagaagtggagatggcagggatagaatacatgaatgatgatcctggcatggtggatgttctttacgccaaagtccatatgaaagatggctccaacaggctacaagaattagttgatcgagtgctggaacgttttcaggcatctggactaatagtgaaagagtggaatagtgtgaaactgcatgctacagttatgaatacactattcaggaaagaccccaatgctgaaggcaggtacaatctctacacagcggaaggcaaatatatcttcaaggaaagagaatcatttgatggccgaaatattttaaagagctttgccttgttgcccaggctggagtacaatgatgcaatctccgctcactgcaacctgtgcctcccgggttcaagtgattctcctgcctcagcctcccaagtagctgggattacaggtgtctctgatgcatattctcagagcctaccaggaaaatcctagaatcgagaagggcttgggacacagagagctagtggttgtttgagaacttctactttggctccctaaagctgaattcaattcacatctctcagaggttcaccgtagacagctttggaaactacgcttcctgtggacaaattgacttctcctgaggtggatcttggaaagcactagaaactaaacatcttcaccaggtgctgaagaaaagtgtcttcgttttaattgccaagcagggatgtggacatttggatggtgactttcctgggtggttccccatagattcaccattgcctctaatggtgtctacacccgtcatactaccagctgagatggtggtgggcataaggagaatttgtgcctataacccttagtgtgttctggttttttttcttttaatttttaaattgtcgtaaaatactcataaaacatactgtcttcaccatttttaagtgcacagttcagtaacgttaactgttaatacattcataatgctgtgtggccgtcaccgccgtccatctccataggcttctcagcttgtaaaatggaaactgtacccattaaacagtaattcccactcctcccagcccccgcagccaccattctgctttctgtctctctggttttgactattctcagtatctcatataagtggaatcatacagtgacttgtctttttgtgactggcttatttcacttagcataatgtcctcaaggttcatccatgttgtgtcaggtgacaggatttccttcctgtattatacatataatggaatgttccgttacatgtgcgtaccacactctgttcctccatcagtgaacacttggcttgcttcctcttgactattgggagtagtgctaatacagacacgggggtgcaaatatctctttgagactctgcctttaattcctttaccacccagagttttatctttagcaaaataaccattaaagttgtttgcctttta

SEQ ID NO: 414487 - DNA, 1931 bp, Homo sapiens
agcggaaaacccggcctggggaaatttcctatcgcacgtctgctgcagcagtctcctgtttctcctcctaccttctccatttttctagtccctgcagggcataattggaatatcatttggagaaagtgtcatggaagttctgcgtccacagcttataagaattgatggccggaattacaggaagaatccagtccaagaacagacctatcaacatgaagaagatgaagaggacttctatcaaggctccatggagtgtgctgatgagccctgtgatgcctacgaggtggagcagaccccacaaggattccggtctactttgagggcccccagcttgctctataagcatatagttggaaagagaggggacactaggaagaaaatagaaatggagaccaaaacttctattagcattcctaaacctggacaagacggggaaattgtaatcactggccagcatcgaaatggtgtaatttcagcccgaacacggattgatgttcttttggacacttttcgaagaaagcagcccttcactcacttccttgcctttttcctcaatgaagttgaggttcaggaaggattcctgagattccaggaggaagtactggcgaagtgctccatggatcatggggttgacagcagcattttccagaatcctaaaaagcttcatctaactattgggatgttggtgcttttgagtgaggaagagatccagcagacatgtgagatgctacagcagtgtaaagaggaattcattaatgatatttctgggggtaaacccctagaagtggagatggcagggatagaatacatgaatgatgatcctggcatggtggatgttctttacgccaaagtccatatgaaagatggctccaacaggctacaagaattagttgatcgagtgctggaacgttttcaggcatctggactaatagtgaaagagtggaatagtgtgaaactgcatgctacagttatgaatacactattcaggaaagaccccaatgttgtttgagaacttctactttggctccctaaagctgaattcaattcacatctctcagaggttcaccgtagacagctttggaaactacgcttcctgtggacaaattgacttctcctgaggtggatcttggaaagcactagaaactaaacatcttcaccaggtgctgaagaaaagtgtcttcgttttaattgccaagcagggatgtggacatttggatggtgactttcctgggtggttccccatagattcaccattgcctctaatggtgtctacacccgtcatactaccagctgagatggtggtgggcataaggagaatttgtgcctataacccttagtgtgttctggttttttttcttttaatttttaaattgtcgtaaaatactcataaaacatactgtcttcaccatttttaagtgcacagttcagtaacgttaactgttaatacattcataatgctgtgtggccgtcaccgccgtccatctccataggcttctcagcttgtaaaatggaaactgtacccattaaacagtaattcccactcctcccagcccccgcagccaccattctgctttctgtctctctggttttgactattctcagtatctcatataagtggaatcatacagtgacttgtctttttgtgactggcttatttcacttagcataatgtcctcaaggttcatccatgttgtgtcaggtgacaggatttccttcctgtattatacatataatggaatgttccgttacatgtgcgtaccacactctgttcctccatcagtgaacacttggcttgcttcctcttgactattgggagtagtgctaatacagacacgggggtgcaaatatctctttgagactctgcctttaattcctttaccacccagagttttatctttagcaaaataaccattaaagttgtttgcctttta

SEQ ID NO: 414488 - DNA, 1833 bp, Homo sapiens
agcggaaaacccggcctggggaaatttcctatcgcacgtctgctgcagcagtctcctgtttctcctcctaccttctccatttttctagtccctgcagggcataattggaatatcatttggagaaagtgtcatggaagttctgcgtccacagcttataagaattgatggccggaattacaggaagaatccagtccaagaacagacctatcaacatgaagaagatgaagaggacttctatcaaggctccatggagtgtgctgatgagccctgtgatgcctacgaggtggagcagaccccacaaggattccggtctactttgagggcccccagcttgctctataagcatatagttggaaagagaggggacactaggaagaaaatagaaatggagaccaaaacttctattagcattcctaaacctggacaagacggggaaattgtaatcactggccagcatcgaaatggtgtaatttcagcccgaacacggattgatgttcttttggacacttttcgaagaaagcagcccttcactcacttccttgcctttttcctcaatgaagttgaggttcaggaaggattcctgagattccaggaggaagtactggcgaagtgctccatggatcatggggttgacagcagcattttccagaatcctaaaaagcttcatctaactattgggatgttggtgcttttgagtgaggaagagatccagcagacatgtgagatgctacagcagtgtaaagaggaattcattaatgatatttctgggggtaaacccctagaagtggagatggcagggatagaatacatgaatgatgatcctggcatggtggatgttctttacgccaaagtccatatgaaagatggctccaacaggctacaagaattagttgatcgagtgctggaacgttttcaggcatctggactaatagtgaaagagtggaatagtgtgaaactgcatgctacagttatgaatacactattcaggaaagaccccaatgctgaaggcaggtacaatctctacacagcggaaggcaaatatatcttcaaggaaagagaatcatttgatggccgaaatattttaaagagctttgccttgttgcccaggctggagtacaatgatgcaatctccgctcactgcaacctgtgcctcccgggttcaagtgattctcctgcctcagcctcccaagtagctgggattacaggtgtctctgatgcatattctcagagcctaccaggaaaatcctagaatcgagaagggcttgggacacagagagctagtggttgtttgagaacttctactttggctccctaaagctgaattcaattcacatctctcagaggttcaccgtagacagctttggaaactacgcttcctgtggacaaattgacttctcctgaggtggatcttggaaagcactagaaactaaacatcttcaccaggtgctgaagaaaagtgtcttcgttttaattgccaagcagggatgtggacatttggatggtgactttcctgggtggttccccatagattcaccattgcctctaatggtgtctacacccgtcatactaccagctgagatggtggtgggcataaggagaatttgtgcctataacccttagtgtgttctggttttttttcttttaatttttaaattgtcgtaaaatactcataaaacatactgtcttcaccatttttaagtgcacagttcagtaacgttaactgttaatacattcataatgctgtgtggccgtcaccgccgtccatctccataggcttctcagcttgtaaaatggaaactgtacccattaaacagtaattcccactcctcccag

SEQ ID NO: 414489 - DNA, 341 bp, Homo sapiens
tttctttctaacactccacacacatcccattggtatcatacaaaccttgtttcttagctcattttaaaattccgattgtttatcttagtgtttctggcccttggtctttattattagattgagagaattctctcaaagtggaaacctacaattcacataggcaagaaattatgcaacatttaccttatagcataaatcaaagaaatttctcctaaatatgtttttataaaatgcctccccaaagatgatcatttactttaatgaaaataaatcattagcaaggtaaagactgaacagagttttataggccaccaataaataatttcttagtaggttactta

SEQ ID NO: 414490 - DNA, 3945 bp, Homo sapiens
aatggtcagtcaatacattataacataatacaccaaatgctagaatagaaggggaggggggcacacataatgactcactgctggaagaagggtgcatcagtgaattaaaaaatgtccctcccctcttcagcactcagcgcgcagctatttccttctgccagtctctttgaactctggatctttgcttttgctcgctgctctcctgtttttcattctccacattttctcaatcctctttctttatccttagccaccctgcttttttcctccttttttaaaaaatcggagatttcgtcttaaaatgatttgtcttccttaccttcgtccatttcaacactgaaggctgcaaagaacttcacctttcccctagtggtatttaaaaattctcaatccgtaaaaagtctttttgaaaggcaaaggaacaggacccagaccctctcgacacccttgatccgagtcagatctgcactagcaaccagaactaatatttcatttaacccaccaaaagggggaggcgagaggagccagaagcaaacttcatctgtctcagacggatccgtggttcctacatttggaggagccgcgtgtcagaaggcgtaggaccccaaggggggacaaggaggactcccgagtctcccttctccgctctccgagaccgaagaggtggactgagccgctcgggacagcggcaccggaggaggctcggagaagatgcggggctcggggccccggggtgcgggacaccggcggcccccaagcggcggcggcgacacccccatcaccccagcgtccctggccggctgctactctgcacctcgacgggctcccctctggacgtgccttctcctgtgcgccgcactccggaccctcctggccagccccagcaacgaagtgaatttattggattcacgcactgtcatgggggacctgggatggattgcttttccaaaaaatgggtgggaagagattggtgaagtggatgaaaattatgcccctatccacacataccaagtatgcaaagtgatggaacagaatcagaataactggcttttgaccagttggatctccaatgaaggtgcttccagaatcttcatagaactcaaatttaccctgcgggactgcaacagccttcctggaggactggggacctgtaaggaaacctttaatatgtattactttgagtcagatgatcagaatgggagaaacatcaaggaaaaccaatacatcaaaattgataccattgctgccgatgaaagctttacagaacttgatcttggtgaccgtgttatgaaactgaatacagaggtcagagatgtaggacctctaagcaaaaagggattttatcttgcttttcaagatgttggtgcttgcattgctctggtttctgtgcgtgtatactataaaaaatgcccttctgtggtacgacacttggctgtcttccctgacaccatcactggagctgattcttcccaattgctcgaagtgtcaggctcctgtgtcaaccattctgtgaccgatgaacctcccaaaatgcactgcagcgccgaaggggagtggctggtgcccatcgggaaatgcatgtgcaaggcaggatatgaagagaaaaatggcacctgtcaagtgtgcagacctgggttcttcaaagcctcacctcacatccagagctgcggcaaatgtccacctcacagttatacccatgaggaagcttcaacctcttgtgtctgtgaaaaggattatttcaggagagagtctgatccacccacaatggcatgcacaagacccccctctgctcctcggaatgccatctcaaatgttaatgaaactagtgtctttctggaatggattccgcctgctgacactggtggaaggaaagacgtgtcatattatattgcatgcaagaagtgcaactcccatgcaggtgtgtgtgaggagtgtggcggtcatgtcaggtaccttccccggcaaagcggcctgaaaaacacctctgtcatgatggtggatctactcgctcacacaaactatacctttgagattgaggcagtgaatggagtgtccgacttgagcccaggagcccggcagtatgtgtctgtaaatgtaaccacaaatcaagcagctccatctccagtcaccaatgtgaaaaaagggaaaattgcaaaaaacagcatctctttgtcttggcaagaaccagatcgtcccaatggaatcatcctagagtatgaaatcaagcattttgaaaaggaccaagagaccagctacacgattatcaaatctaaagagacaactattactgcagagggcttgaaaccagcttcagtttatgtcttccaaattcgagcacgtacagcagcaggctatggtgtcttcagtcgaagatttgagtttgaaaccaccccagtgtttgcagcatccagcgatcaaagccagattcctgtaattgctgtgtctgtgacagtaggagtcattttgttggcagtggttatcggcgtcctcctcagtggaaggcggtgtggctacagcaaagcaaaacaagatccagaagaggaaaagatgcattttcataatgggcacattaaactgccaggagtaagaacttacattgatccacatacctatgaggatcccaatcaagctgtccacgaatttgccaaggagatagaagcatcatgtatcaccattgagagagttattggagcaggtgaatttggtgaagtttgtagtggacgtttgaaactaccaggaaaaagagaattacctgtggctatcaaaacccttaaagtaggctatactgaaaagcaacgcagagatttcctaggtgaagcaagtatcatgggacagtttgatcatcctaacatcatccatttagaaggtgtggtgaccaaaagtaaaccagtgatgatcgtgacagagtatatggagaatggctctttagatacatttttgaagaaaaacgatgggcagttcactgtgattcagcttgttggcatgctgagaggtatctctgcaggaatgaagtacctttctgacatgggctatgtgcatagagatcttgctgccagaaacatcttaatcaacagtaaccttgtgtgcaaagtgtctgactttggactttcccgggtactggaagatgatcccgaggcagcctacaccacaaggggaggaaaaattccaatcagatggactgccccagaagcaatagctttccgaaagtttacttctgccagtgatgtctggagttatggaatagtaatgtgggaagttgtgtcttatggagagagaccctactgggagatgaccaatcaagatgtgattaaagcggtagaggaaggctatcgtctgccaagccccatggattgtcctgctgctctctatcagttaatgctggattgctggcagaaagagcgaaatagcaggcccaagtttgatgaaatagtcaacatgttggacaagctgatacgtaacccaagtagtctgaagacgctggttaatgcatcctgcagagtatctaatttattggcagaacatagcccactaggatctggggcctacagatcagtaggtgaatggctagaggcaatcaagatgggccggtatacagagattttcatggaaaatggatacagttcaatggacgctgtggctcaggtgaccttggaggatttgagacggcttggagtgactcttgtcggtcaccagaagaagatcatgaacagccttcaagaaatgaaggtgcagctggtaaacggaatggtgccattgtaacttcatgtaaatgtcgcttcttcaagtgaatgattctgcactttgtaaacagcactgagatttattttaacaaaaaaagggggaaaagggaaaacagtgatttctaaaccttagaaaacatttgcctcagccacagaatttgtaatcatggttttactgaagtatccagttcttagtccttagtct

SEQ ID NO: 414491 - DNA, 4011 bp, Homo sapiens
  misc_feature (2558)..(2558): n is a, c, g, or t
aatggtcagtcaatacattataacataatacaccaaatgctagaatagaaggggaggggggcacacataatgactcactgctggaagaagggtgcatcagtgaattaaaaaatgtccctcccctcttcagcactcagcgcgcagctatttccttctgccagtctctttgaactctggatctttgcttttgctcgctgctctcctgtttttcattctccacattttctcaatcctctttctttatccttagccaccctgcttttttcctccttttttaaaaaatcggagatttcgtcttaaaatgatttgtcttccttaccttcgtccatttcaacactgaaggctgcaaagaacttcacctttcccctagtggtatttaaaaattctcaatccgtaaaaagtctttttgaaaggcaaaggaacaggacccagaccctctcgacacccttgatccgagtcagatctgcactagcaaccagaactaatatttcatttaacccaccaaaagggggaggcgagaggagccagaagcaaacttcatctgtctcagacggatccgtggttcctacatttggaggagccgcgtgtcagaaggcgtaggaccccaaggggggacaaggaggactcccgagtctcccttctccgctctccgagaccgaagaggtggactgagccgctcgggacagcggcaccggaggaggctcggagaagatgcggggctcggggccccggggtgcgggacaccggcggcccccaagcggcggcggcgacacccccatcaccccagcgtccctggccggctgctactctgcacctcgacgggctcccctctggacgtgccttctcctgtgcgccgcactccggaccctcctggccagccccagcaacgaagtgaatttattggattcacgcactgtcatgggggacctgggatggattgcttttccaaaaaatgggtgggaagagattggtgaagtggatgaaaattatgcccctatccacacataccaagtatgcaaagtgatggaacagaatcagaataactggcttttgaccagttggatctccaatgaaggtgcttccagaatcttcatagaactcaaatttaccctgcgggactgcaacagccttcctggaggactggggacctgtaaggaaacctttaatatgtattactttgagtcagatgatcagaatgggagaaacatcaaggaaaaccaatacatcaaaattgataccattgctgccgatgaaagctttacagaacttgatcttggtgaccgtgttatgaaactgaatacagaggtcagagatgtaggacctctaagcaaaaagggattttatcttgcttttcaagatgttggtgcttgcattgctctggtttctgtgcgtgtatactataaaaaatgcccttctgtggtacgacacttggctgtcttccctgacaccatcactggagctgattcttcccaattgctcgaagtgtcaggctcctgtgtcaaccattctgtgaccgatgaacctcccaaaatgcactgcagcgccgaaggggagtggctggtgcccatcgggaaatgcatgtgcaaggcaggatatgaagagaaaaatggcacctgtcaagtgtgcagacctgggttcttcaaagcctcacctcacatccagagctgcggcaaatgtccacctcacagttatacccatgaggaagcttcaacctcttgtgtctgtgaaaaggattatttcaggagagagtctgatccacccacaatggcatgcacaagacccccctctgctcctcggaatgccatctcaaatgttaatgaaactagtgtctttctggaatggattccgcctgctgacactggtggaaggaaagacgtgtcatattatattgcatgcaagaagtgcaactcccatgcaggtgtgtgtgaggagtgtggcggtcatgtcaggtaccttccccggcaaagcggcctgaaaaacacctctgtcatgatggtggatctactcgctcacacaaactatacctttgagattgaggcagtgaatggagtgtccgacttgagcccaggagcccggcagtatgtgtctgtaaatgtaaccacaaatcaagcagctccatctccagtcaccaatgtgaaaaaagggaaaattgcaaaaaacagcatctctttgtcttggcaagaaccagatcgtcccaatggaatcatcctagagtatgaaatcaagcattttgaaaaggaccaagagaccagctacacgattatcaaatctaaagagacaactattactgcagagggcttgaaaccagcttcagtttatgtcttccaaattcgagcacgtacagcagcaggctatggtgtcttcagtcgaagatttgagtttgaaaccaccccagtgtttgcagcatccagcgatcaaagccagattcctgtaattgctgtgtctgtgacagtaggagtcattttgttggcagtggttatcggcgtcctcctcagtggaagttgctgcgaatgtggctgtgggagggcttcttccctgtgcgctgttgcccatccaancctaatatggcggtgtggctacagcaaagcaaaacaagatccagaagaggaaaagatgcattttcataatgggcacattaaactgccaggagtaagaacttacattgatccacatacctatgaggatcccaatcaagctgtccacgaatttgccaaggagatagaagcatcatgtatcaccattgagagagttattggagcaggtgaatttggtgaagtttgtagtggacgtttgaaactaccaggaaaaagagaattacctgtggctatcaaaacccttaaagtaggctatactgaaaagcaacgcagagatttcctaggtgaagcaagtatcatgggacagtttgatcatcctaacatcatccatttagaaggtgtggtgaccaaaagtaaaccagtgatgatcgtgacagagtatatggagaatggctctttagatacatttttgaagaaaaacgatgggcagttcactgtgattcagcttgttggcatgctgagaggtatctctgcaggaatgaagtacctttctgacatgggctatgtgcatagagatcttgctgccagaaacatcttaatcaacagtaaccttgtgtgcaaagtgtctgactttggactttcccgggtactggaagatgatcccgaggcagcctacaccacaaggggaggaaaaattccaatcagatggactgccccagaagcaatagctttccgaaagtttacttctgccagtgatgtctggagttatggaatagtaatgtgggaagttgtgtcttatggagagagaccctactgggagatgaccaatcaagatgtgattaaagcggtagaggaaggctatcgtctgccaagccccatggattgtcctgctgctctctatcagttaatgctggattgctggcagaaagagcgaaatagcaggcccaagtttgatgaaatagtcaacatgttggacaagctgatacgtaacccaagtagtctgaagacgctggttaatgcatcctgcagagtatctaatttattggcagaacatagcccactaggatctggggcctacagatcagtaggtgaatggctagaggcaatcaagatgggccggtatacagagattttcatggaaaatggatacagttcaatggacgctgtggctcaggtgaccttggaggatttgagacggcttggagtgactcttgtcggtcaccagaagaagatcatgaacagccttcaagaaatgaaggtgcagctggtaaacggaatggtgccattgtaacttcatgtaaatgtcgcttcttcaagtgaatgattctgcactttgtaaacagcactgagatttattttaacaaaaaaagggggaaaagggaaaacagtgatttctaaaccttagaaaacatttgcctcagccacagaatttgtaatcatggttttactgaagtatccagttcttagtccttagtct

SEQ ID NO: 414492 - DNA, 342 bp, Homo sapiens
tctgtaaagatttgaaatcttaaattaacagcatcatgccaattaggctgaaattctgttaaaatttttattttagaacttgaggataagcggtaaaaaaattatatttaaaaatagactttatggagatttgtttcaaagaaaaaatcttattcttacatactatattttgtagcacatgcatctgtgtgctactggagaacgtaggatcttgttactttaaaaaaattaatgtttgtagtaaataataaatgataaaatatatttttctttattgaaaaggtatattttagtgaaaatatacttggatgtttatttcttcattttgattttatattttca

SEQ ID NO: 414493 - DNA, 538 bp, Homo sapiens
ctgtaagcccagactttctagggctgatagagctggagtggacatggccccaaagggggctgtgaacaggaagtccccgggatgagacagcctcagtctctccaccctagggtacaattcctggagagccttctgtgacctctcacagccgcagacactagaggagttgaacacagtgctgaagagcaagatgctggccaagaagttactgggtctctacgggacccctgacaacatcgacatctggataggggccattgctgagccgctggtggaaaggggtcgggtggggcctctcctggcctgcctcttgggcaagcagttccagcagatccgtgatggagacaggcaagtgcgtcctcagccagggagggaagggcagggcccttctccaagaggggtgtcccaaggtcctgcgtgagcgctgactccggatctcagtgtgagtagggcttttcatggtccctgtgaccctttccttcccctgtgacagagtggggaggggccagcggccagactgtggagtgactctacttct

SEQ ID NO: 414494 - DNA, 2202 bp, Homo sapiens
  misc_feature (1342)..(1342): n is a, c, g, or t
ttgctggaaggtataaaagaccagctcctccaagcagagcaactccctggctgccgtgaaaagacaaggcactgggcagtgatgagggtccttctccatctcccagccctcctggcttccctcatcttgcttcaggctgcagcatctaccacaagagcgcagactaccagaacctctgccatctccgatactgtgagtcaggccaaggtccaagtcaacaaggccttcctggactcccgaaccaggctgaagaccgccatgagctctgagactcccaccagccgacagctctcagaatacctcaagcatgccaaaggccggacgcgcacagccatccgcaatggacaggtgtgggaggagtctttaaagagactgaggcagaaggcatccttgaccaatgtcacagatcccagcctggacttgacttcactgtctctggaggtgggctgtggtgctcctgctcccgtggtgagatgcgacccgtgcagcccttaccgcaccattacgggagactgcaataacaggaggaagcctgcgctgggcgccgccaacagggctctggcgcgctggctgcccgcggagtacgaggacgggctctccctgcccttcggctggacgccggggaagacgcgcaacggcttccctctcccgctggcccgggaggtatctaacaagattgttggctatctgaatgaggagggtgttctggaccaaaacaggtccctgctcttcatgcagtggggtcagattgtggatcatgacctggactttgcccctgacaccgagctggggagtagcgagtactccaaagcccagtgtgatgagtactgtatccagggagacaactgcttccccatcatgttcccacccaatgaccccaaggcggggactcaagggaaatgcatgcctttcttccgagctgggttcgtctgccccactccaccctacaagtccctggcccgagagcagatcaacgctctgacctccttcctggatgccagctttgtgtacagctccgagccaagcctggccagccgcctccgcaacctcagcagccccctgggcctcatggctgtcaaccaggaggtctcagaccatggactaccctacctgccctatgacagcaagaagccaagcccctgtgagttcatcaacaccactgcccgtgtgccctgcttcctggcaggagattctcgagcctcagagcatattctgctggccacatcccacaccctctttctccgcgagcataaccggctggccagagaactaaagagactcaaccctcagtgggatggagagaagctctaccaggaagcccggaaaatcctgggagccttcntgcagattatcacctttagggactacctacccattttgctaggtgaccacatgcagaagtggatacccccatatcaaggctacagtgaatctgtggatcccagaatttccaatgtcttcaccttcgccttccgctttggccacttggaggtcccctctagtatgttccgcctggatgagaattatcagccatgggggccagaaccagaactccccctccacaccctcttcttcaacacttggaggatggtcaaagatggtggaattgatcctctggtgcggggcctgctggccaagaaatccaagctgatgaaacagaataaaatgatgactggagagctgcgcaacaagcttttccagccaactcacaggatccatggctttgacctggctgccatcaacacacagcgttgccgggaccatgggcaacctgggtacaattcctggagagccttctgtgacctctcacagccgcagacactagaggagttgaacacagtgctgaagagcaagatgctggccaagaagttactgggtctctacgggacccctgacaacatcgacatctggataggggccattgctgagccgctggtggaaaggggtcgggtggggcctctcctggcctgcctcttgggcaagcagttccagcagatccgtgatggagacaggcaagtgcgtcctcagccagggagggaagggcagggcccttctccaagaggggtgtcccaaggtcctgcgtgagcgctgactccggatctcagtgtgagtagggcttttcatggtccctgtgaccctttccttcccctgtgacagagtggggaggggccagcggccagactgtggagtgactctacttct

SEQ ID NO: 414495 - DNA, 2743 bp, Homo sapiens
  misc_feature (1342)..(1342): n is a, c, g, or t
ttgctggaaggtataaaagaccagctcctccaagcagagcaactccctggctgccgtgaaaagacaaggcactgggcagtgatgagggtccttctccatctcccagccctcctggcttccctcatcttgcttcaggctgcagcatctaccacaagagcgcagactaccagaacctctgccatctccgatactgtgagtcaggccaaggtccaagtcaacaaggccttcctggactcccgaaccaggctgaagaccgccatgagctctgagactcccaccagccgacagctctcagaatacctcaagcatgccaaaggccggacgcgcacagccatccgcaatggacaggtgtgggaggagtctttaaagagactgaggcagaaggcatccttgaccaatgtcacagatcccagcctggacttgacttcactgtctctggaggtgggctgtggtgctcctgctcccgtggtgagatgcgacccgtgcagcccttaccgcaccattacgggagactgcaataacaggaggaagcctgcgctgggcgccgccaacagggctctggcgcgctggctgcccgcggagtacgaggacgggctctccctgcccttcggctggacgccggggaagacgcgcaacggcttccctctcccgctggcccgggaggtatctaacaagattgttggctatctgaatgaggagggtgttctggaccaaaacaggtccctgctcttcatgcagtggggtcagattgtggatcatgacctggactttgcccctgacaccgagctggggagtagcgagtactccaaagcccagtgtgatgagtactgtatccagggagacaactgcttccccatcatgttcccacccaatgaccccaaggcggggactcaagggaaatgcatgcctttcttccgagctgggttcgtctgccccactccaccctacaagtccctggcccgagagcagatcaacgctctgacctccttcctggatgccagctttgtgtacagctccgagccaagcctggccagccgcctccgcaacctcagcagccccctgggcctcatggctgtcaaccaggaggtctcagaccatggactaccctacctgccctatgacagcaagaagccaagcccctgtgagttcatcaacaccactgcccgtgtgccctgcttcctggcaggagattctcgagcctcagagcatattctgctggccacatcccacaccctctttctccgcgagcataaccggctggccagagaactaaagagactcaaccctcagtgggatggagagaagctctaccaggaagcccggaaaatcctgggagccttcntgcagattatcacctttagggactacctacccattttgctaggtgaccacatgcagaagtggatacccccatatcaaggctacagtgaatctgtggatcccagaatttccaatgtcttcaccttcgccttccgctttggccacttggaggtcccctctagtatgttccgcctggatgagaattatcagccatgggggccagaaccagaactccccctccacaccctcttcttcaacacttggaggatggtcaaagatggtggaattgatcctctggtgcggggcctgctggccaagaaatccaagctgatgaaacagaataaaatgatgactggagagctgcgcaacaagcttttccagccaactcacaggatccatggctttgacctggctgccatcaacacacagcgttgccgggaccatgggcaacctgggtacaattcctggagagccttctgtgacctctcacagccgcagacactagaggagttgaacacagtgctgaagagcaagatgctggccaagaagttactgggtctctacgggacccctgacaacatcgacatctggataggggccattgctgagccgctggtggaaaggggtcgggtggggcctctcctggcctgcctcttgggcaagcagttccagcagatccgtgatggagacaggttctggtgggaaaaccctggggtcttcacgaacgagcagaaggactctctacagaaaatgtccttctcacgccttgtctgtgacaacacccgcatcaccaaggtcccacgggacccattctgggccaacagctacccctatgacttcgtggattgctcagccatcgacaagctggacctgtcaccctgggcctcagtgaagaattaggggcccgcgctgcacaggaaagttccctttggtccacagggccatttcaagcaagttcaatgacctggtcccttagagctccatatcccagtcccagcccttctttgcagctgggcctctctatacccctggatgaacagcttgctcaggccccagggtggctgcctcggccctcccagctcttacactcagctccagtggcttctcctttctgtcaagacttagccccgctgagatgcccttctgctccagcttgctggatgttacctgtcctcttccctccacaagtcttggcccttaacctttatctttcttcctgtcctctcacctagattgtaagctccctgggccaggacttcagcctgcctccgagggtcccctgtggcacctagcatggtgcacagcacattagaagtgctcaaaaacatctgatgactgactaaagatgctaggcgtgacaccgttccctccaaaagcagacctcggaatcactgccaaataagtaactagacgtttacaggcc

SEQ ID NO: 414496 - DNA, 378 bp, Homo sapiens
agactagtatgggtaaggtggggaacccctacttcagaaggtgaaccccagaaggaagctgcctgggccaggggtgtgtgcatgatggcagggagctgcagccactaagccttggaagagtctttaatggcacagggaaatgccctgtataaagctcagtgggggaaaaaaaggatttagaaagaaagtatatgccagaggcaaagaaaaagactagaagaaaataaccagccaggtgcagtggtgtgcacctgtgatcctagctactcgggaggctgaggtgggatgattgcttgagcccaggtgtttgaggctgcagtgagctatgatctgtgtcactgcattccagcctgggtgacagagtgagaccccatctgt

SEQ ID NO: 414497 - DNA, 299 bp, Homo sapiens
atcccccaaaaagagtgatctaaaagagagagagagcaggaggaagctgtgatatcttttatgacctaactacataccatcacttctattgtattctactcattggaagcaagtcactaagtccagcccacattcaaggagagatgaattagggtccatctgttggagagaagaatgtcaataattttgtgatatattttaaaaccatcacacactggttttgggaggctgaaagagcaaaaggggaatgccattgtgagcccaatgtcggtacctgtggtaagtagctactactgggg

SEQ ID NO: 414498 - DNA, 265 bp, Homo sapiens
atttaaataggaattctgtccattcatttcacatgtgtatcctgggaggcgtatcctgggagtgttcagcaggtgtctgggaggtttactcgtgtccctgaagtgcatgctgctaacgggagctatgcacagagaaacacctgaatgctcaagggcaagcagacagctcctgtaacctgtgcagataacagtgtggcccaggctgttgagactgtgcacacctgggagagggcaggtaggcaggatgcagcctgctagagcagct

SEQ ID NO: 414499 - DNA, 1341 bp, Homo sapiens
  misc_feature (4)..(5): n is a, c, g, or t
  misc_feature (20)..(21): n is a, c, g, or t
  misc_feature (26)..(26): n is a, c, g, or t
  misc_feature (29)..(29): n is a, c, g, or t
  misc_feature (31)..(32): n is a, c, g, or t
  misc_feature (96)..(96): n is a, c, g, or t
  misc_feature (106)..(107): n is a, c, g, or t
  misc_feature (997)..(997): n is a, c, g, or t
  misc_feature (1000)..(1000): n is a, c, g, or t
  misc_feature (1171)..(1171): n is a, c, g, or t
catnnggggacgctctcagnncttgntcncnncccagcttccttcaaaatatctgctgttcatgaaatcctgtgcaagctcagcttggagggtgancactctacanncccaagtgcatttgggtcagtcaaagcctacaccaaatttgatgctgagcaggatgctttgaacattgaaatggccatcaagaccaaaggtgtggatgagatcaccactgtcaacattttgactaaccacagcaatgcacagagacaggatattgccttcacctaccagagaaggaccaaaaaggaacttgtatcagcacttaagtcagccttatctggccacctagatagtggctttgggcctattaaagacacctgctcagtatgatgcttctgagctaaaatcttccatgaaggggctgggaaccaacaaggactccctcattgagatcatctgctcaagaaccaaccaagagctgcaggaaattaacagagtctacaaggaaatgtacaagactgatctggagaaggacattatttcggacacatctggtgacttctgcaagctgatggttgccctggcaaagggtagaagagcagaggatggctctgtcattgattatgaactgattgaccaagatgcccgggatctctatgacgctggggtgaagaggaaaggaactgaagttcccaagtggatcagcgtcatgaccgagcggagcatgtcccacttccagaaagtatttgataggtacaagagctacagtccttatgacatgttggagagcatcaagaaagaggttaaaggagacctggaaaattctttcctgaacctggtccagtgtattcagaacaagcccctgtatttcgctgaccggctgtacgactccataatgggcatggggactcaagataaggtcctgatcagaatcatggtctcccacaatgaagtggacatgttgaaaattaggtctgaattcaagagaaagtatagcaagtccctgtactantanatccagcaagacactaagggtgctgtacctgtgtggtggagatggctgaagtccgacacagcacgagcgtccagaaatggtgctccccatgcttccagctaacaggtctagaaaacccgcttgtgactagcagtccctgtggctgttcctgtgaggatgacgttagcattncccccaacctcattttagttgcctaagcattgcctggctttcctgtctagtctctcctgtaagccaaagaaatgaacattccaaggaattggaagtgaagtctatgatgtaaacactttgcctcctgtgtactgtgtcataaacggattaataaactgaatttgtacttt

SEQ ID NO: 414500 - DNA, 1203 bp, Homo sapiens
aagactttgactggcttgtgtataggccaattgggtctgccttgagctgccgactgatcggcccttggggcatcggaatgtgggagacgggttttccccttctgagcagcgtctcactgagccagtgagcaggaagcgcgcggtaggttgggcttctccaggaggcagcggtttgactccaatggggaatgcgggatcgggcggttaaacggatggaacgaatctggaaccagtagacggacagcctaaggaaagcgctgggaccagtcgtccaatcggctctccaaaagagggaggtcttcgatttggggttgtgaggaaggggagtcggtgcctgtaatggcgtgtgagggtggatgttttatccacgatgacttctctaacgaagcctttaggcctcagtcccatacacctccttgaaagcgtaagtttgctcctgtattcctcgacttgagcatttttcccccgccccctcaccacttgaggtttggggaacaggagttgtttttttttgtttgtttgtttttaaataatactttcagaagtcgcttctttaggaagactgttaaaatgttagaacgaatgggagaaatctctatgtactgtcatggaaaggcgttcaagaaatatctccttcctgatagtgcatatttctactgacaaatatgtttgtaggtccacagaaaagttttggaaagctacacaccaaagtgtcaatcctagggacacagtaggatcgaggcagattagatctttaatgtttaaaactttgcaaggttaataatttgtgattaaaattaaataaaaaatgaagtcgattgttttgtgtttctagtcataatcacatacttacaaccccttttctgttttatgtaatccatgtgcccagtgcttttattttagtctctttctcccgggaactttcatatatttcttttctttacaccattgaagatatcctaaagtccctctttttgctgttcctttgaggatatctgactttggaataaaaaagaaacaaagagggtaatatttagggttctggggacagaagattcatccatcacctggattattccttgccttttaattagatttccttcgaagtgtgttttacatgcagtctatctccttttggtaatgcccactctgcttattccaggatcttttggagaaataaataaattttgataacattggctg

SEQ ID NO: 414501 - DNA, 331 bp, Homo sapiens
tgtctaactccattattaaagattcagatttgatatcacttgctaaaaaagtacccaaactaatttcagtaaatttggtgaagttgaaaacaaagcaaaagtttaggctttaaagtttgagcctaattcacattttacccccttcctggtttctatatccaatataagcaaaaccaaaggccagtcctttagtccttatttgtggctgaggtacaccgtggtctgtgtgcacaagctgtgatttatgttgttactattacttcccatctataacttctttaagccacattaaaaatgtgtaagaaggctatatcattctatatgggggcgg

SEQ ID NO: 414502 - DNA, 361 bp, Homo sapiens
aggattctgggggcttagagagggcagcctggagaagccagagttaagctcagaacaagaggtgcaggaagagccacagcagggaagggaagagagatcccagaggaggggcagagtgtggcaggacaagggccctgccgtacatgctatgcatgaaggaaaatcttgagactaagactcatgaaaagatccaaaataattatttcgtgtggcccctagaagactgaagagacatttgcttcgccatttgcccagggctgcctgggcaggagacaaaggaatgaaaagtccagggggaaagcaaaaatctatggcttctgaacacatgctccccggagctcgtctccacagcatcttcacc

SEQ ID NO: 414503 - DNA, 2545 bp, Homo sapiens
cacaaactgttgggcccggagtcggaagagacccgggtttgggaaggaccccagggtcaggcgtcctggtggaagggcgggcctctttctctcttgctcagcagggagtccagagccctggaggaaagccagctcagctccgcatcggcgtcggcggttgggacgcacacactctgcgtcatggagggctgaggccgatgatgaattccggagtgcctgtcaggcttgctgtgtcactcggcccgctcggcgcgccccttcccagccgcccttccgtaccggctctcgggctcttccggtctccggccgccccttacctgcaggctcttctcccgccgcggcccggcgctctccgagtcgcccctgcggactggtctcgcacagtgcctgggcaccgggcgccagacagacactggccatgacgagcggcgcaaccaggtaccggctgagctgctcgctccggggccacgagctggacgtacggggcctggtgtgctgcgcctatccgccgggagcctttgtgtccgtgtcccgagaccgcaccacccgcctctgggccccagacagtccaaacaggagctttacagaaatgcactgtatgagtggccattccaattttgtatcttgtgtatgcatcataccctcaagtgacatctaccctcatggcctaattgccaccggtggaaatgaccacaatatatgcattttctcactggacagtccaatgccactttatattctaaaaggccacaaaaatactgtttgtagtctatcatctggaaaatttgggacattacttagtggttcatgggacaccactgctaaagtctggctgaatgacaagtgcatgatgaccttgcagggtcatacagctgcagtgtgggcggtaaagatcttacctgaacagggcttaatgttgactggatcagcagacaagactgttaaactgtggaaggctggaagatgtgagaggactttttcagggcatgaagactgtgtaagaggtttggcaattttgagtgaaacagaatttctttcctgtgcaaatgatgctagtattagaaggtggcaaatcactggcgagtgtcttgaagtatattatggacatacaaattatatttatagcatatccgtttttccaaattgtagagactttgtgacaacagcagaggacagatctctgagaatctggaaacatggggaatgtgctcaaactatccgacttccagctcagtctatatggtgctgctgtgtgctcgacaatggtgacattgtggttggtgcgagtgatggcattattagagtgtttacagaatcagaagatcgaacagcaagtgctgaagaaatcaaggcttttgaaaaagaactgtctcacgcaaccattgattctaaaactggcgatttaggggacatcaatgctgagcagcttcctgggagggaacatcttaatgaacctggtactagagaaggacagactcgtctaatcagagatggggagaaagtcgaagcctatcagtggagtgttagtgaagggaggtggataaaaattggtgatgttgttggctcatctggtgctaatcagcaaacatctggaaaagttttatatgaagggaaagaatttgattatgttttctcaattgatgtcaatgaaggtggaccatcatataaattgccatataataccagtgatgacccttggttaactgcatacaacttcttacagaagaatgatttgaatcctatgtttctggatcaagtagctaaatttattattgataacacaaaaggtcaaatgttgggacttgggaatcccagcttttcagatccatttacaggtggtggtcggtatgttccgggctcttcgggatcttctaacacactacccacagcagatccttttacaggtgctggtcgttatgtaccaggttctgcaagtatgggaactaccatggccggagttgatccatttacagggaatagtgcctaccgatcagctgcatctaaaacaatgaatatttatttccctaaaaaagaggctgtcacatttgaccaagcaaaccctacacaaatattaggtaaactgaaggaacttaatggaactgcacctgaagagaagaagttaactgaggatgacttgatacttcttgagaagatactgtctctaatatgtaatagttcttcagaaaaacccacagtccagcaacttcagattttgtggaaagctattaactgtcctgaaggtaaataaacactcttcaaaaatgtaaccagaaagcaagaagttttatcttcatttctatcaatattactggtatttgtggattaaatgaaagttaacttcggtagttctaaatcactatggaaaatcttcacgaaaagggttcactacactactggaattgatgatcttgtttccgttacatgccttttgagaatctgaaggtaatatatgatccccatatatgcaccagtttgtttttttgttgttgttgtttgttttctttgtttttttgttttgttttgtttttgtttttgaaatggagtc

SEQ ID NO: 414504 - DNA, 4179 bp, Homo sapiens
cacaaactgttgggcccggagtcggaagagacccgggtttgggaaggaccccagggtcaggcgtcctggtggaagggcgggcctctttctctcttgctcagcagggagtccagagccctggaggaaagccagctcagctccgcatcggcgtcggcggttgggacgcacacactctgcgtcatggagggctgaggccgatgatgaattccggagtgcctgtcaggcttgctgtgtcactcggcccgctcggcgcgccccttcccagccgcccttccgtaccggctctcgggctcttccggtctccggccgccccttacctgcaggctcttctcccgccgcggcccggcgctctccgagtcgcccctgcggactggtctcgcacagtgcctgggcaccgggcgccagacagacactggccatgacgagcggcgcaaccaggtaccggctgagctgctcgctccggggccacgagctggacgtacggggcctggtgtgctgcgcctatccgccgggagcctttgtgtccgtgtcccgagaccgcaccacccgcctctgggccccagacagtccaaacaggagctttacagaaatgcactgtatgagtggccattccaattttgtatcttgtgtatgcatcataccctcaagtgacatctaccctcatggcctaattgccaccggtggaaatgaccacaatatatgcattttctcactggacagtccaatgccactttatattctaaaaggccacaaaaatactgtttgtagtctatcatctggaaaatttgggacattacttagtggttcatgggacaccactgctaaagtctggctgaatgacaagtgcatgatgaccttgcagggtcatacagctgcagtgtgggcggtaaagatcttacctgaacagggcttaatgttgactggatcagcagacaagactgttaaactgtggaaggctggaagatgtgagaggactttttcagggcatgaagactgtgtaagaggtttggcaattttgagtgaaacagaatttctttcctgtgcaaatgatgctagtattagaaggtggcaaatcactggcgagtgtcttgaagtatattatggacatacaaattatatttatagcatatccgtttttccaaattgtagagactttgtgacaacagcagaggacagatctctgagaatctggaaacatggggaatgtgctcaaactatccgacttccagctcagtctatatggtgctgctgtgtgctcgacaatggtgacattgtggttggtgcgagtgatggcattattagagtgtttacagaatcagaagatcgaacagcaagtgctgaagaaatcaaggcttttgaaaaagaactgtctcacgcaaccattgattctaaaactggcgatttaggggacatcaatgctgagcagcttcctgggagggaacatcttaatgaacctggtactagagaaggacagactcgtctaatcagagatggggagaaagtcgaagcctatcagtggagtgttagtgaagggaggtggataaaaattggtgatgttgttggctcatctggtgctaatcagcaaacatctggaaaagttttatatgaagggaaagaatttgattatgttttctcaattgatgtcaatgaaggtggaccatcatataaattgccatataataccagtgatgacccttggttaactgcatacaacttcttacagaagaatgatttgaatcctatgtttctggatcaagtagctaaatttattattgataacacaaaaggtcaaatgttgggacttgggaatcccagcttttcagatccatttacaggtggtggtcggtatgttccgggctcttcgggatcttctaacacactacccacagcagatccttttacaggtgctggtcgttatgtaccaggttctgcaagtatgggaactaccatggccggagttgatccatttacagggaatagtgcctaccgatcagctgcatctaaaacaatgaatatttatttccctaaaaaagaggctgtcacatttgaccaagcaaaccctacacaaatattaggtaaactgaaggaacttaatggaactgcacctgaagagaagaagttaactgaggatgacttgatacttcttgagaagatactgtctctaatatgtaatagttcttcagaaaaacccacagtccagcaacttcagattttgtggaaagctattaactgtcctgaagatattgtctttcctgcacttgacattcttcggttgtcaattaaacaccccagtgtgaatgagaacttctgcaatgaaaaggaaggggctcagttcagcagtcatcttatcaatcttctgaaccctaaaggaaagccagcaaaccagctgcttgctctcaggactttttgcaattgttttgttggccaggcaggacaatcagggagcaataagaacattcacattgctctggctacattggccctgaactattctgtttgttttcataaagaccataacattgaagggaaagcccaatgtttgtcactaattagcacaatcttggaagtagtacaagacctagaagccacttttagacttcttgtggctcttggaacacttatcagtgatgattcaaatgctgtacaattagccaagtctttaggtgttgattctcaaataaaaaagtattcctcagtatcagaaccagctaaagtaagtgaatgctgtagatttatcctaaatttgctgtagcagtggggaagagggacggatatttttaattgattagtgtttttttcctcacatttgacatgactgataacagataattaaaaaaagagaatacggtggattaagtaaaattttacatcttgtaaagtggtggggaggggaaacagaaataaaatttttgcactgctgaactgtgagattttcctgtgtaatttgggtagattttcaagagtgtgaacacaaatttaaaataagctataatcagcaacaacacaatgacaatgacatcttccccttaccttagccactaagaagacaagggctgttactcatataacttgcttttattacttaatgtacaccaaactgttgttgtcaattatcttttatttaacttctccaccttcattgctagatccttcgaacagcactgatacatttcaaggtcttgttttaggataactactttaaaattttttaaattatattaaatttataaaataatttataaattcatatattaaaacaatataagataatttcttgatttgtcatttataaatcctaaagtatatttgtttaatggcctatttttagatgaagaaaaagccagttggtaagctgtgttagtcatgtatcagttcagacagacgaggtctcaatttaactccaggcttagatccagtttcttttgcccttcactatttgaggtaacttcatttttcattctagttttgatatttggctgtttatttttgtcattttccattatttcaaagggaatttggaacatgttgaattttatcaggtggttacataagcaagagtacatcaaactgtattatttgaaagtctagaacctgtcatgtgaaattactatttttgagccctctatgtggtccaggcagaatagtagacacactgatatttaatccttaaaacccctttaaatgagggccagtattatctctgctttcagaagtagacataataggatgaatcatataacagaaaaaaaaaagtgaagccaagagggagttaactacttaaagtacatgctatgctatactttctagagagatcacagatgtgtgtgaacatcctagcaattaacacaaagaaggaaccatcacattaattacacaatttattgtgtctgaggtaacccagtttcttgagagaagcgtaactattttcaaaagtgggaaagatcttttcataaagacgttgccagaaatagcaacattctcaatactcgtggtgtaaaaaccatgaatcccctggcttaatgccaaattatagccttagaagaataattgttccccaaatgggcaagaaaggttctaattgtcaagagtaacccaagtaagaacttttggaatatcaaaggaaatgagcaaaatgtaaatagaggggatatgtactttgctgagtattaaattggaact

SEQ ID NO: 414505 - DNA, 3966 bp, Homo sapiens
ttcacatcaagaaagtaagacatttaattaaccacttcattacttttggacattgagcttggctgcaggttttatggtcactgtcatgaaagcagccttaaatatttatataaacagtgtttcaaaatcatttacattatctccctattatgatttgttaaagctggaaggattgtgtagctcacttaagttccgctccctcgtttcacagacaaggaatctgattttgagtaatatttctgcagttacgtggcttgtaagtggcacagctaggccttgcgcccaggcagtctggcaccagagtctgctcttgaccactgtactcttatgcgtctctgctgaattgagccttagttagctaagatactgccacttcaaagagtgtttttaaaattggaatgctttagtaactttcaatgttgagcatttttctgtatgaaaatgtgttatccaatgatgttttttccttagtttctggctgaatgacaagtgcatgatgaccttgcaggtacagtagttctgtgtaaatattctaaagaataattaagttgaatgattctgtggcaacttaaattgatactcattttactcacagggtcatacagctgcagtgtgggcggtaaagatcttacctgaacagggcttaatgttgactggatcagcagacaagactgttaaactgtggaaggctggaagatgtgagaggactttttcagggcatgaagactgtgtaagaggtttggcaattttgagtgaaacagaatttctttcctgtgcaaatgatgctagtattagaaggtggcaaatcactggcgagtgtcttgaagtatattatggacatacaaattatatttatagcatatccgtttttccaaattgtagagactttgtgacaacagcagaggacagatctctgagaatctggaaacatggggaatgtgctcaaactatccgacttccagctcagtctatatggtgctgctgtgtgctcgacaatggtgacattgtggttggtgcgagtgatggcattattagagtgtttacagaatcagaagatcgaacagcaagtgctgaagaaatcaaggcttttgaaaaagaactgtctcacgcaaccattgattctaaaactggcgatttaggggacatcaatgctgagcagcttcctgggagggaacatcttaatgaacctggtactagagaaggacagactcgtctaatcagagatggggagaaagtcgaagcctatcagtggagtgttagtgaagggaggtggataaaaattggtgatgttgttggctcatctggtgctaatcagcaaacatctggaaaagttttatatgaagggaaagaatttgattatgttttctcaattgatgtcaatgaaggtggaccatcatataaattgccatataataccagtgatgacccttggttaactgcatacaacttcttacagaagaatgatttgaatcctatgtttctggatcaagtagctaaatttattattgataacacaaaaggtcaaatgttgggacttgggaatcccagcttttcagatccatttacaggtggtggtcggtatgttccgggctcttcgggatcttctaacacactacccacagcagatccttttacaggtgctggtcgttatgtaccaggttctgcaagtatgggaactaccatggccggagttgatccatttacagggaatagtgcctaccgatcagctgcatctaaaacaatgaatatttatttccctaaaaaagaggctgtcacatttgaccaagcaaaccctacacaaatattaggtaaactgaaggaacttaatggaactgcacctgaagagaagaagttaactgaggatgacttgatacttcttgagaagatactgtctctaatatgtaatagttcttcagaaaaacccacagtccagcaacttcagattttgtggaaagctattaactgtcctgaagatattgtctttcctgcacttgacattcttcggttgtcaattaaacaccccagtgtgaatgagaacttctgcaatgaaaaggaaggggctcagttcagcagtcatcttatcaatcttctgaaccctaaaggaaagccagcaaaccagctgcttgctctcaggactttttgcaattgttttgttggccaggcaggacaaaaactcatgatgtcccagagggaatcactgatgtcccatgcaatagaactgaaatcagggagcaataagaacattcacattgctctggctacattggccctgaactattctgtttgttttcataaagaccataacattgaagggaaagcccaatgtttgtcactaattagcacaatcttggaagtagtacaagacctagaagccacttttagacttcttgtggctcttggaacacttatcagtgatgattcaaatgctgtacaattagccaagtctttaggtgttgattctcaaataaaaaagtattcctcagtatcagaaccagctaaagtaagtgaatgctgtagatttatcctaaatttgctgtagcagtggggaagagggacggatatttttaattgattagtgtttttttcctcacatttgacatgactgataacagataattaaaaaaagagaatacggtggattaagtaaaattttacatcttgtaaagtggtggggaggggaaacagaaataaaatttttgcactgctgaactgtgagattttcctgtgtaatttgggtagattttcaagagtgtgaacacaaatttaaaataagctataatcagcaacaacacaatgacaatgacatcttccccttaccttagccactaagaagacaagggctgttactcatataacttgcttttattacttaatgtacaccaaactgttgttgtcaattatcttttatttaacttctccaccttcattgctagatccttcgaacagcactgatacatttcaaggtcttgttttaggataactactttaaaattttttaaattatattaaatttataaaataatttataaattcatatattaaaacaatataagataatttcttgatttgtcatttataaatcctaaagtatatttgtttaatggcctatttttagatgaagaaaaagccagttggtaagctgtgttagtcatgtatcagttcagacagacgaggtctcaatttaactccaggcttagatccagtttcttttgcccttcactatttgaggtaacttcatttttcattctagttttgatatttggctgtttatttttgtcattttccattatttcaaagggaatttggaacatgttgaattttatcaggtggttacataagcaagagtacatcaaactgtattatttgaaagtctagaacctgtcatgtgaaattactatttttgagccctctatgtggtccaggcagaatagtagacacactgatatttaatccttaaaacccctttaaatgagggccagtattatctctgctttcagaagtagacataataggatgaatcatataacagaaaaaaaaaagtgaagccaagagggagttaactacttaaagtacatgctatgctatactttctagagagatcacagatgtgtgtgaacatcctagcaattaacacaaagaaggaaccatcacattaattacacaatttattgtgtctgaggtaacccagtttcttgagagaagcgtaactattttcaaaagtgggaaagatcttttcataaagacgttgccagaaatagcaacattctcaatactcgtggtgtaaaaaccatgaatcccctggcttaatgccaaattatagccttagaagaataattgttccccaaatgggcaagaaaggttctaattgtcaagagtaacccaagtaagaacttttggaatatcaaaggaaatgagcaaaatgtaaatagaggggatatgtactttgctgagtattaaattggaact

SEQ ID NO: 414506 - DNA, 1416 bp, Homo sapiens
cacaaactgttgggcccggagtcggaagagacccgggtttgggaaggaccccagggtcaggcgtcctggtggaagggcgggcctctttctctcttgctcagcagggagtccagagccctggaggaaagccagctcagctccgcatcggcgtcggcggttgggacgcacacactctgcgtcatggagggctgaggccgatgatgaattccggagtgcctgtcaggcttgctgtgtcactcggcccgctcggcgcgccccttcccagccgcccttccgtaccggctctcgggctcttccggtctccggccgccccttacctgcaggctcttctcccgccgcggcccggcgctctccgagtcgcccctgcggactggtctcgcacagtgcctgggcaccgggcgccagacagacactggccatgacgagcggcgcaaccaggtaccggctgagctgctcgctccggggccacgagctggacgtacggggcctggtgtgctgcgcctatccgccgggagcctttgtgtccgtgtcccgagaccgcaccacccgcctctgggccccagacagtccaaacaggagctttacagaaatgcactgtatgagtggccattccaattttgtatcttgtgtatgcatcataccctcaagtgacatctaccctcatggcctaattgccaccggtggaaatgaccacaatatatgcattttctcactggacagtccaatgccactttatattctaaaaggccacaaaaatactgtttgtagtctatcatctggaaaatttgggacattacttagtggttcatgggacaccactgctaaagtctggctgaatgacaagtgcatgatgaccttgcaggtacagtagttctgtgtaaatattctaaagaataattaagttgaatgattctgtggcaacttaaattgatactcattttactcacagggtcatacagctgcagtgtgggcggtaaagatcttacctgaacagggcttaatgttgactggatcagcagacaagactgttaaactgtggaaggctggaagatgtgagaggactttttcaggtaagatcagggtagacaagttttataatatcattgctttttatttgctcagattttttttctcagaagtttacaagcatgaaaatatttgaaaaacattagtatatttaagctattaatttgagttaatgtaatttttctgatgagttaatatctaatacatttaaaaagataatgaaaccctgtctctactaaatacaaaaaaattagccgggcatggtggcgcatgcatgtaatccaagctacgtgggaggttgaggcaggagaatcacttgtgcctcggaagcggaggttgcagtgagccaagattgcaccattgcactccagcctgggcaacagagcaaga

SEQ ID NO: 414507 - DNA, 429 bp, Homo sapiens
tggtgacattgtggttggtgcgaggtatttatattctagtcaatcattaaatgttatatgtctaggccttcagtaggaactagagtgtacagagataagccataaggaatttcacgtgacttgaggagactatatggacacttcaattactaaacaaaacagtagtagatattatagctttcatactaagggatgcatgatataccagtattgtactgcaattgtgcagtcaatgatgcatgatataccagtattgtactgcaattgtgcagtcaagatattgactacaaaagaagttagagaaggtagagattggtgtgggaaaactttctgtagaagaagaaatttgaactggattttgaaagattatgagtgagaaaagatacgcaaatttttgtcaaagctaagagtataagtttccttcatgag

SEQ ID NO: 414508 - DNA, 2973 bp, Homo sapiens
cacaaactgttgggcccggagtcggaagagacccgggtttgggaaggaccccagggtcaggcgtcctggtggaagggcgggcctctttctctcttgctcagcagggagtccagagccctggaggaaagccagctcagctccgcatcggcgtcggcggttgggacgcacacactctgcgtcatggagggctgaggccgatgatgaattccggagtgcctgtcaggcttgctgtgtcactcggcccgctcggcgcgccccttcccagccgcccttccgtaccggctctcgggctcttccggtctccggccgccccttacctgcaggctcttctcccgccgcggcccggcgctctccgagtcgcccctgcggactggtctcgcacagtgcctgggcaccgggcgccagacagacactggccatgacgagcggcgcaaccaggtaccggctgagctgctcgctccggggccacgagctggacgtacggggcctggtgtgctgcgcctatccgccgggagcctttgtgtccgtgtcccgagaccgcaccacccgcctctgggccccagacagtccaaacaggagctttacagaaatgcactgtatgagtggccattccaattttgtatcttgtgtatgcatcataccctcaagtgacatctaccctcatggcctaattgccaccggtggaaatgaccacaatatatgcattttctcactggacagtccaatgccactttatattctaaaaggccacaaaaatactgtttgtagtctatcatctggaaaatttgggacattacttagtggttcatgggacaccactgctaaagtctggctgaatgacaagtgcatgatgaccttgcagggtcatacagctgcagtgtgggcggtaaagatcttacctgaacagggcttaatgttgactggatcagcagacaagactgttaaactgtggaaggctggaagatgtgagaggactttttcagggcatgaagactgtgtaagaggtttggcaattttgagtgaaacagaatttctttcctgtgcaaatgatgctagtattagaaggtggcaaatcactggcgagtgtcttgaagtatattatggacatacaaattatatttatagcatatccgtttttccaaattgtagagactttgtgacaacagcagaggacagatctctgagaatctggaaacatggggaatgtgctcaaactatccgacttccagctcagtctatatggtgctgctgtgtgctcgacaatggtgacattgtggttggtgcgagtgatggcattattagagtgtttacagaatcagaagatcgaacagcaagtgctgaagaaatcaaggcttttgaaaaagaactgtctcacgcaaccattgattctaaaactggcgatttaggggacatcaatgctgagcagcttcctgggagggaacatcttaatgaacctggtactagagaaggacagactcgtctaatcagagatggggagaaagtcgaagcctatcagtggagtgttagtgaagggaggtggataaaaattggtgatgttgttggctcatctggtgctaatcagcaaacatctggaaaagttttatatgaagggaaagaatttgattatgttttctcaattgatgtcaatgaaggtggaccatcatataaattgccatataataccagtgatgacccttggttaactgcatacaacttcttacagaagaatgatttgaatcctatgtttctggatcaagtagctaaatttattattgataacacaaaaggtcaaatgttgggacttgggaatcccagcttttcagatccatttacaggtggtggtcggtatgttccgggctcttcgggatcttctaacacactacccacagcagatccttttacaggtgctggtcgttatgtaccaggttctgcaagtatgggaactaccatggccggagttgatccatttacagggaatagtgcctaccgatcagctgcatctaaaacaatgaatatttatttccctaaaaaagaggctgtcacatttgaccaagcaaaccctacacaaatattaggtaaactgaaggaacttaatggaactgcacctgaagagaagaagttaactgaggatgacttgatacttcttgagaagatactgtctctaatatgtaatagttcttcagaaaaacccacagtccagcaacttcagattttgtggaaagctattaactgtcctgaagatattgtctttcctgcacttgacattcttcggttgtcaattaaacaccccagtgtgaatgagaacttctgcaatgaaaaggaaggggctcagttcagcagtcatcttatcaatcttctgaaccctaaaggaaagccagcaaaccagctgcttgctctcaggactttttgcaattgttttgttggccaggcaggacaaaaactcatgatgtcccagagggaatcactgatgtcccatgcaatagaactgaaatcagggagcaataagaacattcacattgctctggctacattggccctgaactattctgtttgttttcataaagaccataacattgaagggaaagcccaatgtttgtcactaattagcacaatcttggaagtagtacaagacctagaagccacttttagacttcttgtggctcttggaacacttatcagtgatgattcaaatgctgtacaattagccaagtctttaggtgttgattctcaaataaaaaagtattcctcagtatcagaaccagctaaagtaagtgaatgctgtagatttatcctaaatttgctgtagcagtggggaagagggacggatatttttaattgattagtgtttttttcctcacatttgacatgactgataacagataattaaaaaaagagaatacggtggattaagtaaaattttacatcttgtaaagtggtggggaggggaaacagaaataaaatttttgcactgct

SEQ ID NO: 414509 - DNA, 4233 bp, Homo sapiens
cacaaactgttgggcccggagtcggaagagacccgggtttgggaaggaccccagggtcaggcgtcctggtggaagggcgggcctctttctctcttgctcagcagggagtccagagccctggaggaaagccagctcagctccgcatcggcgtcggcggttgggacgcacacactctgcgtcatggagggctgaggccgatgatgaattccggagtgcctgtcaggcttgctgtgtcactcggcccgctcggcgcgccccttcccagccgcccttccgtaccggctctcgggctcttccggtctccggccgccccttacctgcaggctcttctcccgccgcggcccggcgctctccgagtcgcccctgcggactggtctcgcacagtgcctgggcaccgggcgccagacagacactggccatgacgagcggcgcaaccaggtaccggctgagctgctcgctccggggccacgagctggacgtacggggcctggtgtgctgcgcctatccgccgggagcctttgtgtccgtgtcccgagaccgcaccacccgcctctgggccccagacagtccaaacaggagctttacagaaatgcactgtatgagtggccattccaattttgtatcttgtgtatgcatcataccctcaagtgacatctaccctcatggcctaattgccaccggtggaaatgaccacaatatatgcattttctcactggacagtccaatgccactttatattctaaaaggccacaaaaatactgtttgtagtctatcatctggaaaatttgggacattacttagtggttcatgggacaccactgctaaagtctggctgaatgacaagtgcatgatgaccttgcagggtcatacagctgcagtgtgggcggtaaagatcttacctgaacagggcttaatgttgactggatcagcagacaagactgttaaactgtggaaggctggaagatgtgagaggactttttcagggcatgaagactgtgtaagaggtttggcaattttgagtgaaacagaatttctttcctgtgcaaatgatgctagtattagaaggtggcaaatcactggcgagtgtcttgaagtatattatggacatacaaattatatttatagcatatccgtttttccaaattgtagagactttgtgacaacagcagaggacagatctctgagaatctggaaacatggggaatgtgctcaaactatccgacttccagctcagtctatatggtgctgctgtgtgctcgacaatggtgacattgtggttggtgcgagtgatggcattattagagtgtttacagaatcagaagatcgaacagcaagtgctgaagaaatcaaggcttttgaaaaagaactgtctcacgcaaccattgattctaaaactggcgatttaggggacatcaatgctgagcagcttcctgggagggaacatcttaatgaacctggtactagagaaggacagactcgtctaatcagagatggggagaaagtcgaagcctatcagtggagtgttagtgaagggaggtggataaaaattggtgatgttgttggctcatctggtgctaatcagcaaacatctggaaaagttttatatgaagggaaagaatttgattatgttttctcaattgatgtcaatgaaggtggaccatcatataaattgccatataataccagtgatgacccttggttaactgcatacaacttcttacagaagaatgatttgaatcctatgtttctggatcaagtagctaaatttattattgataacacaaaaggtcaaatgttgggacttgggaatcccagcttttcagatccatttacaggtggtggtcggtatgttccgggctcttcgggatcttctaacacactacccacagcagatccttttacaggtgctggtcgttatgtaccaggttctgcaagtatgggaactaccatggccggagttgatccatttacagggaatagtgcctaccgatcagctgcatctaaaacaatgaatatttatttccctaaaaaagaggctgtcacatttgaccaagcaaaccctacacaaatattaggtaaactgaaggaacttaatggaactgcacctgaagagaagaagttaactgaggatgacttgatacttcttgagaagatactgtctctaatatgtaatagttcttcagaaaaacccacagtccagcaacttcagattttgtggaaagctattaactgtcctgaagatattgtctttcctgcacttgacattcttcggttgtcaattaaacaccccagtgtgaatgagaacttctgcaatgaaaaggaaggggctcagttcagcagtcatcttatcaatcttctgaaccctaaaggaaagccagcaaaccagctgcttgctctcaggactttttgcaattgttttgttggccaggcaggacaaaaactcatgatgtcccagagggaatcactgatgtcccatgcaatagaactgaaatcagggagcaataagaacattcacattgctctggctacattggccctgaactattctgtttgttttcataaagaccataacattgaagggaaagcccaatgtttgtcactaattagcacaatcttggaagtagtacaagacctagaagccacttttagacttcttgtggctcttggaacacttatcagtgatgattcaaatgctgtacaattagccaagtctttaggtgttgattctcaaataaaaaagtattcctcagtatcagaaccagctaaagtaagtgaatgctgtagatttatcctaaatttgctgtagcagtggggaagagggacggatatttttaattgattagtgtttttttcctcacatttgacatgactgataacagataattaaaaaaagagaatacggtggattaagtaaaattttacatcttgtaaagtggtggggaggggaaacagaaataaaatttttgcactgctgaactgtgagattttcctgtgtaatttgggtagattttcaagagtgtgaacacaaatttaaaataagctataatcagcaacaacacaatgacaatgacatcttccccttaccttagccactaagaagacaagggctgttactcatataacttgcttttattacttaatgtacaccaaactgttgttgtcaattatcttttatttaacttctccaccttcattgctagatccttcgaacagcactgatacatttcaaggtcttgttttaggataactactttaaaattttttaaattatattaaatttataaaataatttataaattcatatattaaaacaatataagataatttcttgatttgtcatttataaatcctaaagtatatttgtttaatggcctatttttagatgaagaaaaagccagttggtaagctgtgttagtcatgtatcagttcagacagacgaggtctcaatttaactccaggcttagatccagtttcttttgcccttcactatttgaggtaacttcatttttcattctagttttgatatttggctgtttatttttgtcattttccattatttcaaagggaatttggaacatgttgaattttatcaggtggttacataagcaagagtacatcaaactgtattatttgaaagtctagaacctgtcatgtgaaattactatttttgagccctctatgtggtccaggcagaatagtagacacactgatatttaatccttaaaacccctttaaatgagggccagtattatctctgctttcagaagtagacataataggatgaatcatataacagaaaaaaaaaagtgaagccaagagggagttaactacttaaagtacatgctatgctatactttctagagagatcacagatgtgtgtgaacatcctagcaattaacacaaagaaggaaccatcacattaattacacaatttattgtgtctgaggtaacccagtttcttgagagaagcgtaactattttcaaaagtgggaaagatcttttcataaagacgttgccagaaatagcaacattctcaatactcgtggtgtaaaaaccatgaatcccctggcttaatgccaaattatagccttagaagaataattgttccccaaatgggcaagaaaggttctaattgtcaagagtaacccaagtaagaacttttggaatatcaaaggaaatgagcaaaatgtaaatagaggggatatgtactttgctgagtattaaattggaact

SEQ ID NO: 414510 - DNA, 1954 bp, Homo sapiens
cacaaactgttgggcccggagtcggaagagacccgggtttgggaaggaccccagggtcaggcgtcctggtggaagggcgggcctctttctctcttgctcagcagggagtccagagccctggaggaaagccagctcagctccgcatcggcgtcggcggttgggacgcacacactctgcgtcatggagggctgaggccgatgatgaattccggagtgcctgtcaggcttgctgtgtcactcggcccgctcggcgcgccccttcccagccgcccttccgtaccggctctcgggctcttccggtctccggccgccccttacctgcaggctcttctcccgccgcggcccggcgctctccgagtcgcccctgcggactggtctcgcacagtgcctgggcaccgggcgccagacagacactggccatgacgagcggcgcaaccaggtaccggctgagctgctcgctccggggccacgagctggacgtacggggcctggtgtgctgcgcctatccgccgggagcctttgtgtccgtgtcccgagaccgcaccacccgcctctgggccccagacagtccaaacaggagctttacagaaatgcactgtatgagtggccattccaattttgtatcttgtgtatgcatcataccctcaagtgacatctaccctcatggcctaattgccaccggtggaaatgaccacaatatatgcattttctcactggacagtccaatgccactttatattctaaaaggccacaaaaatactgtttgtagtctatcatctggaaaatttgggacattacttagtggttcatgggacaccactgctaaagtctggctgaatgacaagtgcatgatgaccttgcagggtcatacagctgcagtgtgggcggtaaagatcttacctgaacagggcttaatgttgactggatcagcagacaagactgttaaactgtggaaggctggaagatgtgagaggactttttcagggcatgaagactgtgtaagaggtttggcaattttgagtgaaacagaatttctttcctgtgcaaatgatgctagtattagaaggtggcaaatcactggcgagtgtcttgaagtatattatggacatacaaattatatttatagcatatccgtttttccaaattgtagagactttgtgacaacagcagaggacagatctctgagaatctggaaacatggggaatgtgctcaaactatccgacttccagctcagtctatatggtgctgctgtgtgctcgacaatggtgacattgtggttggtgcgagtgatggcattattagagtgtttacagaatcagaagatcgaacagcaagtgctgaagaaatcaaggcttttgaaaaagaactgtctcacgcaaccattgattctaaaactggcgatttaggggacatcaatgctgagcagcttcctgggagggaacatcttaatgaacctggtactagagaaggacagactcgtctaatcagagatggggagaaagtcgaagcctatcagtggagtgttagtgaagggaggtggataaaaattggtgatgttgttggctcatctggtgctaatcagcaaacatctggaaaagttttatatgaagggaaagaatttgattatgttttctcaattgatgtcaatgaaggtggaccatcatataaattgccatataataccagtgatgacccttggttaactgcatacaacttcttacagaagaatgatttgaatcctatgtttctggatcaagtagctaaatttattattgataacacaaaaggtcaaatgttgggacttgggaatcccagcttttcagatccatttacaggtaagttagtgtttatattgagtcttatgtagttccattagtgttgattgatttttttgatgttttcaaatagtcatgtgattagctttttcaataaataccaatatctacagcagggt

SEQ ID NO: 414511 - DNA, 5039 bp, Homo sapiens
ctctctctctatctctctcagaatgacaattctaggtacaacttttggcatggttttttctttacttcaagtcgtttctggagaaagtggctatgctcaaaatggagacttggaagatgcagaactggatgactactcattctcatgctatagccagttggaagtgaatggatcgcagcattcactgacctgtgcttttgaggacccagatgtcaacaccaccaatctggaatttgaaatatgtggggccctcgtggaggtaaagtgcctgaatttcaggaaactacaagagatatatttcatcgagacaaagaaattcttactgattggaaagagcaatatatgtgtgaaggttggagaaaagagtctaacctgcaaaaaaatagacctaaccactatagttaaacctgaggctccttttgacctgagtgtcatctatcgggaaggagccaatgactttgtggtgacatttaatacatcacacttgcaaaagaagtatgtaaaagttttaatgcatgatgtagcttaccgccaggaaaaggatgaaaacaaatggacgcatgtgaatttatccagcacaaagctgacactcctgcagagaaagctccaaccggcagcaatgtatgagattaaagttcgatccatccctgatcactattttaaaggcttctggagtgaatggagtccaagttattacttcagaactccagagatcaataatagctcaggggagatggatcctatcttactaaccatcagcattttgagttttttctctgtcgctctgttggtcatcttggcctgtgtgttatggaaaaaaaggattaagcctatcgtatggcccagtctccccgatcataagaagactctggaacatctttgtaagaaaccaagaaaaaatttaaatgtgagtttcaatcctgaaagtttcctggactgccagattcatagggtggatgacattcaagctagagatgaagtggaaggttttctgcaagatacgtttcctcagcaactagaagaatctgagaagcagaggcttggaggggatgtgcagagccccaactgcccatctgaggatgtagtcatcactccagaaagctttggaagagattcatccctcacatgcctggctgggaatgtcagtgcatgtgacgcccctattctctcctcttccaggtccctagactgcagggagagtggcaagaatgggcctcatgtgtaccaggacctcctgcttagccttgggactacaaacagcacgctgccccctccattttctctccaatctggaatcctgacattgaacccagttgctcagggtcagcccattcttacttccctgggatcaaatcaagaagaagcatatgtcaccatgtccagcttctaccaaaaccagtgaagtgtaagaaacccagactgaacttaccgtgagcgacaaagatgatttaaaagggaagtctagagttcctagtctccctcacagcacagagaagacaaaattagcaaaaccccactacacagtctgcaagattctgaaacattgctttgaccactcttcctgagttcagtggcactcaacatgagtcaagagcatcctgcttctaccatgtggatttggtcacaaggtttaaggtgacccaatgattcagctatttaaaaaaaaaagaggaaagaatgaaagagtaaaggaaatgattgaggagtgaggaaggcaggaagagagcatgagaggaaagaaagaaaggaaaataaaaaatgatagttgccattattaggatttaatatatatccagtgctttgcaagtgctctgcgcaccttgtctcactccatcctgacaataatcctgggaggtgtgtgcaattactacgactactctcttttttatagatcattaaattcagaactaaggagttaagtaacttgtccaagttgttcacacagtgaagggaggggccaagatatgatggctgggagtctaattgcagttccctgagccatgtgcctttctcttcactgaggactgccccattcttgagtgccaaacgtcactagtaacagggtgtgcctagataatttatgatccaaactgagtcagtttggaaagtgaaagggaaacttacatataatccctccgggacaatgagcaaaaactaggactgtccccagacaaatgtgaacatacatatcatcacttaaattaaaatggctatgagaaagaaagagggggagaaacagtcttgcgggtgtgaagtcccatgaccagccatgtcaaaagaaggtaaagaagtcaagaaaaagccatgaagcccatttgatttcatttttctgaaaataggctcaagagggaataaattagaaactcacaatttctcttgtttgttaccaagacagtgattctcttgctgctaccacccaactgcatccgtccatgatctcagaggaaactgtcgctgaccctggacatgggtacgtttgacgagtgagaggaggcatgacccctcccatgtgtatagacactaccccaacctaaattcatccctaaattgtcccaagttctccagcaatagaggctgccacaaacttcagggagaaagagttacaagtacatgcaatgagtgaactgactgtggctacaatcttgaagatatacggaagagacgtattattaatgcttgacatatatcatcttgcctttcttggtctagactgacttctaatgactaactcaaagtcaaggcaactgagtaatgtcagctcagcaaagtgcagcaaacccatctcccacaggcctccaaaccctggctgttcacagaaccacaaagggcagatgctgcacagaaaactagagaaggggtcataggttcatggttttgtttgagatttgttgctactgtttttctgttttgaattttcttctttgttctgtttttactttatttagggggactaggtgtttctgatattttagttttcttgtttgttttgttttgtgttgtctgtgaatggggttttaactgtggatgaatggaccttatctgttggcttaaaggactggtaaaatcagaccatcttattcttcaggtgaatgttttactttccaaagtgctctcctctgcaccagcagtaataaatacaatgccataatcccttaggtttgcctagtgcttttgcaattttcaaagcacttccataagcattccttccacctccttgataggcatttatggaaagcctgctacatgtcaatcatactgttaggcacaggggacctaaagacacataaaaggatggcattctgcctcataaattgcaaaacctaatgaaagtgactgcttggtaaacaaattattattatattataaaatgctataaaagagccatattgaaagtgccctgttggagacagggcaaatgccacaaaaatgatgtaaatttacatggaggaaaagtagaatctgcctggtttgtaggcagcagaagacatttttcatcagtgggcaggtgttctttaccttttgtagaaatgggagtcaagtctcaaataggaggctccacaaaatctcatgccaggtctctgataccttattcacagaagttctttgaagtatttattgttattttctttgacttatgggaaaactgggacacaggaagacaggtaaattacccaacctcacacgttaagtcagaactgggagccataattttgtatccctggtataaatagacaatctctcgaagaaatgaagagatgaccatagaaaaacatcgagatatctccagctctaaaatcctttgtttcaatgttgtttggcatatgttatctttggaatttagtgtctgagcctctgtctgttactgtagtatttaaaatgcatgtattataatcatataatcataactgctgttaattcttgattatatacctagggacaatgtgtaatgtaagattactaattggttctgcccaatctcctttcagattttattaggaaaaaaaaataaacctcctgatcggagacaatgtattaatcagaagtgtaaactgccagttctatatagcatgaaatgaaaagacagctaatttggtccaacaaacatgactgggtctagggcacccaggctgattcagctgatttcctaccagcctttgcctcttccttcaatgtggtttccatgggaatttgcttcagaaaagccaagtatgggctgttcagaggtgcacacctgcattttcttagctcttctagaggggctaagagacttggtacgggccaggaagaatatgtggcagagctcctggaaatgatgcagattaggtggcatttttgtcagctctgtggtttattgttgggactattctttaaaatatccattgttcactacagtgaagatctctgatttaaccgtgtactatccacatgcattacaaacatttcgcagagctgcttagtatataagcgtacaatgtatgtaataaccatctcatatttaattaaatggtatagaagaacaaaaaaaaaaaaacaaaaaaaaaaaaaaaaaaaaaaaaaaaaaaaaaaaaaaaaaaaaaaaaaaaaaagaaccaacacaggaggagagcacaacaaaaagctattccaggcgaagacccgacgcaacgacggtatgaaaaacgacgcggcggcactcattagaacgagggagcgcagggaccgactacaaccagaggagaagcggcgccaactcaaccacaaacagctgctccgcgccgcggcgacaacggcctccctgcggggagaaaatccgcgcaggagaagcccccccagaccaccaggtggggggggagacccataacacggggcaagcaggaccactcaacgtgctgttcgacacgacctccgacgagacaactaacacaccccgcagagagctaacggcgtcaaaacagaacgatattgacagcgccacacgaaagcatcgcgacccggcaaagaccacggacaaccgacctccagggacggctaaaaagagaacggcgcgacacgcacgcccg

SEQ ID NO: 414512 - DNA, 4980 bp, Homo sapiens
ctctctctctatctctctcagaatgacaattctaggtacaacttttggcatggttttttctttacttcaagtcgtttctggagaaagtggctatgctcaaaatggagacttggaagatgcagaactggatgactactcattctcatgctatagccagttggaagtgaatggatcgcagcattcactgacctgtgcttttgaggacccagatgtcaacaccaccaatctggaatttgaaatatgtggggccctcgtggaggtaaagtgcctgaatttcaggaaactacaagagatatatttcatcgagacaaagaaattcttactgattggaaagagcaatatatgtgtgaaggttggagaaaagagtctaacctgcaaaaaaatagacctaaccactatagttaaacctgaggctccttttgacctgagtgtcatctatcgggaaggagccaatgactttgtggtgacatttaatacatcacacttgcaaaagaagtatgtaaaagttttaatgcatgatgtagcttaccgccaggaaaaggatgaaaacaaatggacgcatgtgaatttatccagcacaaagctgacactcctgcagagaaagctccaaccggcagcaatgtatgagattaaagttcgatccatccctgatcactattttaaaggcttctggagtgaatggagtccaagttattacttcagaactccagagatcaataatagctcaggggagatggatcctatcttactaaccatcagcattttgagttttttctctgtcgctctgttggtcatcttggcctgtgtgttatggaaaaaaaggattaagcctatcgtatggcccagtctccccgatcataagaagactctggaacatctttgtaagaaaccaagaaaaaatttaaatgtgagtttcaatcctgaaagtttcctggactgccagattcatagggtggatgacattcaagctagagatgaagtggaaggttttctgcaagatacgtttcctcagcaactagaagaatctgagaagcagaggcttggaggggatgtgcagagccccaactgcccatctgaggatgtagtcatcactccagaaagctttggaagagattcatccctcacatgcctggctgggaatgtcagtgcatgtgacgcccctattctctcctcttccaggtccctagactgcagggagagtggcaagaatgggcctcatgtgtaccaggacctcctgcttagccttgggactacaaacagcacgctgccccctccattttctctccaatctggaatcctgacattgaacccagttgctcagggtcagcccattcttacttccctgggatcaaatcaagaagaagcatatgtcaccatgtccagcttctaccaaaaccagtgaagtgtaagaaacccagactgaacttaccgtgagcgacaaagatgatttaaaagggaagtctagagttcctagtctccctcacagcacagagaagacaaaattagcaaaaccccactacacagtctgcaagattctgaaacattgctttgaccactcttcctgagttcagtggcactcaacatgagtcaagagcatcctgcttctaccatgtggatttggtcacaaggtttaaggtgacccaatgattcagctatttaaaaaaaaaagaggaaagaatgaaagagtaaaggaaatgattgaggagtgaggaaggcaggaagagagcatgagaggaaagaaagaaaggtgctctgcgcaccttgtctcactccatcctgacaataatcctgggaggtgtgtgcaattactacgactactctcttttttatagatcattaaattcagaactaaggagttaagtaacttgtccaagttgttcacacagtgaagggaggggccaagatatgatggctgggagtctaattgcagttccctgagccatgtgcctttctcttcactgaggactgccccattcttgagtgccaaacgtcactagtaacagggtgtgcctagataatttatgatccaaactgagtcagtttggaaagtgaaagggaaacttacatataatccctccgggacaatgagcaaaaactaggactgtccccagacaaatgtgaacatacatatcatcacttaaattaaaatggctatgagaaagaaagagggggagaaacagtcttgcgggtgtgaagtcccatgaccagccatgtcaaaagaaggtaaagaagtcaagaaaaagccatgaagcccatttgatttcatttttctgaaaataggctcaagagggaataaattagaaactcacaatttctcttgtttgttaccaagacagtgattctcttgctgctaccacccaactgcatccgtccatgatctcagaggaaactgtcgctgaccctggacatgggtacgtttgacgagtgagaggaggcatgacccctcccatgtgtatagacactaccccaacctaaattcatccctaaattgtcccaagttctccagcaatagaggctgccacaaacttcagggagaaagagttacaagtacatgcaatgagtgaactgactgtggctacaatcttgaagatatacggaagagacgtattattaatgcttgacatatatcatcttgcctttcttggtctagactgacttctaatgactaactcaaagtcaaggcaactgagtaatgtcagctcagcaaagtgcagcaaacccatctcccacaggcctccaaaccctggctgttcacagaaccacaaagggcagatgctgcacagaaaactagagaaggggtcataggttcatggttttgtttgagatttgttgctactgtttttctgttttgaattttcttctttgttctgtttttactttatttagggggactaggtgtttctgatattttagttttcttgtttgttttgttttgtgttgtctgtgaatggggttttaactgtggatgaatggaccttatctgttggcttaaaggactggtaaaatcagaccatcttattcttcaggtgaatgttttactttccaaagtgctctcctctgcaccagcagtaataaatacaatgccataatcccttaggtttgcctagtgcttttgcaattttcaaagcacttccataagcattccttccacctccttgataggcatttatggaaagcctgctacatgtcaatcatactgttaggcacaggggacctaaagacacataaaaggatggcattctgcctcataaattgcaaaacctaatgaaagtgactgcttggtaaacaaattattattatattataaaatgctataaaagagccatattgaaagtgccctgttggagacagggcaaatgccacaaaaatgatgtaaatttacatggaggaaaagtagaatctgcctggtttgtaggcagcagaagacatttttcatcagtgggcaggtgttctttaccttttgtagaaatgggagtcaagtctcaaataggaggctccacaaaatctcatgccaggtctctgataccttattcacagaagttctttgaagtatttattgttattttctttgacttatgggaaaactgggacacaggaagacaggtaaattacccaacctcacacgttaagtcagaactgggagccataattttgtatccctggtataaatagacaatctctcgaagaaatgaagagatgaccatagaaaaacatcgagatatctccagctctaaaatcctttgtttcaatgttgtttggcatatgttatctttggaatttagtgtctgagcctctgtctgttactgtagtatttaaaatgcatgtattataatcatataatcataactgctgttaattcttgattatatacctagggacaatgtgtaatgtaagattactaattggttctgcccaatctcctttcagattttattaggaaaaaaaaataaacctcctgatcggagacaatgtattaatcagaagtgtaaactgccagttctatatagcatgaaatgaaaagacagctaatttggtccaacaaacatgactgggtctagggcacccaggctgattcagctgatttcctaccagcctttgcctcttccttcaatgtggtttccatgggaatttgcttcagaaaagccaagtatgggctgttcagaggtgcacacctgcattttcttagctcttctagaggggctaagagacttggtacgggccaggaagaatatgtggcagagctcctggaaatgatgcagattaggtggcatttttgtcagctctgtggtttattgttgggactattctttaaaatatccattgttcactacagtgaagatctctgatttaaccgtgtactatccacatgcattacaaacatttcgcagagctgcttagtatataagcgtacaatgtatgtaataaccatctcatatttaattaaatggtatagaagaacaaaaaaaaaaaaacaaaaaaaaaaaaaaaaaaaaaaaaaaaaaaaaaaaaaaaaaaaaaaaaaaaaaagaaccaacacaggaggagagcacaacaaaaagctattccaggcgaagacccgacgcaacgacggtatgaaaaacgacgcggcggcactcattagaacgagggagcgcagggaccgactacaaccagaggagaagcggcgccaactcaaccacaaacagctgctccgcgccgcggcgacaacggcctccctgcggggagaaaatccgcgcaggagaagcccccccagaccaccaggtggggggggagacccataacacggggcaagcaggaccactcaacgtgctgttcgacacgacctccgacgagacaactaacacaccccgcagagagctaacggcgtcaaaacagaacgatattgacagcgccacacgaaagcatcgcgacccggcaaagaccacggacaaccgacctccagggacggctaaaaagagaacggcgcgacacgcacgcccg

SEQ ID NO: 414513 - DNA, 2913 bp, Homo sapiens
ctctctctctatctctctcagaatgacaattctaggtacaacttttggcatggttttttctttacttcaagtcgtttctggagaaagtggctatgctcaaaatggagacttggaagatgcagaactggatgactactcattctcatgctatagccagttggaagtgaatggatcgcagcattcactgacctgtgcttttgaggacccagatgtcaacaccaccaatctggaatttgaaatatgtggggccctcgtggaggtaaagtgcctgaatttcaggaaactacaagagatatatttcatcgagacaaagaaattcttactgattggaaagagcaatatatgtgtgaaggttggagaaaagagtctaacctgcaaaaaaatagacctaaccactatagttaaacctgaggctccttttgacctgagtgtcatctatcgggaaggagccaatgactttgtggtgacatttaatacatcacacttgcaaaagaagtatgtaaaagttttaatgcatgatgtagcttaccgccaggaaaaggatgaaaacaaatggacgcatgtgaatttatccagcacaaagctgacactcctgcagagaaagctccaaccggcagcaatgtatgagattaaagttcgatccatccctgatcactattttaaaggcttctggagtgaatggagtccaagttattacttcagaactccagagatcaataatagctcaggggagatggatcctatcttactaaccatcagcattttgagttttttctctgtcgctctgttggtcatcttggcctgtgtgttatggaaaaaaaggattaagcctatcgtatggcccagtctccccgatcataagaagactctggaacatctttgtaagaaaccaagaaaaaatttaaatgtgagtttcaatcctgaaagtttcctggactgccagattcatagggtggatgacattcaagctagagatgaagtggaaggttttctgcaagatacgtttcctcagcaactagaagaatctgagaagcagaggcttggaggggatgtgcagagccccaactgcccatctgaggatgtagtcatcactccagaaagctttggaagagattcatccctcacatgcctggctgggaatgtcagtgcatgtgacgcccctattctctcctcttccaggtccctagactgcagggagagtggcaagaatgggcctcatgtgtaccaggacctcctgcttagccttgggactacaaacagcacgctgccccctccattttctctccaatctggaatcctgacattgaacccagttgctcagggtcagcccattcttacttccctgggatcaaatcaagaagaagcatatgtcaccatgtccagcttctaccaaaaccagtgaagtgtaagaaacccagactgaacttaccgtgagcgacaaagatgatttaaaagggaagtctagagttcctagtctccctcacagcacagagaagacaaaattagcaaaaccccactacacagtctgcaagattctgaaacattgctttgaccactcttcctgagttcagtggcactcaacatgagtcaagagcatcctgcttctaccatgtggatttggtcacaaggtttaaggtgacccaatgattcagctatttaaaaaaaaaagaggaaagaatgaaagagtaaaggaaatgattgaggagtgaggaaggcaggaagagagcatgagaggaaagaaagaaaggaaaataaaaaatgatagttgccattattaggatttaatatatatccagtgctttgcaagtgctctgcgcaccttgtctcactccatcctgacaataatcctgggaggtgtgtgcaattactacgactactctcttttttatagatcattaaattcagaactaaggagttaagtaacttgtccaagttgttcacacagtgaagggaggggccaagatatgatggctgggagtctaattgcagttccctgagccatgtgcctttctcttcactgaggactgccccattcttgagtgccaaacgtcactagtaacagggtgtgcctagataatttatgatccaaactgagtcagtttggaaagtgaaagggaaacttacatataatccctccgggacaatgagcaaaaactaggactgtccccagacaaatgtgaacatacatatcatcacttaaattaaaatggctatgagaaagaaagagggggagaaacagtcttgcgggtgtgaagtcccatgaccagccatgtcaaaagaaggtaaagaagtcaagaaaaagccatgaagcccatttgatttcatttttctgaaaataggctcaagagggaataaattagaaactcacaatttctcttgtttgttaccaagacagtgattctcttgctgctaccacccaactgcatccgtccatgatctcagaggaaactgtcgctgaccctggacatgggtacgtttgacgagtgagaggaggcatgacccctcccatgtgtatagacactaccccaacctaaattcatccctaaattgtcccaagttctccagcaatagaggctgccacaaacttcagggagaaagagttacaagtacatgcaatgagtgaactgactgtggctacaatcttgaagatatacggaagagacgtattattaatgcttgacatatatcatcttgcctttcttggtctagactgacttctaatgactaactcaaagtcaaggcaactgagtaatgtcagctcagcaaagtgcagcaaacccatctcccacaggcctccaaaccctggctgttcacagaaccacaaagggcagatgctgcacagggttctggttggatttcttctttgtccgggttacttatttatggggactacgggttctgaaatttaggttt

SEQ ID NO: 414514 - DNA, 4985 bp, Homo sapiens
ctctctctctatctctctcagaatgacaattctaggtacaacttttggcatggttttttctttacttcaagtcgtttctggagaaagtggctatgctcaaaatggagacttggaagatgcagaactggatgactactcattctcatgctatagccagttggaagtgaatggatcgcagcattcactgacctgtgcttttgaggacccagatgtcaacaccaccaatctggaatttgaaatatgtggggccctcgtggaggtaaagtgcctgaatttcaggaaactacaagagatatatttcatcgagacaaagaaattcttactgattggaaagagcaatatatgtgtgaaggttggagaaaagagtctaacctgcaaaaaaatagacctaaccactatagttaaacctgaggctccttttgacctgagtgtcatctatcgggaaggagccaatgactttgtggtgacatttaatacatcacacttgcaaaagaagtatgtaaaagttttaatgcatgatgtagcttaccgccaggaaaaggatgaaaacaaatggacgcatgtgaatttatccagcacaaagctgacactcctgcagagaaagctccaaccggcagcaatgtatgagattaaagttcgatccatccctgatcactattttaaaggcttctggagtgaatggagtccaagttattacttcagaactccagagatcaataatagctcaggggagatggatcctatcttactaaccatcagcattttgagttttttctctgtcgctctgttggtcatcttggcctgtgtgttatggaaaaaaaggattaagcctatcgtatggcccagtctccccgatcataagaagactctggaacatctttgtaagaaaccaagaaaaaatttaaatgtgagtttcaatcctgaaagtttcctggactgccagattcatagggtggatgacattcaagctagagatgaagtggaaggttttctgcaagatacgtttcctcagcaactagaagaatctgagaagcagaggcttggaggggatgtgcagagccccaactgcccatctgaggatgtagtcatcactccagaaagctttggaagagattcatccctcacatgcctggctgggaatgtcagtgcatgtgacgcccctattctctcctcttccaggtccctagactgcagggagagtggcaagaatgggcctcatgtgtaccaggacctcctgcttagccttgggactacaaacagcacgctgccccctccattttctctccaatctggaatcctgacattgaacccagttgctcagggtcagcccattcttacttccctgggatcaaatcaagaagaagcatatgtcaccatgtccagcttctaccaaaaccagtgaagtgtaagaaacccagactgaacttaccgtgagcgacaaagatgatttaaaagggaagtctagagttcctagtctccctcacagcacagagaagacaaaattagcaaaaccccactacacagtctgcaagattctgaaacattgctttgaccactcttcctgagttcagtggcactcaacatgagtcaagagcatcctgcttctaccatgtggatttggtcacaaggtttaaggtgacccaatgattcagctatttaaaaaaaaaagaggaaagaatgaaagagtaaaggaaatgattgaggagtgaggaaggcaggaagagagcatgagaggaaagaaagaaaggaaaataaaaaatgatagttgccattattaggatttaatatatatccagtgctttgcaagtgctctgcgcaccttgtctcactccatcctgacaataatcctgggaggtgtgtgcaattactacgactactctcttttttatagatcattaaattcagaactaaggagttaagtaacttgtccaagttgttcacacagtgaagggaggggccaagatatgatggctgggagtctaattgcagttccctgagccatgtgcctttctcttcactgaggactgccccattcttgagtgccaaacgtcactagtaacagggtgtgcctagataatttatgatccaaactgagtcagtttggaaagtgaaagggaaacttacatataatccctccgggacaatgagcaaaaactaggactgtccccagacaaatgtgaacatacatatcatcacttaaattaaaatggctatgagaaagaaagagggggagaaacagtcttgcgggtgtgaagtcccatgaccagccatgtcaaaagaaggtaaagaagtcaagaaaaagccatgaagcccatttgatttcatttttctgacaagacagtgattctcttgctgctaccacccaactgcatccgtccatgatctcagaggaaactgtcgctgaccctggacatgggtacgtttgacgagtgagaggaggcatgacccctcccatgtgtatagacactaccccaacctaaattcatccctaaattgtcccaagttctccagcaatagaggctgccacaaacttcagggagaaagagttacaagtacatgcaatgagtgaactgactgtggctacaatcttgaagatatacggaagagacgtattattaatgcttgacatatatcatcttgcctttcttggtctagactgacttctaatgactaactcaaagtcaaggcaactgagtaatgtcagctcagcaaagtgcagcaaacccatctcccacaggcctccaaaccctggctgttcacagaaccacaaagggcagatgctgcacagaaaactagagaaggggtcataggttcatggttttgtttgagatttgttgctactgtttttctgttttgaattttcttctttgttctgtttttactttatttagggggactaggtgtttctgatattttagttttcttgtttgttttgttttgtgttgtctgtgaatggggttttaactgtggatgaatggaccttatctgttggcttaaaggactggtaaaatcagaccatcttattcttcaggtgaatgttttactttccaaagtgctctcctctgcaccagcagtaataaatacaatgccataatcccttaggtttgcctagtgcttttgcaattttcaaagcacttccataagcattccttccacctccttgataggcatttatggaaagcctgctacatgtcaatcatactgttaggcacaggggacctaaagacacataaaaggatggcattctgcctcataaattgcaaaacctaatgaaagtgactgcttggtaaacaaattattattatattataaaatgctataaaagagccatattgaaagtgccctgttggagacagggcaaatgccacaaaaatgatgtaaatttacatggaggaaaagtagaatctgcctggtttgtaggcagcagaagacatttttcatcagtgggcaggtgttctttaccttttgtagaaatgggagtcaagtctcaaataggaggctccacaaaatctcatgccaggtctctgataccttattcacagaagttctttgaagtatttattgttattttctttgacttatgggaaaactgggacacaggaagacaggtaaattacccaacctcacacgttaagtcagaactgggagccataattttgtatccctggtataaatagacaatctctcgaagaaatgaagagatgaccatagaaaaacatcgagatatctccagctctaaaatcctttgtttcaatgttgtttggcatatgttatctttggaatttagtgtctgagcctctgtctgttactgtagtatttaaaatgcatgtattataatcatataatcataactgctgttaattcttgattatatacctagggacaatgtgtaatgtaagattactaattggttctgcccaatctcctttcagattttattaggaaaaaaaaataaacctcctgatcggagacaatgtattaatcagaagtgtaaactgccagttctatatagcatgaaatgaaaagacagctaatttggtccaacaaacatgactgggtctagggcacccaggctgattcagctgatttcctaccagcctttgcctcttccttcaatgtggtttccatgggaatttgcttcagaaaagccaagtatgggctgttcagaggtgcacacctgcattttcttagctcttctagaggggctaagagacttggtacgggccaggaagaatatgtggcagagctcctggaaatgatgcagattaggtggcatttttgtcagctctgtggtttattgttgggactattctttaaaatatccattgttcactacagtgaagatctctgatttaaccgtgtactatccacatgcattacaaacatttcgcagagctgcttagtatataagcgtacaatgtatgtaataaccatctcatatttaattaaatggtatagaagaacaaaaaaaaaaaaacaaaaaaaaaaaaaaaaaaaaaaaaaaaaaaaaaaaaaaaaaaaaaaaaaaaaaagaaccaacacaggaggagagcacaacaaaaagctattccaggcgaagacccgacgcaacgacggtatgaaaaacgacgcggcggcactcattagaacgagggagcgcagggaccgactacaaccagaggagaagcggcgccaactcaaccacaaacagctgctccgcgccgcggcgacaacggcctccctgcggggagaaaatccgcgcaggagaagcccccccagaccaccaggtggggggggagacccataacacggggcaagcaggaccactcaacgtgctgttcgacacgacctccgacgagacaactaacacaccccgcagagagctaacggcgtcaaaacagaacgatattgacagcgccacacgaaagcatcgcgacccggcaaagaccacggacaaccgacctccagggacggctaaaaagagaacggcgcgacacgcacgcccg

SEQ ID NO: 414515 - DNA, 2239 bp, Homo sapiens
ctctctctctatctctctcagaatgacaattctaggtacaacttttggcatggttttttctttacttcaagtcgtttctggagaaagtggctatgctcaaaatggagacttggaagatgcagaactggatgactactcattctcatgctatagccagttggaagtgaatggatcgcagcattcactgacctgtgcttttgaggacccagatgtcaacaccaccaatctggaatttgaaatatgtggggccctcgtggaggtaaagtgcctgaatttcaggaaactacaagagatatatttcatcgagacaaagaaattcttactgattggaaagagcaatatatgtgtgaaggttggagaaaagagtctaacctgcaaaaaaatagacctaaccactatagttaaacctgaggctccttttgacctgagtgtcatctatcgggaaggagccaatgactttgtggtgacatttaatacatcacacttgcaaaagaagtatgtaaaagttttaatgcatgatgtagcttaccgccaggaaaaggatgaaaacaaatggacgcatgtgaatttatccagcacaaagctgacactcctgcagagaaagctccaaccggcagcaatgtatgagattaaagttcgatccatccctgatcactattttaaaggcttctggagtgaatggagtccaagttattacttcagaactccagagatcaataatagctcaggattaagcctatcgtatggcccagtctccccgatcataagaagactctggaacatctttgtaagaaaccaagaaaaaatttaaatgtgagtttcaatcctgaaagtttcctggactgccagattcatagggtggatgacattcaagctagagatgaagtggaaggttttctgcaagatacgtttcctcagcaactagaagaatctgagaagcagaggcttggaggggatgtgcagagccccaactgcccatctgaggatgtagtcatcactccagaaagctttggaagagattcatccctcacatgcctggctgggaatgtcagtgcatgtgacgcccctattctctcctcttccaggtccctagactgcagggagagtggcaagaatgggcctcatgtgtaccaggacctcctgcttagccttgggactacaaacagcacgctgccccctccattttctctccaatctggaatcctgacattgaacccagttgctcagggtcagcccattcttacttccctgggatcaaatcaagaagaagcatatgtcaccatgtccagcttctaccaaaaccagtgaagtgtaagaaacccagactgaacttaccgtgagcgacaaagatgatttaaaagggaagtctagagttcctagtctccctcacagcacagaaaagccaagtatgggctgttcagaggtgcacacctgcattttcttagctcttctagaggggctaagagacttggtacgggccaggaagaatatgtggcagagctcctggaaatgatgcagattaggtggcatttttgtcagctctgtggtttattgttgggactattctttaaaatatccattgttcactacagtgaagatctctgatttaaccgtgtactatccacatgcattacaaacatttcgcagagctgcttagtatataagcgtacaatgtatgtaataaccatctcatatttaattaaatggtatagaagaacaaaaaaaaaaaaacaaaaaaaaaaaaaaaaaaaaaaaaaaaaaaaaaaaaaaaaaaaaaaaaaaaaaagaaccaacacaggaggagagcacaacaaaaagctattccaggcgaagacccgacgcaacgacggtatgaaaaacgacgcggcggcactcattagaacgagggagcgcagggaccgactacaaccagaggagaagcggcgccaactcaaccacaaacagctgctccgcgccgcggcgacaacggcctccctgcggggagaaaatccgcgcaggagaagcccccccagaccaccaggtggggggggagacccataacacggggcaagcaggaccactcaacgtgctgttcgacacgacctccgacgagacaactaacacaccccgcagagagctaacggcgtcaaaacagaacgatattgacagcgccacacgaaagcatcgcgacccggcaaagaccacggacaaccgacctccagggacggctaaaaagagaacggcgcgacacgcacgcccg

SEQ ID NO: 414516 - DNA, 466 bp, Homo sapiens
agtccgtgtacaggtagccatggctgctcacccactcgcaggtcgaccataagccttcatacatctcaagttgggggacacaaaagggggaaggggggcacgaaaggctcatcattcaaaataaaacaaaataacagagtcttaaggcgaagattaaaaacattgtgcattacatcatttacacgaaagcaatgctatcacctccccagtgtggagagctctctccacactggctgagggcactaaaagctatgttccatatcgtgacagcaaaatgacaaggattctccaggactctctcgggggaaactgccggacgactatgttcatctgttgctcaccatccagttataatgatgcagagaccaagtccaccctgatgtttgggcagcgggcacatccacacaggcgagacaccctaatctgctcggccagtctggagagagaggacctctagaacaccaca

SEQ ID NO: 414517 - DNA, 707 bp, Homo sapiens
aggagattctggatgtgattgatgaagggaaatcaaatcgtcatgtggctgtcaccaacatgaatgaacacagctctcggagccacagcatcttcctcatcaacatcaagcaggagaacatggaaacggagcagaagctcagtgggaagctgtatctggtggacctggcagggagtgagaaggtcagcaagactggagcagagggagccgtgctggacgaggcaaagaatatcaacaagtcactgtcagctctgggcaatgtgatctccgcactggctgagggcactaaaagctatgttccatatcgtgacagcaaaatgacaaggattctccaggactctctcgggggaaactgccggacgactatgttcatctgttgctcaccatccagttataatgatgcagagaccaagtccaccctgatgtttgggcagcgggcaaagaccattaagaacactgcctcagtaaatttggagttgactgctgagcagtggaagaagaaatatgagaaggaataggatgcctctcactcacactgcagttcctggctggccagctgctcagggctcaggctggggcctcccattgacatcctccccctacactccctctctgagcctccgtcgcccctcctgttgggtaagggtgttgagtgtgacttgtgctgaaaacctggttcatatataataaataatggtgatgaaaag

SEQ ID NO: 414518 - DNA, 865 bp, Homo sapiens
  misc_feature (841)..(841): n is a, c, g, or t
aggagattctggatgtgattgatgaagggaaatcaaatcgtcatgtggctgtcaccaacatgaatgaacacagctctcggagccacagcatcttcctcatcaacatcaagcaggagaacatggaaacggagcagaagctcagtgggaagctgtatctggtggacctggcagggagtgagaaggtcagcaagactggagcagagggagccgtgctggacgaggcaaagaatatcaacaagtcactgtcagctctgggcaatgtgatctccgcactggctgagggcactaaaagctatgttccatatcgtgacagcaaaatgacaaggattctccaggactctctcgggggaaactgccggacgactatgttcatctgttgctcaccatccagttataatgatgcagagaccaagtccaccctgatgtttgggcagcgggcaaagaccattaagaacactgcctcagtaaatttggagttgactgctgagcagtggaagaagaaatatgagaaggagaaggagaagacaaaggcccagaaggagacgattgcgaagctggaggctgagctgagccggtggcgcaatggagagaatgtgcctgagacagagcgcctggctggggaggaggcagccctgggagccgagctctgtgaggagacccctgtgaatgacaactcatccatcgtggtgcgcatcgcgcccgaggagcggcagaaatacgaggaggagatccgccgtctctataagcagcttgacgacaaggatgatgaaatcaaccaacaaagccaactcatagagaagctcaagcagcaaatgctggaccaggaagagctgctggtgtncacccgaggagacaacgagaaggt

SEQ ID NO: 414519 - DNA, 852 bp, Homo sapiens
  misc_feature (828)..(828): n is a, c, g, or t
tcagctcggtaccttcttgcacccatggttgtagttctaaggaggtgggatgtgggattctgccaagacgtgggcagccctcaccccaaccagttcagccaaaagtgagggtgcctccctgggtggggacccagcaccaaaccacagtccttgaccccacagagagagcgtcgacgctctctctgtggggggagccgtgctggacgaggcaaagaatatcaacaagtcactgtcagctctgggcaatgtgatctccgcactggctgagggcactaaaagctatgttccatatcgtgacagcaaaatgacaaggattctccaggactctctcgggggaaactgccggacgactatgttcatctgttgctcaccatccagttataatgatgcagagaccaagtccaccctgatgtttgggcagcgggcaaagaccattaagaacactgcctcagtaaatttggagttgactgctgagcagtggaagaagaaatatgagaaggagaaggagaagacaaaggcccagaaggagacgattgcgaagctggaggctgagctgagccggtggcgcaatggagagaatgtgcctgagacagagcgcctggctggggaggaggcagccctgggagccgagctctgtgaggagacccctgtgaatgacaactcatccatcgtggtgcgcatcgcgcccgaggagcggcagaaatacgaggaggagatccgccgtctctataagcagcttgacgacaaggatgatgaaatcaaccaacaaagccaactcatagagaagctcaagcagcaaatgctggaccaggaagagctgctggtgtncacccgaggagacaacgagaaggt

SEQ ID NO: 414520 - DNA, 5587 bp, Homo sapiens
aattccgggcgccagtcccgctccgcgccgcgccgctccgctccggctcgggctccggctcgcctcgggctgggctcgggctccgggggcggcgtccccgcgccgggccccgggacgcggcgacgctccaaccatggcccgtgcccaggcgctcgtgctggcactcaccttccagctctgcgcgccggagaccgagactccggcagctggctgcaccttcgaggaggcaagtgacccagcagtgccctgcgagtacagccaggcccagtacgatgacttccagtgggagcaagtgcgaatccaccctggcacccgggcacctgcggacctgccccacggctcctacttgatggtcaacacttcccagcatgccccaggccagcgagcccatgtcatcttccagagcctgagcgagaatgatacccactgtgtgcagttcagctacttcctgtacagccgggacgggcacagcccgggcaccctgggcgtctacgtgcgcgttaatgggggccccctgggcagtgctgtgtggaatatgactggatcccacggccgtcagtggcaccaggctgagctggctgtcagcactttctggcccaatgaatatcaggtgctgtttgaggccctcatctccccagaccgcaggggctacatgggcctagatgacatcctgcttctcagctacccctgcgcaaaggccccacacttctcccgcctgggcgacgtggaggtcaacgcgggccagaacgcgtcgttccagtgcatggccgcgggcagagcccgaggccgaacgcttcctcttgcaacggcagagcggggcgctggtgccggcggcgggcgtgcggcacatcagccaccgcgcttcctggccactttcccgctggctgccgtgagccgcgccgagcaggacctgtaccgctgtgtgtcccaggccccgcgcggcgcgggcgtctctaacttcgcggagctcatcgtcaaggagcccccaactcccatcgcgcccccacagctgctgcgtgctggccccacctacctcatcatccagctcaacaccaactccatcattggcgacgggccgatcgtgcgcaaggagattgagtaccgcatggcgcgcgggccctgggctgaggtgcacgccgtcagcctgcagacctacaagctgtggcacctcgaccccgacacagagtatgagatcagcgtgctgctcacgcgtcccggagacggcggcactggccgccctgggccacccctcatcagccgcaccaaatgcgcagagcccatgagggcccccaaaggcctggcttttgctgagatccaggcccgtcagctgaccctgcagtgggaaccactgggctacaacgtgacgcgttgccacacctatactgtgtcgctgtgctatcactacaccctgggcagcagccacaaccagaccatccgagagtgtgtgaagacagagcaaggtgtcagccgctacaccatcaagaacctgctgccctatcggaacgttcacgtgaggcttgtcctcactaaccctgaggggcgcaaagagggcaaggaggtcactttccagacggatgaggatgtgcccagtgggattgcagccgagtccctgaccttcactccactggaggacatgatcttcctcaagtgggaggagccccaggagcccaatggtctcatcacccagtatgagatcagctaccagagcatcgagtcatcagacccggcagtgaacgtgccaggcccacgacgtaccatctccaagctccgcaatgagacctaccatgtcttctccaacctgcacccaggcaccacctacctgttctccgtgcgggcccgcacaggcaaaggcttcggccaggcggcactcactgagataaccactaacatctctgctcccagctttgattatgccgacatgccgtcacccctgggcgagtctgagaacaccatcaccgtgctgctgaggccggcacagggccgcggtgcgcccatcagtgtgtaccaggtgattgtggaggaggagcgggcgcggaggctgcggcgggagccaggtggacaggactgcttcccagtgccattgaccttcgaggcggcgctggcccgaggcctggtgcactacttcggggccgaactggcggccagcagtctacctgaggccatgccctttaccgtgggtgacaaccagacctaccgaggcttctggaacccaccacttgagcctaggaaggcctatctcatctacttccaggcagcaagccacctgaagggggagacccggctgaattgcatccgcattgccaggaaagctgcctgcaaggaaagcaagcggcccctggaggtgtcccagagatcggaggagatggggcttatcctgggcatctgtgcaggggggcttgctgtcctcatccttctcctgggtgccatcattgtcatcatccgcaaagggaagccggtgaacatgaccaaggccaccgtcaactaccgccaggagaagacacacatgatgagcgccgtggaccgcagcttcacagaccagagcaccctgcaggaggacgagcggctgggcctgtccttcatggacacccatggctacagcacccggggagaccagcgcagcggtggggtcactgaggccagcagcctcctggggggctccccgaggcgtccctgtggccggaagggctccccataccacacggggcagctgcaccctgcggtgcgtgtcgcagaccttctgcagcacatcaaccagatgaagacggccgagggttacggcttcaagcaggagtatgagagcttctttgaaggctgggacgccacaaagaagaaagacaaggtcaagggcagccggcaggagccaatgcctgcctatgatcggcaccgagtgaaactgcacccgatgctgggagaccccaatgccgactacattaatgccaactacatagatggttaccacaggtcaaaccacttcatagccactcaagggccgaagcctgagatggtctatgacttctggcgtatggtgtggcaggagcactgttccagcatcgtcatgatcaccaagctggtcgaggtgggcagggtgaaatgctcacggtactggccggaggactcagacacctacggggacatcaagattatgctggtgaagacagagaccctggctgagtatgtcgtgcgcacttttgccctggagcggagaggctactctgcccggcacgaggtccgccagttccacttcacagcgtggccagagcatggcgtcccctaccatgccacggggctgctggctttcatccggcgcgtgaaggcctccaccccacctgatgccgggcccattgtcatccactgcagcgcgggcaccggccgcacaggttgctatatcgtcctggatgtgatgctggacatggcagagtgtgagggcgtcgtggacatttacaactgtgtgaagactctctgctcccggcgtgtcaacatgatccagactgaggagcagtacatcttcattcatgatgcaatcctggaggcctgcctgtgtggggagaccaccatccctgtcagtgagttcaaggccacctacaaggagatgatccgcattgatcctcagagtaattcctcccagctgcgggaagagttccagacgctgaactcggtcaccccgccgctggacgtggaggagtgcagcatcgccctgttgccccggaaccgcgacaagaaccgcagcatggacgtcctgccgcccgaccgctgcctgcccttcctcatctccactgatggggactccaacaactacattaatgcagccctgactgacagctacacacggagtgcggccttcatcgtgaccctgcacccgctgcagagcaccacgcccgacttctggcggctggtctacgattacgggtgcacctccatcgtcatgctcaaccagctgaaccagtccaactccgcctggccctgcctgcagtactggccagagccaggccggcagcaatatggcctcatggaggtggagtttatgtcgggcacagctgatgaagacttagtggctcgagtcttccgggtgcagaacatctctcggttgcaggaggggcacctgctggtgcggcacttccagttcctgcgctggtctgcataccgggacacacctgactccaagaaggccttcttgcacctgctggctgaggtggacaagtggcaggccgagagtggggatgggcgcaccatcgtgcactgcctaaacgggggaggacgcagcggcaccttctgcgcctgcgccacggtcctggagatgatccgctgccacaacttggtggacgttttctttgctgccaaaaccctccggaactacaaacccaacatggtggagaccatggatcagtaccacttttgctacgatgtggccctggagtacttggaggggctggagtcaagatagcggggccctggcctggggcacccactgcacactcagggccagacccaccatcctggactggcgaggaagatcagtgcctcctgctctgcccaaacacactcccatggggcaagcactggagtggatgctgggctatcttgctcccccttccactgtgggcagggcctttcgcttgtcccatgggcgggtggtgggccaaggaggagcttagcaagtctgcagcccagccccacctccatagggtcctgcaggcctgtgctgagaggcctggtgctgcctggcagagtgacaaaggctcaggacggctggctctgggggactcaggccaagccccttggcaccatcctggcttttggcagggatgagtgaggccctgcagagagcatcccaggccaaggttcccactcagcctgccccctctgcatgtgggtagaggatgtactgggacttggcatttaggattccatctggcccagcccctgaaggtcctggggaagcaggtctcaattctgaatagccagtggggcacactgactgtcctccccaggggaactgcagcgccctcctccccactgccccctgcagcccctgagatattttgctcactatccctccccacttgcttccctgatatgtgctctgagcttccctgaaccaggatctgcctattactgctgtgccccatggggggctccttccctgcctgacccactgttgcagaatgaagtcacctcgcccccctcttcctttaatcttcaggcctcactggcctgtcctgctcagcttgggccagtgacaatctgcaaggctgaacaacagcccctggggttgaggcccctgtggctcctggtcaggctgcccgttgtggggaggggcagtgttagagcagggctggtcataccctctggagttcagaggaagaggtaggaccagtgcttttttgtttcttttgttatttttggttgggtgggtgggaaggtctctttaaaatggggcaggccacacccccattccgtgcctcaatttccccatctgtaaactgtagatatgactactgacctacctcgcagggggctgtggggaggcataagctgatgtttgtaaagcgctttgtaaataaacgtgctctctgaatgccacaaaaaa

SEQ ID NO: 414521 - DNA, 5605 bp, Homo sapiens
aattccgggcgccagtcccgctccgcgccgcgccgctccgctccggctcgggctccggctcgcctcgggctgggctcgggctccgggggcggcgtccccgcgccgggccccgggacgcggcgacgctccaaccatggcccgtgcccaggcgctcgtgctggcactcaccttccagctctgcgcgccggagaccgagactccggcagctggctgcaccttcgaggaggcaagtgacccagcagtgccctgcgagtacagccaggcccagtacgatgacttccagtgggagcaagtgcgaatccaccctggcacccgggcacctgcggacctgccccacggctcctacttgatggtcaacacttcccagcatgccccaggccagcgagcccatgtcatcttccagagcctgagcgagaatgatacccactgtgtgcagttcagctacttcctgtacagccgggacgggcacagcccgggcaccctgggcgtctacgtgcgcgttaatgggggccccctgggcagtgctgtgtggaatatgactggatcccacggccgtcagtggcaccaggctgagctggctgtcagcactttctggcccaatgaatatcaggtgctgtttgaggccctcatctccccagaccgcaggggctacatgggcctagatgacatcctgcttctcagctacccctgcgcaaaggccccacacttctcccgcctgggcgacgtggaggtcaacgcgggccagaacgcgtcgttccagtgcatggccgcgggcagagcccgaggccgaacgcttcctcttgcaacggcagagcggggcgctggtgccggcggcgggcgtgcggcacatcagccaccgcgcttcctggccactttcccgctggctgccgtgagccgcgccgagcaggacctgtaccgctgtgtgtcccaggccccgcgcggcgcgggcgtctctaacttcgcggagctcatcgtcaaggagcccccaactcccatcgcgcccccacagctgctgcgtgctggccccacctacctcatcatccagctcaacaccaactccatcattggcgacgggccgatcgtgcgcaaggagattgagtaccgcatggcgcgcgggccctgggctgaggtgcacgccgtcagcctgcagacctacaagctgtggcacctcgaccccgacacagagtatgagatcagcgtgctgctcacgcgtcccggagacggcggcactggccgccctgggccacccctcatcagccgcaccaaatgcgcagagcccatgagggcccccaaaggcctggcttttgctgagatccaggcccgtcagctgaccctgcagtgggaaccactgggctacaacgtgacgcgttgccacacctatactgtgtcgctgtgctatcactacaccctgggcagcagccacaaccagaccatccgagagtgtgtgaagacagagcaaggtgtcagccgctacaccatcaagaacctgctgccctatcggaacgttcacgtgaggcttgtcctcactaaccctgaggggcgcaaagagggcaaggaggtcactttccagacggatgaggatgtgcccagtgggattgcagccgagtccctgaccttcactccactggaggacatgatcttcctcaagtgggaggagccccaggagcccaatggtctcatcacccagtatgagatcagctaccagagcatcgagtcatcagacccggcagtgaacgtgccaggcccacgacgtaccatctccaagctccgcaatgagacctaccatgtcttctccaacctgcacccaggcaccacctacctgttctccgtgcgggcccgcacaggcaaaggcttcggccaggcggcactcactgagataaccactaacatctctgctcccagctttgattatgccgacatgccgtcacccctgggcgagtctgagaacaccatcaccgtgctgctgaggccggcacagggccgcggtgcgcccatcagtgtgtaccaggtgattgtggaggaggagcgggcgcggaggctgcggcgggagccaggtggacaggactgcttcccagtgccattgaccttcgaggcggcgctggcccgaggcctggtgcactacttcggggccgaactggcggccagcagtctacctgaggccatgccctttaccgtgggtgacaaccagacctaccgaggcttctggaacccaccacttgagcctaggaaggcctatctcatctacttccaggcagcaagccacctgaagggggagacccggctgaattgcatccgcattgccaggaaagctgcctgcaaggaaagcaagcggcccctggaggtgtcccagagatcggaggagatggggcttatcctgggcatctgtgcaggggggcttgctgtcctcatccttctcctgggtgccatcattgtcatcatccgcaaagggaagccggtgaacatgaccaaggccaccgtcaactaccgccaggagaagacacacatgatgagcgccgtggaccgcagcttcacagaccagagcaccctgcaggaggacgagcggctgggcctgtccttcatggacacccatggctacagcacccggggagaccagcgcagcggtggggtcactgaggccagcagcctcctggggggctccccgaggcgtccctgtggccggaagggctccccataccacacggggcagctgcaccctgcggtgcgtgtcgcagaccttctgcagcacatcaaccagatgaagacggccgagggttacggcttcaagcaggagtatgagagcttctttgaaggctgggacgccacaaagaagaaagacaaggtcaagggcagccggcaggagccaatgcctgcctatgatcggcaccgagtgaaactgcacccgatgctgggagaccccaatgccgactacattaatgccaactacatagatattcggataaaccgagaaggttaccacaggtcaaaccacttcatagccactcaagggccgaagcctgagatggtctatgacttctggcgtatggtgtggcaggagcactgttccagcatcgtcatgatcaccaagctggtcgaggtgggcagggtgaaatgctcacggtactggccggaggactcagacacctacggggacatcaagattatgctggtgaagacagagaccctggctgagtatgtcgtgcgcacttttgccctggagcggagaggctactctgcccggcacgaggtccgccagttccacttcacagcgtggccagagcatggcgtcccctaccatgccacggggctgctggctttcatccggcgcgtgaaggcctccaccccacctgatgccgggcccattgtcatccactgcagcgcgggcaccggccgcacaggttgctatatcgtcctggatgtgatgctggacatggcagagtgtgagggcgtcgtggacatttacaactgtgtgaagactctctgctcccggcgtgtcaacatgatccagactgaggagcagtacatcttcattcatgatgcaatcctggaggcctgcctgtgtggggagaccaccatccctgtcagtgagttcaaggccacctacaaggagatgatccgcattgatcctcagagtaattcctcccagctgcgggaagagttccagacgctgaactcggtcaccccgccgctggacgtggaggagtgcagcatcgccctgttgccccggaaccgcgacaagaaccgcagcatggacgtcctgccgcccgaccgctgcctgcccttcctcatctccactgatggggactccaacaactacattaatgcagccctgactgacagctacacacggagtgcggccttcatcgtgaccctgcacccgctgcagagcaccacgcccgacttctggcggctggtctacgattacgggtgcacctccatcgtcatgctcaaccagctgaaccagtccaactccgcctggccctgcctgcagtactggccagagccaggccggcagcaatatggcctcatggaggtggagtttatgtcgggcacagctgatgaagacttagtggctcgagtcttccgggtgcagaacatctctcggttgcaggaggggcacctgctggtgcggcacttccagttcctgcgctggtctgcataccgggacacacctgactccaagaaggccttcttgcacctgctggctgaggtggacaagtggcaggccgagagtggggatgggcgcaccatcgtgcactgcctaaacgggggaggacgcagcggcaccttctgcgcctgcgccacggtcctggagatgatccgctgccacaacttggtggacgttttctttgctgccaaaaccctccggaactacaaacccaacatggtggagaccatggatcagtaccacttttgctacgatgtggccctggagtacttggaggggctggagtcaagatagcggggccctggcctggggcacccactgcacactcagggccagacccaccatcctggactggcgaggaagatcagtgcctcctgctctgcccaaacacactcccatggggcaagcactggagtggatgctgggctatcttgctcccccttccactgtgggcagggcctttcgcttgtcccatgggcgggtggtgggccaaggaggagcttagcaagtctgcagcccagccccacctccatagggtcctgcaggcctgtgctgagaggcctggtgctgcctggcagagtgacaaaggctcaggacggctggctctgggggactcaggccaagccccttggcaccatcctggcttttggcagggatgagtgaggccctgcagagagcatcccaggccaaggttcccactcagcctgccccctctgcatgtgggtagaggatgtactgggacttggcatttaggattccatctggcccagcccctgaaggtcctggggaagcaggtctcaattctgaatagccagtggggcacactgactgtcctccccaggggaactgcagcgccctcctccccactgccccctgcagcccctgagatattttgctcactatccctccccacttgcttccctgatatgtgctctgagcttccctgaaccaggatctgcctattactgctgtgccccatggggggctccttccctgcctgacccactgttgcagaatgaagtcacctcgcccccctcttcctttaatcttcaggcctcactggcctgtcctgctcagcttgggccagtgacaatctgcaaggctgaacaacagcccctggggttgaggcccctgtggctcctggtcaggctgcccgttgtggggaggggcagtgttagagcagggctggtcataccctctggagttcagaggaagaggtaggaccagtgcttttttgtttcttttgttatttttggttgggtgggtgggaaggtctctttaaaatggggcaggccacacccccattccgtgcctcaatttccccatctgtaaactgtagatatgactactgacctacctcgcagggggctgtggggaggcataagctgatgtttgtaaagcgctttgtaaataaacgtgctctctgaatgccacaaaaaa

SEQ ID NO: 414522 - DNA, 1794 bp, Homo sapiens
  misc_feature (30)..(30): n is a, c, g, or t
aacaatggctatggatcgaggcccctgggntgttaatcggacagggctcatcgtatcctgcacccgctgcagagcaccacgcccgacttctggcggctggtctacgattacgggtgcacctccatcgtcatgctcaaccagctgaaccagtccaactccgcctggccctgcctgcagtactggccagagccaggccggcagcaatatggcctcatggaggtggagtttatgtcgggcacagctgatgaagacttagtggctcgagtcttccgggtgcagaacatctctcggttgcaggaggggcacctgctggtgcggcacttccagttcctgcgctggtctgcataccgggacacacctgactccaagaaggccttcttgcacctgctggctgaggtggacaagtggcaggccgagagtggggatgggcgcaccatcgtgcactgcctaaacgggggaggacgcagcggcaccttctgcgcctgcgccacggtcctggagatgatccgctgccacaacttggtggacgttttctttgctgccaaaaccctccggaactacaaacccaacatggtggagaccatggatcagtaccacttttgctacgatgtggccctggagtacttggaggggctggagtcaagatagcggggccctggcctggggcacccactgcacactcagggccagacccaccatcctggactggcgaggaagatcagtgcctcctgctctgcccaaacacactcccatggggcaagcactggagtggatgctgggctatcttgctcccccttccactgtgggcagggcctttcgcttgtcccatgggcgggtggtgggccaaggaggagcttagcaagtctgcagcccagccccacctccatagggtcctgcaggcctgtgctgagaggcctggtgctgcctggcagagtgacaaaggctcaggacggctggctctgggggactcaggccaagccccttggcaccatcctggcttttggcagggatgagtgaggccctgcagagagcatcccaggccaaggttcccactcagcctgccccctctgcatgtgggtagaggatgtactgggacttggcatttaggattccatctggcccagcccctgaaggtcctggggaagcaggtctcaattctgaatagccagtggggcacactgactgtcctccccaggggaactgcagcgccctcctccccactgccccctgcagcccctgagatattttgctcactatccctccccacttgcttccctgatatgtgctctgagcttccctgaaccaggatctgcctattactgctgtgccccatggggggctccttccctgcctgacccactgttgcagaatgaagtcacctcgcccccctcttcctttaatcttcaggcctcactggcctgtcctgctcagcttgggccagtgacaatctgcaaggctgaacaacagcccctggggttgaggcccctgtggctcctggtcaggctgcccgttgtggggaggggcagtgttagagcagggctggtcataccctctggagttcagaggaagaggtaggaccagtgcttttttgtttcttttgttatttttggttgggtgggtgggaaggtctctttaaaatggggcaggccacacccccattccgtgcctcaatttccccatctgtaaactgtagatatgactactgacctacctcgcagggggctgtggggaggcataagctgatgtttgtaaagcgctttgtaaataaacgtgctctctgaatgccacaaaaaa

SEQ ID NO: 414523 - DNA, 3772 bp, Homo sapiens
aattccgggcgccagtcccgctccgcgccgcgccgctccgctccggctcgggctccggctcgcctcgggctgggctcgggctccgggggcggcgtccccgcgccgggccccgggacgcggcgacgctccaaccatggcccgtgcccaggcgctcgtgctggcactcaccttccagctctgcgcgccggagaccgagactccggcagctggctgcaccttcgaggaggcaagtgacccagcagtgccctgcgagtacagccaggcccagtacgatgacttccagtgggagcaagtgcgaatccaccctggcacccgggcacctgcggacctgccccacggctcctacttgatggtcaacacttcccagcatgccccaggccagcgagcccatgtcatcttccagagcctgagcgagaatgatacccactgtgtgcagttcagctacttcctgtacagccgggacgggcacagcccgggcaccctgggcgtctacgtgcgcgttaatgggggccccctgggcagtgctgtgtggaatatgactggatcccacggccgtcagtggcaccaggctgagctggctgtcagcactttctggcccaatgaatatcaggtgctgtttgaggccctcatctccccagaccgcaggggctacatgggcctagatgacatcctgcttctcagctacccctgcgcaaaggccccacacttctcccgcctgggcgacgtggaggtcaacgcgggccagaacgcgtcgttccagtgcatggccgcgggcagagcccgaggccgaacgcttcctcttgcaacggcagagcggggcgctggtgccggcggcgggcgtgcggcacatcagccaccgcgcttcctggccactttcccgctggctgccgtgagccgcgccgagcaggacctgtaccgctgtgtgtcccaggccccgcgcggcgcgggcgtctctaacttcgcggagctcatcgtcaaggagcccccaactcccatcgcgcccccacagctgctgcgtgctggccccacctacctcatcatccagctcaacaccaactccatcattggcgacgggccgatcgtgcgcaaggagattgagtaccgcatggcgcgcgggccctgggctgaggtgcacgccgtcagcctgcagacctacaagctgtggcacctcgaccccgacacagagtatgagatcagcgtgctgctcacgcgtcccggagacggcggcactggccgccctgggccacccctcatcagccgcaccaaatgcgcagagcccatgagggcccccaaaggcctggcttttgctgagatccaggcccgtcagctgaccctgcagtgggaaccactgggctacaacgtgacgcgttgccacacctatactgtgtcgctgtgctatcactacaccctgggcagcagccacaaccagaccatccgagagtgtgtgaagacagagcaaggtgtcagccgctacaccatcaagaacctgctgccctatcggaacgttcacgtgaggcttgtcctcactaaccctgaggggcgcaaagagggcaaggaggtcactttccagacggatgaggatgtgcccagtgggattgcagccgagtccctgaccttcactccactggaggacatgatcttcctcaagtgggaggagccccaggagcccaatggtctcatcacccagtatgagatcagctaccagagcatcgagtcatcagacccggcagtgaacgtgccaggcccacgacgtaccatctccaagctccgcaatgagacctaccatgtcttctccaacctgcacccaggcaccacctacctgttctccgtgcgggcccgcacaggcaaaggcttcggccaggcggcactcactgagataaccactaacatctctgctcccagctttgattatgccgacatgccgtcacccctgggcgagtctgagaacaccatcaccgtgctgctgaggccggcacagggccgcggtgcgcccatcagtgtgtaccaggtgattgtggaggaggagcgggcgcggaggctgcggcgggagccaggtggacaggactgcttcccagtgccattgaccttcgaggcggcgctggcccgaggcctggtgcactacttcggggccgaactggcggccagcagtctacctgaggccatgccctttaccgtgggtgacaaccagacctaccgaggcttctggaacccaccacttgagcctaggaaggcctatctcatctacttccaggcagcaagccacctgaagggggagacccggctgaattgcatccgcattgccaggaaagctgcctgcaaggaaagcaagcggcccctggaggtgtcccagagatcggaggagatggggcttatcctgggcatctgtgcaggggggcttgctgtcctcatccttctcctgggtgccatcattgtcatcatccgcaaagggagagaccactatgcctactcctactacccgaagccggtgaacatgaccaaggccaccgtcaactaccgccaggagaagacacacatgatgagcgccgtggaccgcagcttcacagaccagagcaccctgcaggaggacgagcggctgggcctgtccttcatggacacccatggctacagcacccggggagaccagcgcagcggtggggtcactgaggccagcagcctcctggggggctccccgaggcgtccctgtggccggaagggctccccataccacacggggcagctgcaccctgcggtgcgtgtcgcagaccttctgcagcacatcaaccagatgaagacggccgagggttacggcttcaagcaggagtatgagagcttctttgaaggctgggacgccacaaagaagaaagacaaggtcaagggcagccggcaggagccaatgcctgcctatgatcggcaccgagtgaaactgcacccgatgctgggagaccccaatgccgactacattaatgccaactacatagatggttaccacaggtcaaaccacttcatagccactcaagggccgaagcctgagatggtctatgacttctggcgtatggtgtggcaggagcactgttccagcatcgtcatgatcaccaagctggtcgaggtgggcagggtgaaatgctcacggtactggccggaggactcagacacctacggggacatcaagattatgctggtgaagacagagaccctggctgagtatgtcgtgcgcacttttgccctggagcggagaggctactctgcccggcacgaggtccgccagttccacttcacagcgtggccagagcatggcgtcccctaccatgccacggggctgctggctttcatccggcgcgtgaaggcctccaccccacctgatgccgggcccattgtcatccactgcagcgcgggcaccggccgcacaggttgctatatcgtcctggatgtgatgctggacatggcagagtgtgagggcgtcgtggacatttacaactgtgtgaagactctctgctcccggcgtgtcaacatgatccagactgaggagcagtacatcttcattcatgatgcaatcctggaggcctgcctgtgtggggagaccaccatccctgtcagtgagttcaaggccacctacaaggagatgatccgcattgatcctcagagtaattcctcccagctgcgggaagagttccagacgctgaactcggtcaccccgccgctggacgtggaggagtgcagcatcgccctgttgccccggacatgcaaggttacatgcaagcccggtacatgcaag

SEQ ID NO: 414524 - DNA, 407 bp, Homo sapiens
gtgaggcctccactggccaggccaatgggccgcctgctcccaggtcctctgtgtattcagggccatggtccccaaagccaaaagttgggtcccagctctgccatctatttattgtgtgatgaatcatacaccttcccagagcctcagtttcttcatctgtaaaacaagggtgtcagatgggagatcactagttgctctttttcttttcttttttttgagacaaggtctcactcttttgcccaggctggagtgcagtggcgcgatcacagctcactaagttgtgcagcctcgacctcttgggcccaagccatccttccacctcagcctatcgagtagctgggactacaggctgcatcaccacagctgtctgatttttttttttttttttttttttcagtagagacaag

SEQ ID NO: 414525 - DNA, 5593 bp, Homo sapiens
aattccgggcgccagtcccgctccgcgccgcgccgctccgctccggctcgggctccggctcgcctcgggctgggctcgggctccgggggcggcgtccccgcgccgggccccgggacgcggcgacgctccaaccatggcccgtgcccaggcgctcgtgctggcactcaccttccagctctgcgcgccggagaccgagactccggcagctggctgcaccttcgaggaggcaagtgacccagcagtgccctgcgagtacagccaggcccagtacgatgacttccagtgggaccgggcacctgcggacctgccccacggctcctacttgatggtcaacacttcccagcatgccccaggccagcgagcccatgtcatcttccagagcctgagcgagaatgatacccactgtgtgcagttcagctacttcctgtacagccgggacgggcacagcccgggcaccctgggcgtctacgtgcgcgttaatgggggccccctgggcagtgctgtgtggaatatgactggatcccacggccgtcagtggcaccaggctgagctggctgtcagcactttctggcccaatgaatatcaggtgctgtttgaggccctcatctccccagaccgcaggggctacatgggcctagatgacatcctgcttctcagctacccctgcgcaaaggccccacacttctcccgcctgggcgacgtggaggtcaacgcgggccagaacgcgtcgttccagtgcatggccgcgggcagagcccgaggccgaacgcttcctcttgcaacggcagagcggggcgctggtgccggcggcgggcgtgcggcacatcagccaccgcgcttcctggccactttcccgctggctgccgtgagccgcgccgagcaggacctgtaccgctgtgtgtcccaggccccgcgcggcgcgggcgtctctaacttcgcggagctcatcgtcaaggagcccccaactcccatcgcgcccccacagctgctgcgtgctggccccacctacctcatcatccagctcaacaccaactccatcattggcgacgggccgatcgtgcgcaaggagattgagtaccgcatggcgcgcgggccctgggctgaggtgcacgccgtcagcctgcagacctacaagctgtggcacctcgaccccgacacagagtatgagatcagcgtgctgctcacgcgtcccggagacggcggcactggccgccctgggccacccctcatcagccgcaccaaatgcgcagagcccatgagggcccccaaaggcctggcttttgctgagatccaggcccgtcagctgaccctgcagtgggaaccactgggctacaacgtgacgcgttgccacacctatactgtgtcgctgtgctatcactacaccctgggcagcagccacaaccagaccatccgagagtgtgtgaagacagagcaaggtgtcagccgctacaccatcaagaacctgctgccctatcggaacgttcacgtgaggcttgtcctcactaaccctgaggggcgcaaagagggcaaggaggtcactttccagacggatgaggatgtgcccagtgggattgcagccgagtccctgaccttcactccactggaggacatgatcttcctcaagtgggaggagccccaggagcccaatggtctcatcacccagtatgagatcagctaccagagcatcgagtcatcagacccggcagtgaacgtgccaggcccacgacgtaccatctccaagctccgcaatgagacctaccatgtcttctccaacctgcacccaggcaccacctacctgttctccgtgcgggcccgcacaggcaaaggcttcggccaggcggcactcactgagataaccactaacatctctgctcccagctttgattatgccgacatgccgtcacccctgggcgagtctgagaacaccatcaccgtgctgctgaggccggcacagggccgcggtgcgcccatcagtgtgtaccaggtgattgtggaggaggagcgggcgcggaggctgcggcgggagccaggtggacaggactgcttcccagtgccattgaccttcgaggcggcgctggcccgaggcctggtgcactacttcggggccgaactggcggccagcagtctacctgaggccatgccctttaccgtgggtgacaaccagacctaccgaggcttctggaacccaccacttgagcctaggaaggcctatctcatctacttccaggcagcaagccacctgaagggggagacccggctgaattgcatccgcattgccaggaaagctgcctgcaaggaaagcaagcggcccctggaggtgtcccagagatcggaggagatggggcttatcctgggcatctgtgcaggggggcttgctgtcctcatccttctcctgggtgccatcattgtcatcatccgcaaagggagagaccactatgcctactcctactacccgaagccggtgaacatgaccaaggccaccgtcaactaccgccaggagaagacacacatgatgagcgccgtggaccgcagcttcacagaccagagcaccctgcaggaggacgagcggctgggcctgtccttcatggacacccatggctacagcacccggggagaccagcgcagcggtggggtcactgaggccagcagcctcctggggggctccccgaggcgtccctgtggccggaagggctccccataccacacggggcagctgcaccctgcggtgcgtgtcgcagaccttctgcagcacatcaaccagatgaagacggccgagggttacggcttcaagcaggagtatgagagcttctttgaaggctgggacgccacaaagaagaaagacaaggtcaagggcagccggcaggagccaatgcctgcctatgatcggcaccgagtgaaactgcacccgatgctgggagaccccaatgccgactacattaatgccaactacatagatggttaccacaggtcaaaccacttcatagccactcaagggccgaagcctgagatggtctatgacttctggcgtatggtgtggcaggagcactgttccagcatcgtcatgatcaccaagctggtcgaggtgggcagggtgaaatgctcacggtactggccggaggactcagacacctacggggacatcaagattatgctggtgaagacagagaccctggctgagtatgtcgtgcgcacttttgccctggagcggagaggctactctgcccggcacgaggtccgccagttccacttcacagcgtggccagagcatggcgtcccctaccatgccacggggctgctggctttcatccggcgcgtgaaggcctccaccccacctgatgccgggcccattgtcatccactgcagcgcgggcaccggccgcacaggttgctatatcgtcctggatgtgatgctggacatggcagagtgtgagggcgtcgtggacatttacaactgtgtgaagactctctgctcccggcgtgtcaacatgatccagactgaggagcagtacatcttcattcatgatgcaatcctggaggcctgcctgtgtggggagaccaccatccctgtcagtgagttcaaggccacctacaaggagatgatccgcattgatcctcagagtaattcctcccagctgcgggaagagttccagacgctgaactcggtcaccccgccgctggacgtggaggagtgcagcatcgccctgttgccccggaaccgcgacaagaaccgcagcatggacgtcctgccgcccgaccgctgcctgcccttcctcatctccactgatggggactccaacaactacattaatgcagccctgactgacagctacacacggagtgcggccttcatcgtgaccctgcacccgctgcagagcaccacgcccgacttctggcggctggtctacgattacgggtgcacctccatcgtcatgctcaaccagctgaaccagtccaactccgcctggccctgcctgcagtactggccagagccaggccggcagcaatatggcctcatggaggtggagtttatgtcgggcacagctgatgaagacttagtggctcgagtcttccgggtgcagaacatctctcggttgcaggaggggcacctgctggtgcggcacttccagttcctgcgctggtctgcataccgggacacacctgactccaagaaggccttcttgcacctgctggctgaggtggacaagtggcaggccgagagtggggatgggcgcaccatcgtgcactgcctaaacgggggaggacgcagcggcaccttctgcgcctgcgccacggtcctggagatgatccgctgccacaacttggtggacgttttctttgctgccaaaaccctccggaactacaaacccaacatggtggagaccatggatcagtaccacttttgctacgatgtggccctggagtacttggaggggctggagtcaagatagcggggccctggcctggggcacccactgcacactcagggccagacccaccatcctggactggcgaggaagatcagtgcctcctgctctgcccaaacacactcccatggggcaagcactggagtggatgctgggctatcttgctcccccttccactgtgggcagggcctttcgcttgtcccatgggcgggtggtgggccaaggaggagcttagcaagtctgcagcccagccccacctccatagggtcctgcaggcctgtgctgagaggcctggtgctgcctggcagagtgacaaaggctcaggacggctggctctgggggactcaggccaagccccttggcaccatcctggcttttggcagggatgagtgaggccctgcagagagcatcccaggccaaggttcccactcagcctgccccctctgcatgtgggtagaggatgtactgggacttggcatttaggattccatctggcccagcccctgaaggtcctggggaagcaggtctcaattctgaatagccagtggggcacactgactgtcctccccaggggaactgcagcgccctcctccccactgccccctgcagcccctgagatattttgctcactatccctccccacttgcttccctgatatgtgctctgagcttccctgaaccaggatctgcctattactgctgtgccccatggggggctccttccctgcctgacccactgttgcagaatgaagtcacctcgcccccctcttcctttaatcttcaggcctcactggcctgtcctgctcagcttgggccagtgacaatctgcaaggctgaacaacagcccctggggttgaggcccctgtggctcctggtcaggctgcccgttgtggggaggggcagtgttagagcagggctggtcataccctctggagttcagaggaagaggtaggaccagtgcttttttgtttcttttgttatttttggttgggtgggtgggaaggtctctttaaaatggggcaggccacacccccattccgtgcctcaatttccccatctgtaaactgtagatatgactactgacctacctcgcagggggctgtggggaggcataagctgatgtttgtaaagcgctttgtaaataaacgtgctctctgaatgccacaaaaaa

SEQ ID NO: 414526 - DNA, 4814 bp, Homo sapiens
aattccgggcgccagtcccgctccgcgccgcgccgctccgctccggctcgggctccggctcgcctcgggctgggctcgggctccgggggcggcgtccccgcgccgggccccgggacgcggcgacgctccaaccatggcccgtgcccaggcgctcgtgctggcactcaccttccagctctgcgcgccggagaccgagactccggcagctggctgcaccttcgaggaggcaagtgacccagcagtgccctgcgagtacagccaggcccagtacgatgacttccagtgggagcaagtgcgaatccaccctggcacccgggcacctgcggacctgccccacggctcctacttgatggtcaacacttcccagcatgccccaggccagcgagcccatgtcatcttccagagcctgagcgagaatgatacccactgtgtgcagttcagctacttcctgtacagccgggacgggcacagcccgggcaccctgggcgtctacgtgcgcgttaatgggggccccctgggcagtgctgtgtggaatatgactggatcccacggccgtcagtggcaccaggctgagctggctgtcagcactttctggcccaatgaatatcaggtgctgtttgaggccctcatctccccagaccgcaggggctacatgggcctagatgacatcctgcttctcagctacccctgcgcaaaggccccacacttctcccgcctgggcgacgtggaggtcaacgcgggccagaacgcgtcgttccagtgcatggccgcgggcagagcccgaggccgaacgcttcctcttgcaacggcagagcggggcgctggtgccggcggcgggcgtgcggcacatcagccaccgcgcttcctggccactttcccgctggctgccgtgagccgcgccgagcaggacctgtaccgctgtgtgtcccaggccccgcgcggcgcgggcgtctctaacttcgcggagctcatcgtcaaggagcccccaactcccatcgcgcccccacagctgctgcgtgctggccccacctacctcatcatccagctcaacaccaactccatcattggcgacgggccgatcgtgcgcaaggagattgagtaccgcatggcgcgcgggccctgggctgaggtgcacgccgtcagcctgcagacctacaagctgtggcacctcgaccccgacacagagtatgagatcagcgtgctgctcacgcgtcccggagacggcggcactggccgccctgggccacccctcatcagccgcaccaaatgcgcagagcccatgagggcccccaaaggcctggcttttgctgagatccaggcccgtcagctgaccctgcagtgggaaccactgggctacaacgtgacgcgttgccacacctatactgtgtcgctgtgctatcactacaccctgggcagcagccacaaccagaccatccgagagtgtgtgaagacagagcaaggtgtcagccgctacaccatcaagaacctgctgccctatcggaacgttcacgtgaggcttgtcctcactaaccctgaggggcgcaaagagggcaaggaggtcactttccagacggatgaggatgtgcccagtgggattgcagccgagtccctgaccttcactccactggaggacatgatcttcctcaagtgggaggagccccaggagcccaatggtctcatcacccagtatgagatcagctaccagagcatcgagtcatcagacccggcagtgaacgtgccaggcccacgacgtaccatctccaagctccgcaatgagacctaccatgtcttctccaacctgcacccaggcaccacctacctgttctccgtgcgggcccgcacaggcaaaggcttcggccaggcggcactcactgagataaccactaacatctctgctcccagctttgattatgccgacatgccgtcacccctgggcgagtctgagaacaccatcaccgtgctgctgaggccggcacagggccgcggtgcgcccatcagtgtgtaccaggtgattgtggaggaggagcgggcgcggaggctgcggcgggagccaggtggacaggactgcttcccagtgccattgaccttcgaggcggcgctggcccgaggcctggtgcactacttcggggccgaactggcggccagcagtctacctgaggccatgccctttaccgtgggtgacaaccagacctaccgaggcttctggaacccaccacttgagcctaggaaggcctatctcatctacttccaggcagcaagccacctgaagggggagacccggctgaattgcatccgcattgccaggaaagctgcctgcaaggaaagcaagcggcccctggaggtgtcccagagatcggaggagatggggcttatcctgggcatctgtgcaggggggcttgctgtcctcatccttctcctgggtgccatcattgtcatcatccgcaaagggagagaccactatgcctactcctactacccgaagccggtgaacatgaccaaggccaccgtcaactaccgccaggagaagacacacatgatgagcgccgtggaccgcagcttcacagaccagagcaccctgcaggaggacgagcggctgggcctgtccttcatggacacccatggctacagcacccggggagaccagcgcagcggtggggtcactgaggccagcagcctcctggggggctccccgaggcgtccctgtggccggaagggctccccataccacacggggcagctgcaccctgcggtgcgtgtcgcagaccttctgcagcacatcaaccagatgaagacggccgagggttacggcttcaagcaggagtatgagagcttctttgaaggctgggacgccacaaagaagaaagacaaggtcaagggcagccggcaggagccaatgcctgcctatgatcggcaccgagtgaaactgcacccgatgctgggagaccccaatgccgactacattaatgccaactacatagatggttaccacaggtcaaaccacttcatagccactcaagggccgaagcctgagatggtctatgacttctggcgtatggtgtggcaggagcactgttccagcatcgtcatgatcaccaagctggtcgaggtgggcagggtgaaatgctcacggtactggccggaggactcagacacctacggggacatcaagattatgctggtgaagacagagaccctggctgagtatgtcgtgcgcacttttgccctggagcggagaggctactctgcccggcacgaggtccgccagttccacttcacagcgtggccagagcatggcgtcccctaccatgccacggggctgctggctttcatccggcgcgtgaaggcctccaccccacctgatgccgggcccattgtcatccactgcagcgcgggcaccggccgcacaggttgctatatcgtcctggatgtgatgctggacatggcagagtgtgagggcgtcgtggacatttacaactgtgtgaagactctctgctcccggcgtgtcaacatgatccagactgaggagcagtacatcttcattcatgatgcaatcctggaggcctgcctgtgtggggagaccaccatccctgtcagtgagttcaaggccacctacaaggagatgatccgcattgatcctcagagtaattcctcccagctgcgggaagagttccagacgctgaactcggtcaccccgccgctggacgtggaggagtgcagcatcgccctgttgccccggaaccgcgacaagaaccgcagcatggacgtcctgccgcccgaccgctgcctgcccttcctcatctccactgatggggactccaacaactacattaatgcagccctgactgacagctacacacggagtgcggccttcatcgtgaccctgcacccgctgcagagcaccacgcccgacttctggcggctggtctacgattacgggtgcacctccatcgtcatgctcaaccagctgaaccagtccaactccgcctggccctgcctgcagtactggccagagccaggccggcagcaatatggcctcatggaggtggagtttatgtcgggcacagctgatgaagacttagtggctcgagtcttccgggtgcagaacatctctcggttgcaggaggggcacctgctggtgcggcacttccagttcctgcgctggtctgcataccgggacacacctgactccaagaaggccttcttgcacctgctggctgaggtggacaagtggcaggccgagagtggggatgggcgcaccatcgtgcactgcctcccctctgcatgtgggtagaggatgtactgggacttggcatttaggattccatctggcccagcccctgaaggtcctggggaagcaggtctcaattctgaatagccagtggggcacactgactgtcctccccaggggaactgcagcgccctcctccccactgccccctgcagcccctgagatattttgctcactatccctccccacttgcttccctgatatgtgctctgagcccctgtggctcctggtcaggctgcccgttgtggggaggggcagtgttagagcagggctggtcataccctctggagttcagaggaagaggtaggaccagtgcttttttgtttcttttgttatttttggttgggtgggtgggaaggtctctttaaaatggggcaggccacacccccattccgtgcctcaatttccccatctgtaaactgtagatatgactactgacctacctcgcagggggctgtggggaggcataagctgatgtttgtaaagcgctttgtaaataaacgtgctctctgaatgccacaaaaaa

SEQ ID NO: 414527 - DNA, 174 bp, Homo sapiens
tgacaaccagacctaccgaggcttctggaacccaccacttgagcctaggaaggcctatctcatctacttccaggcagcaagccacctgaagggggtgagggaccggccagggtcatggtgggcgtggttgggtgtggggggatggcagacaggagataccttggagcaggccca

SEQ ID NO: 414528 - DNA, 5224 bp, Homo sapiens
tggctgagccagcagctgcagcagctacgggagtggccgggtggccggcgggtgccagccgccatggaggccgtgccccgcatgcccatgatctggctggacctgaaggaggccggtgactttcacttccagccagctgtgaagaagtttgtcctgaagaattatggagagaacccagaagcctacaatgaagaactgaagaagctggagttgctcagacagaatgctgtccgtgtcccacgagactttgagggctgtagtgtcctccgcaagtacctcggccagcttcattacctgcagagtcgggtccccatgggctcgggccaggaggccgctgtccctgtcacctggacagagatcttctcaggcaagtctgtggcccatgaggacatcaagtacgagcaggcctgtattctctacaaccttggagcgctgcactccatgctgggggccatggacaagcgggtgtctgaggagggcatgaaggtctcctgtacccatttccagtgcgcagccggcgccttcgcctacctacgggagcacttccctcaagcctacagcgtcgacatgagccgccagatccttacgctcaacgtcaacctcatgctgggccaggctcaggagtgcctcctggagaagtcgatgttggacaacaggaagagctttctggtggcccgcatcagtgcacaggtggtagattactacaaggaggcatgccgggccttggagaaccccgacactgcctcactgctgggccggatccagaaggactggaagaaacttgtgcagatgaagatctactacttcgcagccgtggctcatctgcacatgggaaagcaggccgaggagcagcagaagttcggggagcgggttgcatacttccagagcgccctggacaagctcaatgaagccatcaagttggccaagggccagcctgacactgtgcaagacgcgcttcgcttcactatggatgtcattgggggaaagtacaattctgccaagaaggacaacgacttcatttaccatgaggctgtcccagcattggacacccttcagcctgtaaaaggagcccccttggtgaagcccttgccagtgaaccccacagacccagctgttacaggccctgacatctttgccaaactggtacccatggctgcccacgaggcctcgtcactgtacagtgaggagaaggccaagctgctccgggagatgatggccaagattgaggacaagaatgaggtcctggaccagttcatggattcaatgcagttggatcccgagacggtggacaaccttgatgcctacagccacatcccaccccagctcatggagaagtgcgcggctctcagcgtccggcccgacactgtcaggaaccttgtacagtccatgcaagtgctgtcaggtgtgttcacggatgtggaggcttccctgaaggacatcagagatctgttggaggaggatgagctgctagagcagaagtttcaggaggcggtgggccaggcaggggccatctccatcacctccaaggctgagctggcagaggtgaggcgagaatgggccaagtacatggaagtccatgagaaggcctccttcaccaacagtgagctgcaccgtgccatgaacctgcacgtcggcaacctgcgcctgctcagcgggccgcttgaccaggtccgggctgccctgcccacaccggccctctccccagaggacaaggccgtgctgcaaaacctaaagcgcatcctggctaaggtgcaggagatgcgggaccagcgcgtgtccctggagcagcagctgcgtgagcttatccagaaagatgacatcactgcctcgctggtcaccacagaccactcagagatgaagaagttgttcgaggagcagctgaaaaagtatgaccagctgaaggtgtacctggagcagaacctggccgcccaggaccgtgtcctctgtgcactgacagaggccaacgtgcagtacgcagccgtgcggcgggtactcagcgacttggaccaaaagtggaactccacgctgcagaccctggtggcctcgtatgaagcctatgaggacctgatgaagaagtcgcaggagggcagggacttctacgcagatctggagagcaaggtggctgctctgctggagcgcacgcagtccacctgccaggcccgcgaggctgcccgccagcagctcctggacagggagctgaagaagaagccgccgccacggcccacagccccaaagccgctgctgccccgcagggaggagagtgaggcagtggaagcaggagacccccctgaggagctgcgcagcctcccccctgacatggtggctggcccacgactgcctgacaccttcctgggaagtgccaccccgctccactttcctcccagccccttccccagctccacaggcccaggaccccactatctctcaggccccttgccccctggtacctactcgggccccacccagctgatacagcccagggccccagggccccatgcaatgcccgtagcacctgggcctgccctctacccagcccctgcctacacaccggagctgggccttgtgccccgatcctccccacagcatggcgtggtgagcagtccctatgtgggggtagggccggccccaccagttgcaggtctcccctcggccccacctcctcaattctcaggccccgagttggccatggcggttcggccagccaccaccacagtagatagcatccaggcgcccatccccagccacacagccccacggccaaaccccacccctgctcctcccccgccctgcttccctgtgcccccaccgcagccactgcccacgccttacacctaccctgcaggggctaagcaacccatcccagcacagcaccacttctcttctgggatccccgcaggttttccagccccaaggattgggccccagccccagccccatcctcagccccatccttcacaagcgtttgggcctcagcccccacagcagccccttccactccagcatccacatctcttcccaccccaggccccaggactcctacccccacaatccccctacccctatgcccctcagcctggggtcctggggcagccgccaccccccctacacacccagctctacccaggtcccgctcaagaccctctgccagcccactcaggggctctgcctttccccagccctgggccccctcagcctccccatcccccactggcatatggtcctgccccttctaccagacccatgggcccccaggcagcccctcttaccattcgagggccctcgtctgctggccagtccacccctagtccccacctggtgccttcacctgccccatctccagggcctggtccggtaccccctcgccccccagcagcagaaccacccccttgcctgcgccgaggcgccgcagctgcagacctgctctcctccagcccggagagccagcatggcggcactcagtctcctgggggtgggcagcccctgctgcagcccaccaaggtggatgcagctgagggtcgtcggccgcaggccctgcggctgattgagcgggacccctatgagcatcctgagaggctgcggcagttgcagcaggagctggaggcctttcggggtcagctgggggatgtgggagctctggacactgtctggcgagagctgcaagatgcgcaggaacatgatgcccgaggccgttccatcgccattgcccgctgctactcactgaagaaccggcaccaggatgtcatgccctatgacagtaaccgtgtggtgctgcgctcaggcaaggatgactacatcaatgccagctgcgtggaggggctctccccatactgccccccgctagtggcaacccaggccccactgcctggcacagctgctgacttctggctcatggtccatgagcagaaagtgtcagtcattgtcatgctggtttctgaggctgagatggagaagcaaaaagtggcacgctacttccccaccgagaggggccagcccatggtgcacggtgccctgagcctggcattgagcagcgtccgcagcaccgaaacccatgtggagcgcgtgctgagcctgcagttccgagaccagagcctcaagcgctctcttgtgcacctgcacttccccacttggcctgagttaggcctgcccgacagccccagcaacttgctgcgcttcatccaggaggtgcacgcacattacctgcatcagcggccgctgcacacgcccatcattgtgcactgcagctctggtgtgggccgcacgggagcctttgcactgctctatgcagctgtgcaggaggtggaggctgggaacggaatccctgagctgcctcagctggtgcggcgcatgcggcagcagagaaagcacatgctgcaggagaagctgcacctcaggttctgctatgaggcagtggtgagacacgtggagcaggtcctgcagcgccatggtgtgcctcctccatgcaaacccttggccagtgcaagcatcagccagaagaaccaccttcctcaggactcccaggacctggtcctcggtggggatgtgcccatcagctccatccaggccaccattgccaagctcagcattcggcctcctggggggttggagtccccggttgccagcttgccaggccctgcagagcccccaggcctcccgccagccagcctcccagagtctaccccaatcccatcttcctccccaccccccctttcctccccactacctgaggctccccagcctaaggaggagccgccagtgcctgaagcccccagctcggggcccccctcctcctccctggaattgctggcctccttgaccccagaggccttctccctggacagctccctgcggggcaaacagcggatgagcaagcataactttctgcaggcccataacgggcaagggctgcgggccacccggccctctgacgaccccctcagccttctggatccactctggacactcaacaagacctgaacaggttttgcctacctggtccttacactacatcatcatcatctcatgcccacctgcccacacccagcagagcttctcagtgggcacagtctcttactcccatttctgctgcctttggccctgcctggcccagcctgcacccctgtggggtggaaatgtactgcaggctctgggtcaggttctgctcctttatgggacccgacatttttcagctctttgctattgaaataataaaccaccctgttctgtg

SEQ ID NO: 414529 - DNA, 5496 bp, Homo sapiens
tggctgagccagcagctgcagcagctacgggagtggccgggtggccggcgggtgccagccgccatggaggccgtgccccgcatgcccatgatctggctggacctgaaggaggccggtgactttcacttccagccagctgtgaagaagtttgtcctgaagaattatggagagaacccagaagcctacaatgaagaactgaagaagctggagttgctcagacagaatgctgtccgtgtcccacgagactttgagggctgtagtgtcctccgcaagtacctcggccagcttcattacctgcagagtcgggtccccatgggctcgggccaggaggccgctgtccctgtcacctggacagagatcttctcaggcaagtctgtggcccatgaggacatcaagtacgagcaggcctgtattctctacaaccttggagcgctgcactccatgctgggggccatggacaagcgggtgtctgaggagggcatgaaggtctcctgtacccatttccagtgcgcagccggcgccttcgcctacctacgggagcacttccctcaagcctacagcgtcgacatgagccgccagatccttacgctcaacgtcaacctcatgctgggccaggctcaggagtgcctcctggagaagtcgatgttggacaacaggaagagctttctggtggcccgcatcagtgcacaggtggtagattactacaaggaggcatgccgggccttggagaaccccgacactgcctcactgctgggccggatccagaaggactggaagaaacttgtgcagatgaagatctactacttcgcagccgtggctcatctgcacatgggaaagcaggccgaggagcagcagaagttcggggagcgggttgcatacttccagagcgccctggacaagctcaatgaagccatcaagttggccaagggccagcctgacactgtgcaagacgcgcttcgcttcactatggatgtcattgggggaaagtacaattctgccaagaaggacaacgacttcatttaccatgaggctgtcccagcattggacacccttcagcctgtaaaaggagcccccttggtgaagcccttgccagtgaaccccacagacccagctgttacaggccctgacatctttgccaaactggtacccatggctgcccacgaggcctcgtcactgtacagtgaggagaaggccaagctgctccgggagatgatggccaagattgaggacaagaatgaggtcctggaccagttcatggattcaatgcagttggatcccgagacggtggacaaccttgatgcctacagccacatcccaccccagctcatggagaagtgcgcggctctcagcgtccggcccgacactgtcaggaaccttgtacagtccatgcaagtgctgtcaggtgtgttcacggatgtggaggcttccctgaaggacatcagagatctgttggaggaggatgagctgctagagcagaagtttcaggaggcggtgggccaggcaggggccatctccatcacctccaaggctgagctggcagaggtgaggcgagaatgggccaagtacatggaagtccatgagaaggcctccttcaccaacagtgagctgcaccgtgccatgaacctgcacgtcggcaacctgcgcctgctcagcgggccgcttgaccaggtccgggctgccctgcccacaccggccctctccccagaggacaaggccgtgctgcaaaacctaaagcgcatcctggctaaggtgcaggagatgcgggaccagcgcgtgtccctggagcagcagctgcgtgagcttatccagaaagatgacatcactgcctcgctggtcaccacagaccactcagagatgaagaagttgttcgaggagcagctgaaaaagtatgaccagctgaaggtgtacctggagcagaacctggccgcccaggaccgtgtcctctgtgcactgacagaggccaacgtgcagtacgcagccgtgcggcgggtactcagcgacttggaccaaaagtggaactccacgctgcagaccctggtggcctcgtatgaagcctatgaggacctgatgaagaagtcgcaggagggcagggacttctacgcagatctggagagcaaggtggctgctctgctggagcgcacgcagtccacctgccaggcccgcgaggctgcccgccagcagctcctggacagggagctgaagaagaagccgccgccacggcccacagccccaaagccgctgctgccccgcagggaggagagtgaggcagtggaagcaggagacccccctgaggagctgcgcagcctcccccctgacatggtggctggcccacgactgcctgacaccttcctgggaagtgccaccccgctccactttcctcccagccccttccccagctccacaggcccaggaccccactatctctcaggccccttgccccctggtacctactcgggccccacccagctgatacagcccagggccccagggccccatgcaatgcccgtagcacctgggcctgccctctacccagcccctgcctacacaccggagctgggccttgtgccccgatcctccccacagcatggcgtggtgagcagtccctatgtgggggtagggccggccccaccagttgcaggtctcccctcggccccacctcctcaattctcaggccccgagttggccatggcggttcggccagccaccaccacagtagatagcatccaggcgcccatccccagccacacagccccacggccaaaccccacccctgctcctcccccgccctgcttccctgtgcccccaccgcagccactgcccacgccttacacctaccctgcaggggctaagcaacccatcccagcacagcaccacttctcttctgggatccccgcaggttttccagccccaaggattgggccccagccccagccccatcctcagccccatccttcacaagcgtttgggcctcagcccccacagcagccccttccactccagcatccacatctcttcccaccccaggccccaggactcctacccccacaatccccctacccctatgcccctcagcctggggtcctggggcagccgccaccccccctacacacccagctctacccaggtcccgctcaagaccctctgccagcccactcaggggctctgcctttccccagccctgggccccctcagcctccccatcccccactggcatatggtcctgccccttctaccagacccatgggcccccaggcagcccctcttaccattcgagggccctcgtctgctggccagtccacccctagtccccacctggtgccttcacctgccccatctccagggcctggtccggtaccccctcgccccccagcagcagaaccacccccttgcctgcgccgaggcgccgcagctgcagacctgctctcctccagcccggagagccagcatggcggcactcagtctcctgggggtgggcagcccctgctgcagcccaccaaggtggatgcagctgagggtcgtcggccgcaggccctgcggctgattgagcgggacccctatgagcatcctgagaggctgcggcagttgcagcaggagctggaggcctttcggggtcagctgggggatgtgggagctctggacactgtctggcgagagctgcaagatgcgcaggaacatgatgcccgaggccgttccatcgccattgcccgctgctactcactgaagaaccggcaccaggatgtcatgccctatgacagtaaccgtgtggtgctgcgctcaggcaaggatgactacatcaatgccagctgcgtggaggggctctccccatactgccccccgctagtggcaacccaggccccactgcctggcacagctgctgacttctggctcatggtccatgagcagaaagtgtcagtcattgtcatgctggtttctgaggctgagatggagaagcaaaaagtggcacgctacttccccaccgagaggggccagcccatggtgcacggtgccctgagcctggcattgagcagcgtccgcagcaccgaaacccatgtggagcgcgtgctgagcctgcagttccgagaccagagcctcaagcgctctcttgtgcacctgcacttccccacttggcctgagttaggcctgcccgacagccccagcaacttgctgcgcttcatccaggaggtgcacgcacattacctgcatcagcggccgctgcacacgcccatcattgtgcactgcagctctggtgtgggccgcacgggagcctttgcactgctctatgcagctgtgcaggaggtggaggctgggaacggaatccctgagctgcctcagctggtgcggcgcatgcggcagcagagaaagcacatgctgcaggagaagctgcacctcaggttctgctatgaggcagtggtgagacacgtggagcaggtcctgcagcgccatggtgtgcctcctccatgcaaacccttggccagtgcaagcatcagccagaagaaccaccttcctcaggactcccaggacctggtcctcggtggggatgtgcccatcagctccatccaggccaccattgccaagctcagcattcggcctcctggggggttggagtccccggttgccagcttgccaggccctgcagagcccccaggcctcccgccagccagcctcccagagtctaccccaatcccatcttcctccccaccccccctttcctccccactacctgaggctccccagcctaaggaggagccgccagtgcctgaagcccccagctcggggcccccctcctcctccctggaattgctggcctccttgaccccagaggccttctccctggacagctccctgcggggcaaacagcggatgagcaagcataactttctgcaggcccataacgggcaagggctgcgggccacccggccctctgacgaccccctcagccttctggatccactctggacactcaacaagacctgaacaggttttgcctacctggtccttacactacatcatcatcatctcatgcccacctgcccacacccagcagagcttctcagtgggcacagtctcttactcccatttctgctgcctttggccctgcctggcccagcctgcacccctgtggggtggaaatgtactgcaggctctgggtcaggttctgctcctttatgggacccgacatttttcagctctttgctattgaaataataaaccaccctgttctgtgaaaaaaaaaaaaaaaaaaaaaaactctcgagaacattagttttcttcttcttcctcctttaagagttgaaaccccaagaccgaaacgtttttaagggcccaaaaagggcagtttttgaaagggtttttcccacagcccccacaaaaagagaaaaaagatttccgcaggttttcacccaacttttcggggcggccaaaaacaccttggaatctccggaaaaacgggccccaaattttttcctcggaaaaagccccccccgaggaaaaaacacc

SEQ ID NO: 414530 - DNA, 286 bp, Homo sapiens
cctagttttagaagtttcaatatcaacaagacctgaacaggttttgcctacctggtccttacactacatcatcatcatctcatgcccacctgcccacacccagcagagcttctcagtgggcacagtctcttactcccatttctgctgcctttggccctgcctggcccagcctgcacccctgtggggtggaaatgtactgcaggctctgggtcaggttctgctcctttatgggacccgacatttttcagctctttgctattgaaataataaaccaccctgttctgtg

SEQ ID NO: 414531 - DNA, 318 bp, Homo sapiens
gagaaagttgtgacagagcgagtgatatgagctatctaggatgggccggagcagtgcacaggtggtagattactacaaggaggcatgccgggccttggagaaccccgacactgcctcactgctgggccggatccagaaggactggaagaaacttgtgcagatgaagatctactacttcgcagccgtggctcatctgcacatgggaaagcaggccgaggagcagcagaagttcggggagcgggttgcatacttccagagcgccctggacaagctcaatgaagccatcaagttggccaaggtaaagctgaggaaggcctg

SEQ ID NO: 414532 - DNA, 5622 bp, Homo sapiens
tttttaaaaaaggaaaaactatgtgggatagattcagtcggccagctgccagccctggcttgtggaatgttttgttgaacgactataggtatagccatggactttttgggatcccttggtgtgtgcagtcggccagctgtgatgcattttcctggcatttgtgagttagctggcctgcgtgtccactgccccatatgacaacaggcctgcttctcccatcctgccccccagaatgctgtccgtgtcccacgagactttgagggctgtagtgtcctccgcaagtacctcggccagcttcattacctgcagagtcgggtccccatgggctcgggccaggaggccgctgtccctgtcacctggacagagatcttctcaggcaagtctgtggcccatgaggacatcaagtacgagcaggcctgtattctctacaaccttggagcgctgcactccatgctgggggccatggacaagcgggtgtctgaggagggcatgaaggtctcctgtacccatttccagtgcgcagccggcgccttcgcctacctacgggagcacttccctcaagcctacagcgtcgacatgagccgccagatccttacgctcaacgtcaacctcatgctgggccaggctcaggagtgcctcctggagaagtcgatgttggacaacaggaagagctttctggtggcccgcatcagtgcacaggtggtagattactacaaggaggcatgccgggccttggagaaccccgacactgcctcactgctgggccggatccagaaggactggaagaaacttgtgcagatgaagatctactacttcgcagccgtggctcatctgcacatgggaaagcaggccgaggagcagcagaagttcggggagcgggttgcatacttccagagcgccctggacaagctcaatgaagccatcaagttggccaagggccagcctgacactgtgcaagacgcgcttcgcttcactatggatgtcattgggggaaagtacaattctgccaagaaggacaacgacttcatttaccatgaggctgtcccagcattggacacccttcagcctgtaaaaggagcccccttggtgaagcccttgccagtgaaccccacagacccagctgttacaggccctgacatctttgccaaactggtacccatggctgcccacgaggcctcgtcactgtacagtgaggagaaggccaagctgctccgggagatgatggccaagattgaggacaagaatgaggtcctggagtgagtgtgggacttgggcagggaggcggaggcaggcagcacttcccgggcctctgggggccccagggctgcctatgctgggagaggaatgaaatgtccattccaaacaggtttcccaatgctgccttcccgcctggggtggtggggctagtgtgtaaggcaggagtcatgtcttgggaggaggaggtgccttctgttccactgtttccagcagtgccctgggcatgttctgtgagaccaggccagacctggtagtaggggtccgaggtcacaatttgctctctgctgagacctcagattgagtggtgaggcttgccctagcggctcctttgacatggtcagagttggatcagcacccagcacccacctggccctgttgctccccacagccagttcatggattcaatgcagttggatcccgagacggtggacaaccttgatgcctacagccacatcccaccccagctcatggagaagtgcgcggctctcagcgtccggcccgacactgtcaggaaccttgtacagtccatgcaagtgctgtcaggtgtgttcacggatgtggaggcttccctgaaggacatcagagatctgttggaggaggatgagctgctagagcagaagtttcaggaggcggtgggccaggcaggggccatctccatcacctccaaggctgagctggcagaggtgaggcgagaatgggccaagtacatggaagtccatgagaaggcctccttcaccaacagtgagctgcaccgtgccatgaacctgcacgtcggcaacctgcgcctgctcagcgggccgcttgaccaggtccgggctgccctgcccacaccggccctctccccagaggacaaggccgtgctgcaaaacctaaagcgcatcctggctaaggtgcaggagatgcgggaccagcgcgtgtccctggagcagcagctgcgtgagcttatccagaaagatgacatcactgcctcgctggtcaccacagaccactcagagatgaagaagttgttcgaggagcagctgaaaaagtatgaccagctgaaggtgtacctggagcagaacctggccgcccaggaccgtgtcctctgtgcactgacagaggccaacgtgcagtacgcagccgtgcggcgggtactcagcgacttggaccaaaagtggaactccacgctgcagaccctggtggcctcgtatgaagcctatgaggacctgatgaagaagtcgcaggagggcagggacttctacgcagatctggagagcaaggtggctgctctgctggagcgcacgcagtccacctgccaggcccgcgaggctgcccgccagcagctcctggacagggagctgaagaagaagccgccgccacggcccacagccccaaagccgctgctgccccgcagggaggagagtgaggcagtggaagcaggagacccccctgaggagctgcgcagcctcccccctgacatggtggctggcccacgactgcctgacaccttcctgggaagtgccaccccgctccactttcctcccagccccttccccagctccacaggcccaggaccccactatctctcaggccccttgccccctggtacctactcgggccccacccagctgatacagcccagggccccagggccccatgcaatgcccgtagcacctgggcctgccctctacccagcccctgcctacacaccggagctgggccttgtgccccgatcctccccacagcatggcgtggtgagcagtccctatgtgggggtagggccggccccaccagttgcaggtctcccctcggccccacctcctcaattctcaggccccgagttggccatggcggttcggccagccaccaccacagtagatagcatccaggcgcccatccccagccacacagccccacggccaaaccccacccctgctcctcccccgccctgcttccctgtgcccccaccgcagccactgcccacgccttacacctaccctgcaggggctaagcaacccatcccagcacagcaccacttctcttctgggatccccgcaggttttccagccccaaggattgggccccagccccagccccatcctcagccccatccttcacaagcgtttgggcctcagcccccacagcagccccttccactccagcatccacatctcttcccaccccaggccccaggactcctacccccacaatccccctacccctatgcccctcagcctggggtcctggggcagccgccaccccccctacacacccagctctacccaggtcccgctcaagaccctctgccagcccactcaggggctctgcctttccccagccctgggccccctcagcctccccatcccccactggcatatggtcctgccccttctaccagacccatgggcccccaggcagcccctcttaccattcgagggccctcgtctgctggccagtccacccctagtccccacctggtgccttcacctgccccatctccagggcctggtccggtaccccctcgccccccagcagcagaaccacccccttgcctgcgccgaggcgccgcagctgcagacctgctctcctccagcccggagagccagcatggcggcactcagtctcctgggggtgggcagcccctgctgcagcccaccaaggtggatgcagctgagggtcgtcggccgcaggccctgcggctgattgagcgggacccctatgagcatcctgagaggctgcggcagttgcagcaggagctggaggcctttcggggtcagctgggggatgtgggagctctggacactgtctggcgagagctgcaagatgcgcaggaacatgatgcccgaggccgttccatcgccattgcccgctgctactcactgaagaaccggcaccaggatgtcatgccctatgacagtaaccgtgtggtgctgcgctcaggcaaggatgactacatcaatgccagctgcgtggaggggctctccccatactgccccccgctagtggcaacccaggccccactgcctggcacagctgctgacttctggctcatggtccatgagcagaaagtgtcagtcattgtcatgctggtttctgaggctgagatggagaagcaaaaagtggcacgctacttccccaccgagaggggccagcccatggtgcacggtgccctgagcctggcattgagcagcgtccgcagcaccgaaacccatgtggagcgcgtgctgagcctgcagttccgagaccagagcctcaagcgctctcttgtgcacctgcacttccccacttggcctgagttaggcctgcccgacagccccagcaacttgctgcgcttcatccaggaggtgcacgcacattacctgcatcagcggccgctgcacacgcccatcattgtgcactgcagctctggtgtgggccgcacgggagcctttgcactgctctatgcagctgtgcaggaggtggaggctgggaacggaatccctgagctgcctcagctggtgcggcgcatgcggcagcagagaaagcacatgctgcaggagaagctgcacctcaggttctgctatgaggcagtggtgagacacgtggagcaggtcctgcagcgccatggtgtgcctcctccatgcaaacccttggccagtgcaagcatcagccagaagaaccaccttcctcaggactcccaggacctggtcctcggtggggatgtgcccatcagctccatccaggccaccattgccaagctcagcattcggcctcctggggggttggagtccccggttgccagcttgccaggccctgcagagcccccaggcctcccgccagccagcctcccagagtctaccccaatcccatcttcctccccaccccccctttcctccccactacctgaggctccccagcctaaggaggagccgccagtgcctgaagcccccagctcggggcccccctcctcctccctggaattgctggcctccttgaccccagaggccttctccctggacagctccctgcggggcaaacagcggatgagcaagcataactttctgcaggcccataacgggcaagggctgcgggccacccggccctctgacgaccccctcagccttctggatccactctggacactcaacaagacctgaacaggttttgcctacctggtccttacactacatcatcatcatctcatgcccacctgcccacacccagcagagcttctcagtgggcacagtctcttactcccatttctgctgcctttggccctgcctggcccagcctgcacccctgtggggtggaaatgtactgcaggctctgggtcaggttctgctcctttatgggacccgacatttttcagctctttgctattgaaataataaaccaccctgttctgtg

SEQ ID NO: 414533 - DNA, 5386 bp, Homo sapiens
ctctagaggatctccctgtagtcgctcttggagtgtcctccgcaagtacctcggccagcttcattacctgcagagtcgggtccccatgggctcgggccaggaggccgctgtccctgtcacctggacagagatcttctcaggcaagtctgtggcccatgaggacatcaagtacgagcaggcctgtattctctacaaccttggagcgctgcactccatgctgggggccatggacaagcgggtgtctgaggagggcatgaaggtctcctgtacccatttccagtgcgcagccggcgccttcgcctacctacgggagcacttccctcaagcctacagcgtcgacatgagccgccagatccttacgctcaacgtcaacctcatgctgggccaggctcaggagtgcctcctggagaagtcgatgttggacaacaggaagagctttctggtggcccgcatcagtgcacaggtggtagattactacaaggaggcatgccgggccttggagaaccccgacactgcctcactgctgggccggatccagaaggactggaagaaacttgtgcagatgaagatctactacttcgcagccgtggctcatctgcacatgggaaagcaggccgaggagcagcagaagttcggggagcgggttgcatacttccagagcgccctggacaagctcaatgaagccatcaagttggccaagggccagcctgacactgtgcaagacgcgcttcgcttcactatggatgtcattgggggaaagtacaattctgccaagaaggacaacgacttcatttaccatgaggctgtcccagcattggacacccttcagcctgtaaaaggagcccccttggtgaagcccttgccagtgaaccccacagacccagctgttacaggccctgacatctttgccaaactggtacccatggctgcccacgaggcctcgtcactgtacagtgaggagaaggccaagctgctccgggagatgatggccaagattgaggacaagaatgaggtcctggagtgagtgtgggacttgggcagggaggcggaggcaggcagcacttcccgggcctctgggggccccagggctgcctatgctgggagaggaatgaaatgtccattccaaacaggtttcccaatgctgccttcccgcctggggtggtggggctagtgtgtaaggcaggagtcatgtcttgggaggaggaggtgccttctgttccactgtttccagcagtgccctgggcatgttctgtgagaccaggccagacctggtagtaggggtccgaggtcacaatttgctctctgctgagacctcagattgagtggtgaggcttgccctagcggctcctttgacatggtcagagttggatcagcacccagcacccacctggccctgttgctccccacagccagttcatggattcaatgcagttggatcccgagacggtggacaaccttgatgcctacagccacatcccaccccagctcatggagaagtgcgcggctctcagcgtccggcccgacactgtcaggaaccttgtacagtccatgcaagtgctgtcaggtgtgttcacggatgtggaggcttccctgaaggacatcagagatctgttggaggaggatgagctgctagagcagaagtttcaggaggcggtgggccaggcaggggccatctccatcacctccaaggctgagctggcagaggtgaggcgagaatgggccaagtacatggaagtccatgagaaggcctccttcaccaacagtgagctgcaccgtgccatgaacctgcacgtcggcaacctgcgcctgctcagcgggccgcttgaccaggtccgggctgccctgcccacaccggccctctccccagaggacaaggccgtgctgcaaaacctaaagcgcatcctggctaaggtgcaggagatgcgggaccagcgcgtgtccctggagcagcagctgcgtgagcttatccagaaagatgacatcactgcctcgctggtcaccacagaccactcagagatgaagaagttgttcgaggagcagctgaaaaagtatgaccagctgaaggtgtacctggagcagaacctggccgcccaggaccgtgtcctctgtgcactgacagaggccaacgtgcagtacgcagccgtgcggcgggtactcagcgacttggaccaaaagtggaactccacgctgcagaccctggtggcctcgtatgaagcctatgaggacctgatgaagaagtcgcaggagggcagggacttctacgcagatctggagagcaaggtggctgctctgctggagcgcacgcagtccacctgccaggcccgcgaggctgcccgccagcagctcctggacagggagctgaagaagaagccgccgccacggcccacagccccaaagccgctgctgccccgcagggaggagagtgaggcagtggaagcaggagacccccctgaggagctgcgcagcctcccccctgacatggtggctggcccacgactgcctgacaccttcctgggaagtgccaccccgctccactttcctcccagccccttccccagctccacaggcccaggaccccactatctctcaggccccttgccccctggtacctactcgggccccacccagctgatacagcccagggccccagggccccatgcaatgcccgtagcacctgggcctgccctctacccagcccctgcctacacaccggagctgggccttgtgccccgatcctccccacagcatggcgtggtgagcagtccctatgtgggggtagggccggccccaccagttgcaggtctcccctcggccccacctcctcaattctcaggccccgagttggccatggcggttcggccagccaccaccacagtagatagcatccaggcgcccatccccagccacacagccccacggccaaaccccacccctgctcctcccccgccctgcttccctgtgcccccaccgcagccactgcccacgccttacacctaccctgcaggggctaagcaacccatcccagcacagcaccacttctcttctgggatccccgcaggttttccagccccaaggattgggccccagccccagccccatcctcagccccatccttcacaagcgtttgggcctcagcccccacagcagccccttccactccagcatccacatctcttcccaccccaggccccaggactcctacccccacaatccccctacccctatgcccctcagcctggggtcctggggcagccgccaccccccctacacacccagctctacccaggtcccgctcaagaccctctgccagcccactcaggggctctgcctttccccagccctgggccccctcagcctccccatcccccactggcatatggtcctgccccttctaccagacccatgggcccccaggcagcccctcttaccattcgagggccctcgtctgctggccagtccacccctagtccccacctggtgccttcacctgccccatctccagggcctggtccggtaccccctcgccccccagcagcagaaccacccccttgcctgcgccgaggcgccgcagctgcagacctgctctcctccagcccggagagccagcatggcggcactcagtctcctgggggtgggcagcccctgctgcagcccaccaaggtggatgcagctgagggtcgtcggccgcaggccctgcggctgattgagcgggacccctatgagcatcctgagaggctgcggcagttgcagcaggagctggaggcctttcggggtcagctgggggatgtgggagctctggacactgtctggcgagagctgcaagatgcgcaggaacatgatgcccgaggccgttccatcgccattgcccgctgctactcactgaagaaccggcaccaggatgtcatgccctatgacagtaaccgtgtggtgctgcgctcaggcaaggatgactacatcaatgccagctgcgtggaggggctctccccatactgccccccgctagtggcaacccaggccccactgcctggcacagctgctgacttctggctcatggtccatgagcagaaagtgtcagtcattgtcatgctggtttctgaggctgagatggagaagcaaaaagtggcacgctacttccccaccgagaggggccagcccatggtgcacggtgccctgagcctggcattgagcagcgtccgcagcaccgaaacccatgtggagcgcgtgctgagcctgcagttccgagaccagagcctcaagcgctctcttgtgcacctgcacttccccacttggcctgagttaggcctgcccgacagccccagcaacttgctgcgcttcatccaggaggtgcacgcacattacctgcatcagcggccgctgcacacgcccatcattgtgcactgcagctctggtgtgggccgcacgggagcctttgcactgctctatgcagctgtgcaggaggtggaggctgggaacggaatccctgagctgcctcagctggtgcggcgcatgcggcagcagagaaagcacatgctgcaggagaagctgcacctcaggttctgctatgaggcagtggtgagacacgtggagcaggtcctgcagcgccatggtgtgcctcctccatgcaaacccttggccagtgcaagcatcagccagaagaaccaccttcctcaggactcccaggacctggtcctcggtggggatgtgcccatcagctccatccaggccaccattgccaagctcagcattcggcctcctggggggttggagtccccggttgccagcttgccaggccctgcagagcccccaggcctcccgccagccagcctcccagagtctaccccaatcccatcttcctccccaccccccctttcctccccactacctgaggctccccagcctaaggaggagccgccagtgcctgaagcccccagctcggggcccccctcctcctccctggaattgctggcctccttgaccccagaggccttctccctggacagctccctgcggggcaaacagcggatgagcaagcataactttctgcaggcccataacgggcaagggctgcgggccacccggccctctgacgaccccctcagccttctggatccactctggacactcaacaagacctgaacaggttttgcctacctggtccttacactacatcatcatcatctcatgcccacctgcccacacccagcagagcttctcagtgggcacagtctcttactcccatttctgctgcctttggccctgcctggcccagcctgcacccctgtggggtggaaatgtactgcaggctctgggtcaggttctgctcctttatgggacccgacatttttcagctctttgctattgaaataataaaccaccctgttctgtg

SEQ ID NO: 414534 - DNA, 5585 bp, Homo sapiens
tttttaaaaaaggaaaaactatgtgggatagattcagtcggccagctgccagccctggcttgtggaatgttttgttgaacgactataggtatagccatggactttttgggatcccttggtgtgtgcagtcggccagctgtgatgcattttcctggcatttgtgagttagctggcctgcgtgtccactgccccatatgacaacaggcctgcttctcccatcctgccccccagaatgctgtccgtgtcccacgagactttgagggctgtagtgtcctccgcaagtacctcggccagcttcattacctgcagagtcgggtccccatgggctcgggccaggaggccgctgtccctgtcacctggacagagatcttctcaggcaagtctgtggcccatgaggacatcaagtacgagcaggcctgtattctctacaaccttggagcgctgcactccatgctgggggccatggacaagcgggtgtctgaggagggcatgaaggtctcctgtacccatttccagtgcgcagccggcgccttcgcctacctacgggagcacttccctcaagcctacagcgtcgacatgagccgccagatccttacgctcaacgtcaacctcatgctgggccaggctcaggagtgcctcctggagaagtcgatgttggacaacaggaagagctttctggtggcccgcatcagtgcacaggtggtagattactacaaggaggcatgccgggccttggagaaccccgacactgcctcactgctgggccggatccagaaggactggaagaaacttgtgcagatgaagatctactacttcgcagccgtggctcatctgcacatgggaaagcaggccgaggagcagcagaagttcggggagcgggttgcatacttccagagcgccctggacaagctcaatgaagccatcaagttggccaagggccagcctgacactgtgcaagacgcgcttcgcttcactatggatgtcattgggggaaagtacaattctgccaagaaggacaacgacttcatttaccatgaggctgtcccagcattggacacccttcagcctgtaaaaggagcccccttggtgaagcccttgccagtgaaccccacagacccagctgttacaggccctgacatctttgccaaactggtacccatggctgcccacgaggcctcgtcactgtacagtgaggagaaggccaagctgctccgggagatgatggccaagattgaggacaagaatgaggtcctggagtgagtgtgggacttgggcagggaggcggaggcaggcagcacttcccgggcctctgggggccccagggctgcctatgctgggagaggaatgaaatgtccattccaaacaggtttcccaatgctgccttcccgcctggggtggtggggctagtgtgtaaggcaggagtcatgtcttgggaggaggaggtgccttctgttccactgtttccagcagtgccctgggcatgttctgtgagaccaggccagacctggtagtaggggtccgaggtcacaatttgctctctgctgagacctcagattgagtggtgaggcttgccctagcggctcctttgacatggtcagagttggatcagcacccagcacccacctggccctgttgctccccacagccagttcatggattcaatgcagttggatcccgagacggtggacaaccttgatgcctacagccacatcccaccccagctcatggagaagtgcgcggctctcagcgtccggcccgacactgtcaggaaccttgtacagtccatgcaagtgctgtcaggtgtgttcacggatgtggaggcttccctgaaggacatcagagatctgttggaggaggatgagctgctagagcagaagtttcaggaggcggtgggccaggcaggggccatctccatcacctccaaggctgagctggcagaggtgaggcgagaatgggccaagtacatggaagtccatgagaaggcctccttcaccaacagtgagctgcaccgtgccatgaacctgcacgtcggcaacctgcgcctgctcagcgggccgcttgaccagaggacaaggccgtgctgcaaaacctaaagcgcatcctggctaaggtgcaggagatgcgggaccagcgcgtgtccctggagcagcagctgcgtgagcttatccagaaagatgacatcactgcctcgctggtcaccacagaccactcagagatgaagaagttgttcgaggagcagctgaaaaagtatgaccagctgaaggtgtacctggagcagaacctggccgcccaggaccgtgtcctctgtgcactgacagaggccaacgtgcagtacgcagccgtgcggcgggtactcagcgacttggaccaaaagtggaactccacgctgcagaccctggtggcctcgtatgaagcctatgaggacctgatgaagaagtcgcaggagggcagggacttctacgcagatctggagagcaaggtggctgctctgctggagcgcacgcagtccacctgccaggcccgcgaggctgcccgccagcagctcctggacagggagctgaagaagaagccgccgccacggcccacagccccaaagccgctgctgccccgcagggaggagagtgaggcagtggaagcaggagacccccctgaggagctgcgcagcctcccccctgacatggtggctggcccacgactgcctgacaccttcctgggaagtgccaccccgctccactttcctcccagccccttccccagctccacaggcccaggaccccactatctctcaggccccttgccccctggtacctactcgggccccacccagctgatacagcccagggccccagggccccatgcaatgcccgtagcacctgggcctgccctctacccagcccctgcctacacaccggagctgggccttgtgccccgatcctccccacagcatggcgtggtgagcagtccctatgtgggggtagggccggccccaccagttgcaggtctcccctcggccccacctcctcaattctcaggccccgagttggccatggcggttcggccagccaccaccacagtagatagcatccaggcgcccatccccagccacacagccccacggccaaaccccacccctgctcctcccccgccctgcttccctgtgcccccaccgcagccactgcccacgccttacacctaccctgcaggggctaagcaacccatcccagcacagcaccacttctcttctgggatccccgcaggttttccagccccaaggattgggccccagccccagccccatcctcagccccatccttcacaagcgtttgggcctcagcccccacagcagccccttccactccagcatccacatctcttcccaccccaggccccaggactcctacccccacaatccccctacccctatgcccctcagcctggggtcctggggcagccgccaccccccctacacacccagctctacccaggtcccgctcaagaccctctgccagcccactcaggggctctgcctttccccagccctgggccccctcagcctccccatcccccactggcatatggtcctgccccttctaccagacccatgggcccccaggcagcccctcttaccattcgagggccctcgtctgctggccagtccacccctagtccccacctggtgccttcacctgccccatctccagggcctggtccggtaccccctcgccccccagcagcagaaccacccccttgcctgcgccgaggcgccgcagctgcagacctgctctcctccagcccggagagccagcatggcggcactcagtctcctgggggtgggcagcccctgctgcagcccaccaaggtggatgcagctgagggtcgtcggccgcaggccctgcggctgattgagcgggacccctatgagcatcctgagaggctgcggcagttgcagcaggagctggaggcctttcggggtcagctgggggatgtgggagctctggacactgtctggcgagagctgcaagatgcgcaggaacatgatgcccgaggccgttccatcgccattgcccgctgctactcactgaagaaccggcaccaggatgtcatgccctatgacagtaaccgtgtggtgctgcgctcaggcaaggatgactacatcaatgccagctgcgtggaggggctctccccatactgccccccgctagtggcaacccaggccccactgcctggcacagctgctgacttctggctcatggtccatgagcagaaagtgtcagtcattgtcatgctggtttctgaggctgagatggagaagcaaaaagtggcacgctacttccccaccgagaggggccagcccatggtgcacggtgccctgagcctggcattgagcagcgtccgcagcaccgaaacccatgtggagcgcgtgctgagcctgcagttccgagaccagagcctcaagcgctctcttgtgcacctgcacttccccacttggcctgagttaggcctgcccgacagccccagcaacttgctgcgcttcatccaggaggtgcacgcacattacctgcatcagcggccgctgcacacgcccatcattgtgcactgcagctctggtgtgggccgcacgggagcctttgcactgctctatgcagctgtgcaggaggtggaggctgggaacggaatccctgagctgcctcagctggtgcggcgcatgcggcagcagagaaagcacatgctgcaggagaagctgcacctcaggttctgctatgaggcagtggtgagacacgtggagcaggtcctgcagcgccatggtgtgcctcctccatgcaaacccttggccagtgcaagcatcagccagaagaaccaccttcctcaggactcccaggacctggtcctcggtggggatgtgcccatcagctccatccaggccaccattgccaagctcagcattcggcctcctggggggttggagtccccggttgccagcttgccaggccctgcagagcccccaggcctcccgccagccagcctcccagagtctaccccaatcccatcttcctccccaccccccctttcctccccactacctgaggctccccagcctaaggaggagccgccagtgcctgaagcccccagctcggggcccccctcctcctccctggaattgctggcctccttgaccccagaggccttctccctggacagctccctgcggggcaaacagcggatgagcaagcataactttctgcaggcccataacgggcaagggctgcgggccacccggccctctgacgaccccctcagccttctggatccactctggacactcaacaagacctgaacaggttttgcctacctggtccttacactacatcatcatcatctcatgcccacctgcccacacccagcagagcttctcagtgggcacagtctcttactcccatttctgctgcctttggccctgcctggcccagcctgcacccctgtggggtggaaatgtactgcaggctctgggtcaggttctgctcctttatgggacccgacatttttcagctctttgctattgaaataataaaccaccctgttctgtg

SEQ ID NO: 414535 - DNA, 5807 bp, Homo sapiens
tttttaaaaaaggaaaaactatgtgggatagattcagtcggccagctgccagccctggcttgtggaatgttttgttgaacgactataggtatagccatggactttttgggatcccttggtgtgtgcagtcggccagctgtgatgcattttcctggcatttgtgagttagctggcctgcgtgtccactgccccatatgacaacaggcctgcttctcccatcctgccccccagaatgctgtccgtgtcccacgagactttgagggctgtagtgtcctccgcaagtacctcggccagcttcattacctgcagagtcgggtccccatgggctcgggccaggaggccgctgtccctgtcacctggacagagatcttctcaggcaagtctgtggcccatgaggacatcaagtacgagcaggcctgtattctctacaaccttggagcgctgcactccatgctgggggccatggacaagcgggtgtctgaggagggcatgaaggtctcctgtacccatttccagtgcgcagccggcgccttcgcctacctacgggagcacttccctcaagcctacagcgtcgacatgagccgccagatccttacgctcaacgtcaacctcatgctgggccaggctcaggagtgcctcctggagaagtcgatgttggacaacaggaagagctttctggtggcccgcatcagtgcacaggtggtagattactacaaggaggcatgccgggccttggagaaccccgacactgcctcactgctgggccggatccagaaggactggaagaaacttgtgcagatgaagatctactacttcgcagccgtggctcatctgcacatgggaaagcaggccgaggagcagcagaagttcggggagcgggttgcatacttccagagcgccctggacaagctcaatgaagccatcaagttggccaagggccagcctgacactgtgcaagacgcgcttcgcttcactatggatgtcattgggggaaagtacaattctgccaagaaggacaacgacttcatttaccatgaggctgtcccagcattggacacccttcagcctgtaaaaggagcccccttggtgaagcccttgccagtgaaccccacagacccagctgttacaggccctgacatctttgccaaactggtacccatggctgcccacgaggcctcgtcactgtacagtgaggagaaggccaagctgctccgggagatgatggccaagattgaggacaagaatgaggtcctggagtgagtgtgggacttgggcagggaggcggaggcaggcagcacttcccgggcctctgggggccccagggctgcctatgctgggagaggaatgaaatgtccattccaaacaggtttcccaatgctgccttcccgcctggggtggtggggctagtgtgtaaggcaggagtcatgtcttgggaggaggaggtgccttctgttccactgtttccagcagtgccctgggcatgttctgtgagaccaggccagacctggtagtaggggtccgaggtcacaatttgctctctgctgagacctcagattgagtggtgaggcttgccctagcggctcctttgacatggtcagagttggatcagcacccagcacccacctggccctgttgctccccacagccagttcatggattcaatgcagttggatcccgagacggtggacaaccttgatgcctacagccacatcccaccccagctcatggagaagtgcgcggctctcagcgtccggcccgacactgtcaggaaccttgtacagtccatgcaagtgctgtcaggtgtgttcacggatgtggaggcttccctgaaggacatcagagatctgttggaggaggatgagctgctagagcagaagtttcaggaggcggtgggccaggcaggggccatctccatcacctccaaggctgagctggcagaggtgaggcgagaatgggccaagtacatggaagtccatgagaaggcctccttcaccaacagtgagctgcaccgtgccatgaacctgcacgtcggcaacctgcgcctgctcagcgggccgcttgaccaggtccgggctgccctgcccacaccggccctctccccagaggacaaggccgtgctgcaaaacctaaagcgcatcctggctaaggtgcaggagatgcgggaccagcgcgtgtccctggagcagcagctgcgtgagcttatccagaaagatgacatcactgcctcgctggtcaccacagaccactcagagatgaaggtgggctgggtgagcagggtagaggggctctggctccgggccccacccttaggagtcgaggccctgagtgtccgtccctggcccccaccccttcctcagaagttgttcgaggagcagctgaaaaagtatgaccagctgaaggtgtacctggagcagaacctggccgcccaggaccgtgtcctctgtgcactgacagaggccaacgtgcagtacgcagccgtgcggcgggtactcagcgacttggaccaaaagtcagtgcccagtcctctgctctttcccggagccacctggagcccagccccatggttcacctggagctggcccttctgcccaccaggtggaactccacgctgcagaccctggtggcctcgtatgaagcctatgaggacctgatgaagaagtcgcaggagggcagggacttctacgcagatctggagagcaaggtggctgctctgctggagcgcacgcagtccacctgccaggcccgcgaggctgcccgccagcagctcctggacagggagctgaagaagaagccgccgccacggcccacagccccaaagccgctgctgccccgcagggaggagagtgaggcagtggaagcaggagacccccctgaggagctgcgcagcctcccccctgacatggtggctggcccacgactgcctgacaccttcctgggaagtgccaccccgctccactttcctcccagccccttccccagctccacaggcccaggaccccactatctctcaggccccttgccccctggtacctactcgggccccacccagctgatacagcccagggccccagggccccatgcaatgcccgtagcacctgggcctgccctctacccagcccctgcctacacaccggagctgggccttgtgccccgatcctccccacagcatggcgtggtgagcagtccctatgtgggggtagggccggccccaccagttgcaggtctcccctcggccccacctcctcaattctcaggccccgagttggccatggcggttcggccagccaccaccacagtagatagcatccaggcgcccatccccagccacacagccccacggccaaaccccacccctgctcctcccccgccctgcttccctgtgcccccaccgcagccactgcccacgccttacacctaccctgcaggggctaagcaacccatcccagcacagcaccacttctcttctgggatccccgcaggttttccagccccaaggattgggccccagccccagccccatcctcagccccatccttcacaagcgtttgggcctcagcccccacagcagccccttccactccagcatccacatctcttcccaccccaggccccaggactcctacccccacaatccccctacccctatgcccctcagcctggggtcctggggcagccgccaccccccctacacacccagctctacccaggtcccgctcaagaccctctgccagcccactcaggggctctgcctttccccagccctgggccccctcagcctccccatcccccactggcatatggtcctgccccttctaccagacccatgggcccccaggcagcccctcttaccattcgagggccctcgtctgctggccagtccacccctagtccccacctggtgccttcacctgccccatctccagggcctggtccggtaccccctcgccccccagcagcagaaccacccccttgcctgcgccgaggcgccgcagctgcagacctgctctcctccagcccggagagccagcatggcggcactcagtctcctgggggtgggcagcccctgctgcagcccaccaaggtggatgcagctgagggtcgtcggccgcaggccctgcggctgattgagcgggacccctatgagcatcctgagaggctgcggcagttgcagcaggagctggaggcctttcggggtcagctgggggatgtgggagctctggacactgtctggcgagagctgcaagatgcgcaggaacatgatgcccgaggccgttccatcgccattgcccgctgctactcactgaagaaccggcaccaggatgtcatgccctatgacagtaaccgtgtggtgctgcgctcaggcaaggatgactacatcaatgccagctgcgtggaggggctctccccatactgccccccgctagtggcaacccaggccccactgcctggcacagctgctgacttctggctcatggtccatgagcagaaagtgtcagtcattgtcatgctggtttctgaggctgagatggagaagcaaaaagtggcacgctacttccccaccgagaggggccagcccatggtgcacggtgccctgagcctggcattgagcagcgtccgcagcaccgaaacccatgtggagcgcgtgctgagcctgcagttccgagaccagagcctcaagcgctctcttgtgcacctgcacttccccacttggcctgagttaggcctgcccgacagccccagcaacttgctgcgcttcatccaggaggtgcacgcacattacctgcatcagcggccgctgcacacgcccatcattgtgcactgcagctctggtgtgggccgcacgggagcctttgcactgctctatgcagctgtgcaggaggtggaggctgggaacggaatccctgagctgcctcagctggtgcggcgcatgcggcagcagagaaagcacatgctgcaggagaagctgcacctcaggttctgctatgaggcagtggtgagacacgtggagcaggtcctgcagcgccatggtgtgcctcctccatgcaaacccttggccagtgcaagcatcagccagaagaaccaccttcctcaggactcccaggacctggtcctcggtggggatgtgcccatcagctccatccaggccaccattgccaagctcagcattcggcctcctggggggttggagtccccggttgccagcttgccaggccctgcagagcccccaggcctcccgccagccagcctcccagagtctaccccaatcccatcttcctccccaccccccctttcctccccactacctgaggctccccagcctaaggaggagccgccagtgcctgaagcccccagctcggggcccccctcctcctccctggaattgctggcctccttgaccccagaggccttctccctggacagctccctgcggggcaaacagcggatgagcaagcataactttctgcaggcccataacgggcaagggctgcgggccacccggccctctgacgaccccctcagccttctggatccactctggacactcaacaagacctgaacaggttttgcctacctggtccttacactacatcatcatcatctcatgcccacctgcccacacccagcagagcttctcagtgggcacagtctcttactcccatttctgctgcctttggccctgcctggcccagcctgcacccctgtggggtggaaatgtactgcaggctctgggtcaggttctgctcctttatgggacccgacatttttcagctctttgctattgaaataataaaccaccctgttctgtg

SEQ ID NO: 414536 - DNA, 2862 bp, Homo sapiens
ttcacaagcgtttgggcctcatccacacagcagtcccttccactccaggaccccactatctctcaggccccttgccccctggtacctactcgggccccacccagctgatacagcccagggccccagggccccatgcaatgcccgtagcacctgggcctgccctctacccagcccctgcctacacaccggagctgggccttgtgccccgatcctccccacagcatggcgtggtgagcagtccctatgtgggggtagggccggccccaccagttgcaggtctcccctcggccccacctcctcaattctcaggccccgagttggccatggcggttcggccagccaccaccacagtagatagcatccaggcgcccatccccagccacacagccccacggccaaaccccacccctgctcctcccccgccctgcttccctgtgcccccaccgcagccactgcccacgccttacacctaccctgcaggggctaagcaacccatcccagcacagcaccacttctcttctgggatccccgcaggttttccagccccaaggattgggccccagccccagccccatcctcagccccatccttcacaagcgtttgggcctcagcccccacagcagccccttccactccagcatccacatctcttcccaccccaggccccaggactcctacccccacaatccccctacccctatgcccctcagcctggggtcctggggcagccgccaccccccctacacacccagctctacccaggtcccgctcaagaccctctgccagcccactcaggggctctgcctttccccagccctgggccccctcagcctccccatcccccactggcatatggtcctgccccttctaccagacccatgggcccccaggcagcccctcttaccattcgagggccctcgtctgctggccagtccacccctagtccccacctggtgccttcacctgccccatctccagggcctggtccggtaccccctcgccccccagcagcagaaccacccccttgcctgcgccgaggcgccgcagctgcagacctgctctcctccagcccggagagccagcatggcggcactcagtctcctgggggtgggcagcccctgctgcagcccaccaaggtggatgcagctgagggtcgtcggccgcaggccctgcggctgattgagcgggacccctatgagcatcctgagaggctgcggcagttgcagcaggagctggaggcctttcggggtcagctgggggatgtgggagctctggacactgtctggcgagagctgcaagatgcgcaggaacatgatgcccgaggccgttccatcgccattgcccgctgctactcactgaagaaccggcaccaggatgtcatgccctatgacagtaaccgtgtggtgctgcgctcaggcaaggatgactacatcaatgccagctgcgtggaggggctctccccatactgccccccgctagtggcaacccaggccccactgcctggcacagctgctgacttctggctcatggtccatgagcagaaagtgtcagtcattgtcatgctggtttctgaggctgagatggagaagcaaaaagtggcacgctacttccccaccgagaggggccagcccatggtgcacggtgccctgagcctggcattgagcagcgtccgcagcaccgaaacccatgtggagcgcgtgctgagcctgcagttccgagaccagagcctcaagcgctctcttgtgcacctgcacttccccacttggcctgagttaggcctgcccgacagccccagcaacttgctgcgcttcatccaggaggtgcacgcacattacctgcatcagcggccgctgcacacgcccatcattgtgcactgcagctctggtgtgggccgcacgggagcctttgcactgctctatgcagctgtgcaggaggtggaggctgggaacggaatccctgagctgcctcagctggtgcggcgcatgcggcagcagagaaagcacatgctgcaggagaagctgcacctcaggttctgctatgaggcagtggtgagacacgtggagcaggtcctgcagcgccatggtgtgcctcctccatgcaaacccttggccagtgcaagcatcagccagaagaaccaccttcctcaggactcccaggacctggtcctcggtggggatgtgcccatcagctccatccaggccaccattgccaagctcagcattcggcctcctggggggttggagtccccggttgccagcttgccaggccctgcagagcccccaggcctcccgccagccagcctcccagagtctaccccaatcccatcttcctccccaccccccctttcctccccactacctgaggctccccagcctaaggaggagccgccagtgcctgaagcccccagctcggggcccccctcctcctccctggaattgctggcctccttgaccccagaggccttctccctggacagctccctgcggggcaaacagcggatgagcaagcataactttctgcaggcccataacgggcaagggctgcgggccacccggccctctgacgaccccctcagccttctggatccactctggacactcaacaagacctgaacaggttttgcctacctggtccttacactacatcatcatcatctcatgcccacctgcccacacccagcagagcttctcagtgggcacagtctcttactcccatttctgctgcctttggccctgcctggcccagcctgcacccctgtggggtggaaatgtactgcaggctctgggtcaggttctgctcctttatgggacccgacatttttcagctctttgctattgaaataataaaccaccctgttctgtg

SEQ ID NO: 414537 - DNA, 5800 bp, Homo sapiens
tttttaaaaaaggaaaaactatgtgggatagattcagtcggccagctgccagccctggcttgtggaatgttttgttgaacgactataggtatagccatggactttttgggatcccttggtgtgtgcagtcggccagctgtgatgcattttcctggcatttgtgagttagctggcctgcgtgtccactgccccatatgacaacaggcctgcttctcccatcctgccccccagaatgctgtccgtgtcccacgagactttgagggctgtagtgtcctccgcaagtacctcggccagcttcattacctgcagagtcgggtccccatgggctcgggccaggaggccgctgtccctgtcacctggacagagatcttctcaggcaagtctgtggcccatgaggacatcaagtacgagcaggcctgtattctctacaaccttggagcgctgcactccatgctgggggccatggacaagcgggtgtctgaggagggcatgaaggtctcctgtacccatttccagtgcgcagccggcgccttcgcctacctacgggagcacttccctcaagcctacagcgtcgacatgagccgccagatccttacgctcaacgtcaacctcatgctgggccaggctcaggagtgcctcctggagaagtcgatgttggacaacaggaagagctttctggtggcccgcatcagtgcacaggtggtagattactacaaggaggcatgccgggccttggagaaccccgacactgcctcactgctgggccggatccagaaggactggaagaaacttgtgcagatgaagatctactacttcgcagccgtggctcatctgcacatgggaaagcaggccgaggagcagcagaagttcggggagcgggttgcatacttccagagcgccctggacaagctcaatgaagccatcaagttggccaagggccagcctgacactgtgcaagacgcgcttcgcttcactatggatgtcattgggggaaagtacaattctgccaagaaggacaacgacttcatttaccatgaggctgtcccagcattggacacccttcagcctgtaaaaggagcccccttggtgaagcccttgccagtgaaccccacagacccagctgttacaggccctgacatctttgccaaactggtacccatggctgcccacgaggcctcgtcactgtacagtgaggagaaggccaagctgctccgggagatgatggccaagattgaggacaagaatgaggtcctggagtgagtgtgggacttgggcagggaggcggaggcaggcagcacttcccgggcctctgggggccccagggctgcctatgctgggagaggaatgaaatgtccattccaaacaggtttcccaatgctgccttcccgcctggggtggtggggctagtgtgtaaggcaggagtcatgtcttgggaggaggaggtgccttctgttccactgtttccagcagtgccctgggcatgttctgtgagaccaggccagacctggtagtaggggtccgaggtcacaatttgctctctgctgagacctcagattgagtggtgaggcttgccctagcggctcctttgacatggtcagagttggatcagcacccagcacccacctggccctgttgctccccacagccagttcatggattcaatgcagttggatcccgagacggtggacaaccttgatgcctacagccacatcccaccccagctcatggagaagtgcgcggctctcagcgtccggcccgacactgtcaggaaccttgtacagtccatgcaagtgctgtcaggtgtgttcacggatgtggaggcttccctgaaggacatcagagatctgttggaggaggatgagctgctagagcagaagtttcaggaggcggtgggccaggcaggggccatctccatcacctccaaggctgagctggcagaggtgaggcgagaatgggccaagtacatggaagtccatgagaaggcctccttcaccaacagtgagctgcaccgtgccatgaacctgcacgtcggcaacctgcgcctgctcagcgggccgcttgaccaggtccgggctgccctgcccacaccggccctctccccagaggacaaggccgtgctgcaaaacctaaagcgcatcctggctaaggtgcaggagatgcgggaccagcgcgtgtccctggagcagcagctgcgtgagcttatccagaaagatgacatcactgcctcgctggtcaccacagaccactcagagatgaagaagttgttcgaggagcagctgaaaaagtatgaccagctgaaggtgtacctggagcagaacctggccgcccaggaccgtgtcctctgtgcactgacagaggccaacgtgcagtacgcagccgtgcggcgggtactcagcgacttggaccaaaagtggaactccacgctgcagaccctggtggcctcgtatgaagcctatgaggacctgatgaagaagtcgcaggagggcagggacttctacgcagatctggagagcaaggtggctgctctgctggagcgcacgcagtccacctgccaggcccgcgaggctgcccgccagcagctcctggacagggagctgaagaagaagccgccgccacggcccacagccccaaagccgctgctgccccgcagggaggagagtgaggcagtggaagcaggagacccccctgaggagctgcgcagcctcccccctgacatggtggctggcccacgactgcctgacaccttcctgggaagtgccaccccgctccactttcctcccagccccttccccagctccacaggcccaggaccccactatctctcaggccccttgccccctggtacctactcgggccccacccagctgatacagcccagggccccagggccccatgcaatgcccgtagcacctgggcctgccctctacccagcccctgcctacacaccggagctgggccttgtgccccgatcctccccacagcatggcgtggtgagcagtccctatgtgggggtagggccggccccaccagttgcaggtctcccctcggccccacctcctcaattctcaggccccgagttggccatggcggttcggccagccaccaccacagtagatagcatccaggcgcccatccccagccacacagccccacggccaaaccccacccctgctcctcccccgccctgcttccctgtgcccccaccgcagccactgcccacgccttacacctaccctgcaggggctaagcaacccatcccagcacagcaccacttctcttctgggatccccgcaggttttccagccccaaggattgggccccagccccagccccatcctcagccccatccttcacaagcgtttgggcctcagcccccacagcagccccttccactccagcatccacatctcttcccaccccaggccccaggactcctacccccacaatccccctacccctatgcccctcagcctggggtcctggggcagccgccaccccccctacacacccagctctacccaggtcccgctcaagaccctctgccagcccactcaggggctctgcctttccccagccctgggccccctcagcctccccatcccccactggcatatggtcctgccccttctaccagacccatgggcccccaggcagcccctcttaccattcgagggccctcgtctgctggccagtccacccctagtccccacctggtgccttcacctgccccatctccagggcctggtccggtaccccctcgccccccagcagcagaaccacccccttgctgcagcccaccaaggtggatgcagctgagggtcgtcggccgcaggccctgcggctgattgagcgggacccctatgagcatcctgagaggctgcggcagttgcagcaggagctggaggcctttcggggtcagctgggggatgtgggagctctggacactgtctggcgagagctgcaagatgcgcaggaacatgatgcccgaggccgttccatcgccattgcccgctgctactcactgaagaaccggcaccaggatgtcatgccctatgacagtaaccgtgtggtgctgcgctcaggcaaggatgactacatcaatgccagctgcgtggaggggctctccccatactgccccccgctagtggcaacccaggccccactgcctggcacagctgctgacttctggctcatggtccatgagcagaaagtgtcagtcattgtcatgctggtttctgaggctgagatggagaagcaaaaagtggcacgctacttccccaccgagaggggccagcccatggtgcacggtgccctgagcctggcattgagcagcgtccgcagcaccgaaacccatgtggagcgcgtgctgagcctgcagttccgagaccagagcctcaagcgctctcttgtgcacctgcacttccccacttggcctgagttaggcctgcccgacagccccagcaacttgctgcgcttcatccaggaggtgcacgcacattacctgcatcagcggccgctgcacacgcccatcattgtgcactgcagctctggtgtgggccgcacgggagcctttgcactgctctatgcagctgtgcaggaggtggaggctgggaacggaatccctgagctgcctcagctggtgcggcgcatgcggcagcagagaaagcacatgctgcaggagaagctgcacctcaggttctgctatgaggcagtggtgagacacgtggagcaggtcctgcagcgccatggtgtgcctcctccatgcaaacccttggccagtgcaagcatcagccagaagaaccaccttcctcaggactcccaggacctggtcctcggtggggatgtgcccatcagctccatccaggccaccattgccaagctcagcattcggcctcctggggggttggagtccccggttgccagcttgccaggccctgcagagcccccaggcctcccgccagccagcctcccagagtctaccccaatcccatcttcctccccaccccccctttcctccccactacctgaggctccccagcctaaggaggagccgccagtgcctgaagcccccagctcggggcccccctcctcctccctggaattgctggcctccttgaccccagaggccttctccctggacagctccctgcggggcaaacagcggatgagcaagcataactttctgcaggcccataacgggcaagggctgcgggccacccggccctctgacgaccccctcagccttctggatccactctggacactcaacaagacctgaacaggttttgcctacctggtccttacactacatcatcatcatctcatgcccacctgcccacacccagcagagcttctcagtgggcacagtctcttactcccatttctgctgcctttggccctgcctggcccagcctgcacccctgtggggtggaaatgtactgcaggctctgggtcaggttctgctcctttatgggacccgacatttttcagctctttgctattgaaataataaaccaccctgttctgtgaaaaaaaaaaaaaaaaaaaaaaactctcgagaacattagttttcttcttcttcctcctttaagagttgaaaccccaagaccgaaacgtttttaagggcccaaaaagggcagtttttgaaagggtttttcccacagcccccacaaaaagagaaaaaagatttccgcaggttttcacccaacttttcggggcggccaaaaacaccttggaatctccggaaaaacgggccccaaattttttcctcggaaaaagccccccccgaggaaaaaacacc

SEQ ID NO: 414538 - DNA, 448 bp, Homo sapiens
ctgcacatgggaaagcaggccgaggagcagcagaagttcggggagcgggtgagctacagcgaggaggggactggggaccaatggcagccttcagtgagatgccggtgtgctcccgctccttacacaccagggggtggccttctctgtctcaccctggccatcaccctgctggaggcctggtgtcttaagtgttgtcccatctgtgcagccctcgtccctcggggtctgaggaggtggggcaggctccctacagagcaggtggctggggcagggtgtggcgccaccttgctgctgttggctggggtggtgcccggctgcctcctgagctgcttgtcatctgatggacaggcagggccgggtgggaggcaggaggagaaagggtccaagcagaggaggacagagcaggctttcctgccaccctccacaggttgcatacttccagagcgcc

SEQ ID NO: 414539 - DNA, 367 bp, Homo sapiens
ttttttggctaggcttcttcaaatcgtgggaataaacacaatctttaaatacataataataacagatatatgactgatatgaacaaaatccttaaaagaccatggctgcccacgaggcctcgtcactgtacagtgaggagaaggccaagctgctccgggagatgatggccaagattgaggacaagaatgaggtcctggaccagttcatggattcaatgcagttggatcccgagacggtggacaaccttgatgcctacagccacatcccaccccagctcatggagaagtgcgcggctctcagcgtccggcccgacactgtcaggaaccttgtacagtccatgcaagtacatcgttagaagcttgaatt

SEQ ID NO: 414540 - DNA, 149 bp, Homo sapiens
ccaaatgcacctgtgcagctgcacctcaggttctgctatgaggcagtggtgagacacgtggagcaggtcctgcagcgccatggtgtgcctcctccatgcaaacccttggccagtccaggactgcaaccgccgtcccaaagcacaggggt

SEQ ID NO: 414541 - DNA, 5162 bp, Homo sapiens
cttggggttgcacaccagctcggggtggcatgaaggtctcctgtacccatttccagtgcgcagccggcgccttcgcctacctacgggagcacttccctcaagcctacagcgtcgacatgagccgccagatccttacgctcaacgtcaacctcatgctgggccaggctcaggagtgcctcctggagaagtcgatgttggacaacaggaagagctttctggtggcccgcatcagtgcacaggtggtagattactacaaggaggcatgccgggccttggagaaccccgacactgcctcactgctgggccggatccagaaggactggaagaaacttgtgcagatgaagatctactacttcgcagccgtggctcatctgcacatgggaaagcaggccgaggagcagcagaagttcggggagcgggttgcatacttccagagcgccctggacaagctcaatgaagccatcaagttggccaagggccagcctgacactgtgcaagacgcgcttcgcttcactatggatgtcattgggggaaagtacaattctgccaagaaggacaacgacttcatttaccatgaggctgtcccagcattggacacccttcagcctgtaaaaggagcccccttggtgaagcccttgccagtgaaccccacagacccagctgttacaggccctgacatctttgccaaactggtacccatggctgcccacgaggcctcgtcactgtacagtgaggagaaggccaagctgctccgggagatgatggccaagattgaggacaagaatgaggtcctggagtgagtgtgggacttgggcagggaggcggaggcaggcagcacttcccgggcctctgggggccccagggctgcctatgctgggagaggaatgaaatgtccattccaaacaggtttcccaatgctgccttcccgcctggggtggtggggctagtgtgtaaggcaggagtcatgtcttgggaggaggaggtgccttctgttccactgtttccagcagtgccctgggcatgttctgtgagaccaggccagacctggtagtaggggtccgaggtcacaatttgctctctgctgagacctcagattgagtggtgaggcttgccctagcggctcctttgacatggtcagagttggatcagcacccagcacccacctggccctgttgctccccacagccagttcatggattcaatgcagttggatcccgagacggtggacaaccttgatgcctacagccacatcccaccccagctcatggagaagtgcgcggctctcagcgtccggcccgacactgtcaggaaccttgtacagtccatgcaagtgctgtcaggtgtgttcacggatgtggaggcttccctgaaggacatcagagatctgttggaggaggatgagctgctagagcagaagtttcaggaggcggtgggccaggcaggggccatctccatcacctccaaggctgagctggcagaggtgaggcgagaatgggccaagtacatggaagtccatgagaaggcctccttcaccaacagtgagctgcaccgtgccatgaacctgcacgtcggcaacctgcgcctgctcagcgggccgcttgaccaggtccgggctgccctgcccacaccggccctctccccagaggacaaggccgtgctgcaaaacctaaagcgcatcctggctaaggtgcaggagatgcgggaccagcgcgtgtccctggagcagcagctgcgtgagcttatccagaaagatgacatcactgcctcgctggtcaccacagaccactcagagatgaagaagttgttcgaggagcagctgaaaaagtatgaccagctgaaggtgtacctggagcagaacctggccgcccaggaccgtgtcctctgtgcactgacagaggccaacgtgcagtacgcagccgtgcggcgggtactcagcgacttggaccaaaagtggaactccacgctgcagaccctggtggcctcgtatgaagcctatgaggacctgatgaagaagtcgcaggagggcagggacttctacgcagatctggagagcaaggtggctgctctgctggagcgcacgcagtccacctgccaggcccgcgaggctgcccgccagcagctcctggacagggagctgaagaagaagccgccgccacggcccacagccccaaagccgctgctgccccgcagggaggagagtgaggcagtggaagcaggagacccccctgaggagctgcgcagcctcccccctgacatggtggctggcccacgactgcctgacaccttcctgggaagtgccaccccgctccactttcctcccagccccttccccagctccacaggcccaggaccccactatctctcaggccccttgccccctggtacctactcgggccccacccagctgatacagcccagggccccagggccccatgcaatgcccgtagcacctgggcctgccctctacccagcccctgcctacacaccggagctgggccttgtgccccgatcctccccacagcatggcgtggtgagcagtccctatgtgggggtagggccggccccaccagttgcaggtctcccctcggccccacctcctcaattctcaggccccgagttggccatggcggttcggccagccaccaccacagtagatagcatccaggcgcccatccccagccacacagccccacggccaaaccccacccctgctcctcccccgccctgcttccctgtgcccccaccgcagccactgcccacgccttacacctaccctgcaggggctaagcaacccatcccagcacagcaccacttctcttctgggatccccgcaggttttccagccccaaggattgggccccagccccagccccatcctcagccccatccttcacaagcgtttgggcctcagcccccacagcagccccttccactccagcatccacatctcttcccaccccaggccccaggactcctacccccacaatccccctacccctatgcccctcagcctggggtcctggggcagccgccaccccccctacacacccagctctacccaggtcccgctcaagaccctctgccagcccactcaggggctctgcctttccccagccctgggccccctcagcctccccatcccccactggcatatggtcctgccccttctaccagacccatgggcccccaggcagcccctcttaccattcgagggccctcgtctgctggccagtccacccctagtccccacctggtgccttcacctgccccatctccagggcctggtccggtaccccctcgccccccagcagcagaaccacccccttgcctgcgccgaggcgccgcagctgcagacctgctctcctccagcccggagagccagcatggcggcactcagtctcctgggggtgggcagcccctgctgcagcccaccaaggtggatgcagctgagggtcgtcggccgcaggccctgcggctgattgagcgggacccctatgagcatcctgagaggctgcggcagttgcagcaggagctggaggcctttcggggtcagctgggggatgtgggagctctggacactgtctggcgagagctgcaagatgcgcaggaacatgatgcccgaggccgttccatcgccattgcccgctgctactcactgaagaaccggcaccaggatgtcatgccctatgacagtaaccgtgtggtgctgcgctcaggcaaggatgactacatcaatgccagctgcgtggaggggctctccccatactgccccccgctagtggcaacccaggccccactgcctggcacagctgctgacttctggctcatggtccatgagcagaaagtgtcagtcattgtcatgctggtttctgaggctgagatggagaagcaaaaagtggcacgctacttccccaccgagaggggccagcccatggtgcacggtgccctgagcctggcattgagcagcgtccgcagcaccgaaacccatgtggagcgcgtgctgagcctgcagttccgagaccagagcctcaagcgctctcttgtgcacctgcacttccccacttggcctgagttaggcctgcccgacagccccagcaacttgctgcgcttcatccaggaggtgcacgcacattacctgcatcagcggccgctgcacacgcccatcattgtgcactgcagctctggtgtgggccgcacgggagcctttgcactgctctatgcagctgtgcaggaggtggaggctgggaacggaatccctgagctgcctcagctggtgcggcgcatgcggcagcagagaaagcacatgctgcaggagaagctgcacctcaggttctgctatgaggcagtggtgagacacgtggagcaggtcctgcagcgccatggtgtgcctcctccatgcaaacccttggccagtgcaagcatcagccagaagaaccaccttcctcaggactcccaggacctggtcctcggtggggatgtgcccatcagctccatccaggccaccattgccaagctcagcattcggcctcctggggggttggagtccccggttgccagcttgccaggccctgcagagcccccaggcctcccgccagccagcctcccagagtctaccccaatcccatcttcctccccaccccccctttcctccccactacctgaggctccccagcctaaggaggagccgccagtgcctgaagcccccagctcggggcccccctcctcctccctggaattgctggcctccttgaccccagaggccttctccctggacagctccctgcggggcaaacagcggatgagcaagcataactttctgcaggcccataacgggcaagggctgcgggccacccggccctctgacgaccccctcagccttctggatccactctggacactcaacaagacctgaacaggttttgcctacctggtccttacactacatcatcatcatctcatgcccacctgcccacacccagcagagcttctcagtgggcacagtctcttactcccatttctgctgcctttggccctgcctggcccagcctgcacccctgtggggtggaaatgtactgcaggctctgggtcaggttctgctcctttatgggacccgacatttttcagctctttgctattgaaataataaaccaccctgttctgtg

SEQ ID NO: 414542 - DNA, 5574 bp, Homo sapiens
tggctgagccagcagctgcagcagctacgggagtggccgggtggccggcgggtgccagccgccatggaggccgtgccccgcatgcccatgatctggctggacctgaaggaggccggtgactttcacttccagccagctgtgaagaagtttgtcctgaagaattatggagagaacccagaagcctacaatgaagaactgaagaagctggagttgctcagacagaatgctgtccgtgtcccacgagactttgagggctgtagtgtcctccgcaagtacctcggccagcttcattacctgcagagtcgggtccccatgggctcgggccaggaggccgctgtccctgtcacctggacagagatcttctcaggcaagtctgtggcccatgaggacatcaagtacgagcaggcctgtattctctacaaccttggagcgctgcactccatgctgggggccatggacaagcgggtgtctgaggagggcatgaaggtctcctgtacccatttccagtgcgcagccggcgccttcgcctacctacgggagcacttccctcaagcctacagcgtcgacatgagccgccagatccttacgctcaacgtcaacctcatgctgggccaggctcaggagtgcctcctggagaagtcgatgttggacaacaggaagagctttctggtggcccgcatcagtgcacaggtggtagattactacaaggaggcatgccgggccttggagaaccccgacactgcctcactgctgggccggatccagaaggactggaagaaacttgtgcagatgaagatctactacttcgcagccgtggctcatctgcacatgggaaagcaggccgaggagcagcagaagttcggggagcgggttgcatacttccagagcgccctggacaagctcaatgaagccatcaagttggccaagggccagcctgacactgtgcaagacgcgcttcgcttcactatggatgtcattgggggaaagtacaattctgccaagaaggacaacgacttcatttaccatgaggctgtcccagcattggacacccttcagcctgtaaaaggagcccccttggtgaagcccttgccagtgaaccccacagacccagctgttacaggccctgacatctttgccaaactggtacccatggctgcccacgaggcctcgtcactgtacagtgaggagaaggccaagctgctccgggagatgatggccaagattgaggacaagaatgaggtcctggaccagttcatggattcaatgcagttggatcccgagacggtggacaaccttgatgcctacagccacatcccaccccagctcatggagaagtgcgcggctctcagcgtccggcccgacactgtcaggaaccttgtacagtccatgcaagtgctgtcaggtgtgttcacggatgtggaggcttccctgaaggacatcagagatctgttggaggaggatgagctgctagagcagaagtttcaggaggcggtgggccaggcaggggccatctccatcacctccaaggctgagctggcagaggtgaggcgagaatgggccaagtacatggaagtccatgagaaggcctccttcaccaacagtgagctgcaccgtgccatgaacctgcacgtcggcaacctgcgcctgctcagcgggccgcttgaccaggtccgggctgccctgcccacaccggccctctccccagaggacaaggccgtgctgcaaaacctaaagcgcatcctggctaaggtgcaggagatgcgggaccagcgcgtgtccctggagcagcagctgcgtgagcttatccagaaagatgacatcactgcctcgctggtcaccacagaccactcagagatgaagaagttgttcgaggagcagctgaaaaagtatgaccagctgaaggtgtacctggagcagaacctggccgcccaggaccgtgtcctctgtgcactgacagaggccaacgtgcagtacgcagccgtgcggcgggtactcagcgacttggaccaaaagtggaactccacgctgcagaccctggtggcctcgtatgaagcctatgaggacctgatgaagaagtcgcaggagggcagggacttctacgcagatctggagagcaaggtggctgctctgctggagcgcacgcagtccacctgccaggcccgcgaggctgcccgccagcagctcctggacagggagctgaagaagaagccgccgccacggcccacagccccaaagccgctgctgccccgcagggaggagagtgaggcagtggaagcaggagacccccctgaggagctgcgcagcctcccccctgacatggtggctggcccacgactgcctgacaccttcctgggaagtgccaccccgctccactttcctcccagccccttccccagctccacaggcccaggaccccactatctctcaggccccttgccccctggtacctactcgggccccacccagctgatacagcccagggccccagggccccatgcaatgcccgtagcacctgggcctgccctctacccagcccctgcctacacaccggagctgggccttgtgccccgatcctccccacagcatggcgtggtgagcagtccctatgtgggggtagggccggccccaccagttgcaggtctcccctcggccccacctcctcaattctcaggccccgagttggccatggcggttcggccagccaccaccacagtagatagcatccaggcgcccatccccagccacacagccccacggccaaaccccacccctgctcctcccccgccctgcttccctgtgcccccaccgcagccactgcccacgccttacacctaccctgcaggggctaagcaacccatcccagcacagcaccacttctcttctgggatccccgcaggttttccagccccaaggattgggccccagccccagccccatcctcagccccatccttcacaagcgtttgggcctcagcccccacagcagccccttccactccagcatccacatctcttcccaccccaggccccaggactcctacccccacaatccccctacccctatgcccctcagcctggggtcctggggcagccgccaccccccctacacacccagctctacccaggtcccgctcaagaccctctgccagcccactcaggggctctgcctttccccagccctgggccccctcagcctccccatcccccactggcatatggtcctgccccttctaccagacccatgggcccccaggcagcccctcttaccattcgagggccctcgtctgctggccagtccacccctagtccccacctggtgccttcacctgccccatctccagggcctggtccggtaccccctcgccccccagcagcagaaccacccccttgcctgcgccgaggcgccgcagctgcagacctgctctcctccagcccggagagccagcatggcggcactcagtctcctgggggtgggcagcccctgctgcagcccaccaaggtggatgcagctgagggtcgtcggccgcaggccctgcggctgattgagcgggacccctatgagcatcctgagaggctgcggcagttgcagcaggagctggaggcctttcggggtcagctgggggatgtgggagctctggacactgtctggcgagagctgcaagatgcgcaggaacatgatgcccgaggccgttccatcgccattgcccgctgctactcactgaagaaccggcaccaggatgtcatgccctatgacagtaaccgtgtggtgctgcgctcaggcaaggatgactacatcaatgccagctgcgtggaggggctctccccatactgccccccgctagtggcaacccaggccccactgcctggcacagctgctgacttctggctcatggtccatgagcagaaagtgtcagtcattgtcatgctggtttctgaggctgagatggagaagcaaaaagtggcacgctacttccccaccgagaggggccagcccatggtgcacggtgccctgagcctggcattgagcagcgtccgcagcaccgaaacccatgtggagcgcgtgctgagcctgcagttccgagaccagagcctcaagcgctctcttgtgcacctgcacttccccacttggcctgagttaggcctgcccgacagccccagcaacttgctgcgcttcatccaggaggtgcacgcacattacctgcatcagcggccgctgcacacgcccatcattgtgcactgcagctctggtgtgggccgcacgggagcctttgcactgctctatgcagctgtgcaggaggtggaggctgggaacggaatccctgagctgcctcagctggtgcggcgcatgcggcagcagagaaagcacatgctgcaggagaagctgcacctcaggttctgctatgaggcagtggtgagacacgtggagcaggtcctgcagcgccatggtgtgcctcctccatgcaaacccttggccagtgcaagcatcagccagaaggtgaggaaggttccgtggaagctgctgggagagccacagccttgggactccctctcctcactcactctgtcttctcagaaccaccttcctcaggactcccaggacctggtcctcggtggggatgtgcccatcagctccatccaggccaccattgccaagctcagcattcggcctcctggggggttggagtccccggttgccagcttgccaggccctgcagagcccccaggcctcccgccagccagcctcccagagtctaccccaatcccatcttcctccccaccccccctttcctccccactacctgaggctccccagcctaaggaggagccgccagtgcctgaagcccccagctcggggcccccctcctcctccctggaattgctggcctccttgaccccagaggccttctccctggacagctccctgcggggcaaacagcggatgagcaagcataactttctgcaggcccataacgggcaagggctgcgggccacccggccctctgacgaccccctcagccttctggatccactctggacactcaacaagacctgaacaggttttgcctacctggtccttacactacatcatcatcatctcatgcccacctgcccacacccagcagagcttctcagtgggcacagtctcttactcccatttctgctgcctttggccctgcctggcccagcctgcacccctgtggggtggaaatgtactgcaggctctgggtcaggttctgctcctttatgggacccgacatttttcagctctttgctattgaaataataaaccaccctgttctgtgaaaaaaaaaaaaaaaaaaaaaaactctcgagaacattagttttcttcttcttcctcctttaagagttgaaaccccaagaccgaaacgtttttaagggcccaaaaagggcagtttttgaaagggtttttcccacagcccccacaaaaagagaaaaaagatttccgcaggttttcacccaacttttcggggcggccaaaaacaccttggaatctccggaaaaacgggccccaaattttttcctcggaaaaagccccccccgaggaaaaaacacc

SEQ ID NO: 414543 - DNA, 3133 bp, Homo sapiens
tggctgagccagcagctgcagcagctacgggagtggccgggtggccggcgggtgccagccgccatggaggccgtgccccgcatgcccatgatctggctggacctgaaggaggccggtgactttcacttccagccagctgtgaagaagtttgtcctgaagaattatggagagaacccagaagcctacaatgaagaactgaagaagctggagttgctcagacaggacagagatcttctcaggcaagtctgtggcccatgaggacatcaagtacgagcaggcctgtattctctacaaccttggagcgctgcactccatgctgggggccatggacaagcgggtgtctgaggagggcatgaaggtctcctgtacccatttccagtgcgcagccggcgccttcgcctacctacgggagcacttccctcaagcctacagcgtcgacatgagccgccagatccttacgctcaacgtcaacctcatgctgggccaggctcaggagtgcctcctggagaagtcgatgttggacaacaggaagagctttctggtggcccgcatcagtgcacaggtggtagattactacaaggaggcatgccgggccttggagaaccccgacactgcctcactgctgggccggatccagaaggactggaagaaacttgtgcagatgaagatctactacttcgcagccgtggctcatcctgcttccctgtgcccccaccgcagccactgcccacgccttacacctaccctgcaggggctaagcaacccatcccagcacagcaccacttctcttctgggatccccgcaggttttccagccccaaggattgggccccagccccagccccatcctcagccccatccttcacaagcgtttgggcctcagcccccacagcagccccttccactccagcatccacatctcttcccaccccaggccccaggactcctacccccacaatccccctacccctatgcccctcagcctggggtcctggggcagccgccaccccccctacacacccagctctacccaggtcccgctcaagaccctctgccagcccactcaggggctctgcctttccccagccctgggccccctcagcctccccatcccccactggcatatggtcctgccccttctaccagacccatgggcccccaggcagcccctcttaccattcgagggccctcgtctgctggccagtccacccctagtccccacctggtgccttcacctgccccatctccagggcctggtccggtaccccctcgccccccagcagcagaaccacccccttgcctgcgccgaggcgccgcagctgcagacctgctctcctccagcccggagagccagcatggcggcactcagtctcctgggggtgggcagcccctgctgcagcccaccaaggtggatgcagctgagggtcgtcggccgcaggccctgcggctgattgagcgggacccctatgagcatcctgagaggctgcggcagttgcagcaggagctggaggcctttcggggtcagctgggggatgtgggagctctggacactgtctggcgagagctgcaagatgcgcaggaacatgatgcccgaggccgttccatcgccattgcccgctgctactcactgaagaaccggcaccaggatgtcatgccctatgacagtaaccgtgtggtgctgcgctcaggcaaggatgactacatcaatgccagctgcgtggaggggctctccccatactgccccccgctagtggcaacccaggccccactgcctggcacagctgctgacttctggctcatggtccatgagcagaaagtgtcagtcattgtcatgctggtttctgaggctgagatggagaagcaaaaagtggcacgctacttccccaccgagaggggccagcccatggtgcacggtgccctgagcctggcattgagcagcgtccgcagcaccgaaacccatgtggagcgcgtgctgagcctgcagttccgagaccagagcctcaagcgctctcttgtgcacctgcacttccccacttggcctgagttaggcctgcccgacagccccagcaacttgctgcgcttcatccaggaggtgcacgcacattacctgcatcagcggccgctgcacacgcccatcattgtgcactgcagctctggtgtgggccgcacgggagcctttgcactgctctatgcagctgtgcaggaggtggaggctgggaacggaatccctgagctgcctcagctggtgcggcgcatgcggcagcagagaaagcacatgctgcaggagaagctgcacctcaggttctgctatgaggcagtggtgagacacgtggagcaggtcctgcagcgccatggtgtgcctcctccatgcaaacccttggccagtgcaagcatcagccagaagaaccaccttcctcaggactcccaggacctggtcctcggtggggatgtgcccatcagctccatccaggccaccattgccaagctcagcattcggcctcctggggggttggagtccccggttgccagcttgccaggccctgcagagcccccaggcctcccgccagccagcctcccagagtctaccccaatcccatcttcctccccaccccccctttcctccccactacctgaggctccccagcctaaggaggagccgccagtgcctgaagcccccagctcggggcccccctcctcctccctggaattgctggcctccttgaccccagaggccttctccctggacagctccctgcggggcaaacagcggatgagcaagcataactttctgcaggcccataacgggcaagggctgcgggccacccggccctctgacgaccccctcagccttctggatccactctggacactcaacaagacctgaacaggttttgcctacctggtccttacactacatcatcatcatctcatgcccacctgcccacacccagcagagcttctcagtgggcacagtctcttactcccatttctgctgcctttggccctgcctggcccagcctgcacccctgtggggtggaaatgtactgcaggctctgggtcaggttctgctcctttatgggacccgacatttttcagctctttgctattgaaataataaaccaccctgttctgtg

SEQ ID NO: 414544 - DNA, 2724 bp, Homo sapiens
cggacgcgtgggtcgacccacgcgtccgcccagctccggtgtgtaggcaggggctgggccttgtgccccgatcctccccacagcatggcgtggtgagcagtccctatgtgggggtagggccggccccaccagttgcaggtctcccctcggccccacctcctcaattctcaggccccgagttggccatggcggttcggccagccaccaccacagtagatagcatccaggcgcccatccccagccacacagccccacggccaaaccccacccctgctcctcccccgccctgcttccctgtgcccccaccgcagccactgcccacgccttacacctaccctgcaggggctaagcaacccatcccagcacagcaccacttctcttctgggatccccgcaggttttccagccccaaggattgggccccagccccagccccatcctcagccccatccttcacaagcgtttgggcctcagcccccacagcagccccttccactccagcatccacatctcttcccaccccaggccccaggactcctacccccacaatccccctacccctatgcccctcagcctggggtcctggggcagccgccaccccccctacacacccagctctacccaggtcccgctcaagaccctctgccagcccactcaggggctctgcctttccccagccctgggccccctcagcctccccatcccccactggcatatggtcctgccccttctaccagacccatgggcccccaggcagcccctcttaccattcgagggccctcgtctgctggccagtccacccctagtccccacctggtgccttcacctgccccatctccagggcctggtccggtaccccctcgccccccagcagcagaaccacccccttgcctgcgccgaggcgccgcagctgcagacctgctctcctccagcccggagagccagcatggcggcactcagtctcctgggggtgggcagcccctgctgcagcccaccaaggtggatgcagctgagggtcgtcggccgcaggccctgcggctgattgagcgggacccctatgagcatcctgagaggctgcggcagttgcagcaggagctggaggcctttcggggtcagctgggggatgtgggagctctggacactgtctggcgagagctgcaagatgcgcaggaacatgatgcccgaggccgttccatcgccattgcccgctgctactcactgaagaaccggcaccaggatgtcatgccctatgacagtaaccgtgtggtgctgcgctcaggcaaggatgactacatcaatgccagctgcgtggaggggctctccccatactgccccccgctagtggcaacccaggccccactgcctggcacagctgctgacttctggctcatggtccatgagcagaaagtgtcagtcattgtcatgctggtttctgaggctgagatggagaagcaaaaagtggcacgctacttccccaccgagaggggccagcccatggtgcacggtgccctgagcctggcattgagcagcgtccgcagcaccgaaacccatgtggagcgcgtgctgagcctgcagttccgagaccagagcctcaagcgctctcttgtgcacctgcacttccccacttggcctgagttaggcctgcccgacagccccagcaacttgctgcgcttcatccaggaggtgcacgcacattacctgcatcagcggccgctgcacacgcccatcattgtgcactgcagctctggtgtgggccgcacgggagcctttgcactgctctatgcagctgtgcaggaggtggaggctgggaacggaatccctgagctgcctcagctggtgcggcgcatgcggcagcagagaaagcacatgctgcaggagaagctgcacctcaggttctgctatgaggcagtggtgagacacgtggagcaggtcctgcagcgccatggtgtgcctcctccatgcaaacccttggccagtgcaagcatcagccagaagaaccaccttcctcaggactcccaggacctggtcctcggtggggatgtgcccatcagctccatccaggccaccattgccaagctcagcattcggcctcctggggggttggagtccccggttgccagcttgccaggccctgcagagcccccaggcctcccgccagccagcctcccagagtctaccccaatcccatcttcctccccaccccccctttcctccccactacctgaggctccccagcctaaggaggagccgccagtgcctgaagcccccagctcggggcccccctcctcctccctggaattgctggcctccttgaccccagaggccttctccctggacagctccctgcggggcaaacagcggatgagcaagcataactttctgcaggcccataacgggcaagggctgcgggccacccggccctctgacgaccccctcagccttctggatccactctggacactcaacaagacctgaacaggttttgcctacctggtccttacactacatcatcatcatctcatgcccacctgcccacacccagcagagcttctcagtgggcacagtctcttactcccatttctgctgcctttggccctgcctggcccagcctgcacccctgtggggtggaaatgtactgcaggctctgggtcaggttctgctcctttatgggacccgacatttttcagctctttgctattgaaataataaaccaccctgttctgtg

SEQ ID NO: 414545 - DNA, 412 bp, Homo sapiens
ctgtcttggcttatctgtccctcagcaaaaagtggcacgctacttccccaccgagaggggccagcccatggtgcacggtgccctgagcctggcattgagcagcgtccgcagcaccgaaacccatgtggagcgcgtgctgagcctgcagttccgagaccagagcctcaagcgctctcttgtgcacctgcacttccccacttggcctgagttgtgagtccactgctctggatggtggttgggggtctaagtgctgtccagtccttggtgctgggagggatgagagcctcaggtcaggcctggctcataggctcttcctggccccatcctgtcccacagaggcctgcccgacagccccagcaacttgctgcgcttcatccaggaggtgcacgcacattacctgcatcagcggccg

SEQ ID NO: 414546 - DNA, 612 bp, Homo sapiens
ggggaaagcggaaacagactgtctgggccgctgttaaaatgtcagcagccaaggaagaagcagcgacctggcgtctgctcgggccaggtgacctttatggcggcgccttctgtccctggtcgcttttccactgaatgaatgaccgaaactgtagtaactcatggccagggaatggcttagttatctgagggaatcttgtctgtgaaaaagggaaactggtgcaaatgggaattcagacaggtcaggaggggaaggaagggaaggattgaggtgggaaaagagagagaaagatgattggcctcttaggggaagaacacacttggacggggctcctggggcacttccttgattccgctgtactcctcagcgggaccggagaggcggaggttccaggagggagccttccagagtcggtgcagggttgacaggagacgtttgttttgcttttcctgaactttcgatcgccagcttgtttggtcttcttgatgttatagggttgatagagaggagtggagtgattgctggagggccctacttgagcatcttgctccactttcctctcaccaccttttcaacattgttgggaaagccctagccaatgtgataagatta

SEQ ID NO: 414547 - DNA, 343 bp, Homo sapiens
catttgctttcctctccactatcccatccgtataagcaaaagagtgtgtgtgatgatgataacaggatcttggatgataagctctatcaactcttgtgctcacacagtatatgcactctgtatcccatattgcaagtccagagccatcaatcattttttctgtgatgttccagctatgttgacgctagcctgcacagacacttgggtctatgagagcacagtgtttttgagcagcaccatctttcttgtgcttcctttcactggtattgcatgttcctatggccgggttctccttgctgtctaccgcatgcactctgcagaagggaggaagaaggcctattca

SEQ ID NO: 414548 - DNA, 4985 bp, Homo sapiens
  misc_feature (110)..(110): n is a, c, g, or t
  misc_feature (4984)..(4984): n is a, c, g, or t
cggggcccggggggcgggggcctgacggccgggccgggcggcggagctgcaagggacagaggcgcggcaggcgcgcggagccagcggagccagctgagcccgagcccagnccgcgcccgcgccgccatgcccctggccttctgcggcagcgagaaccactcggccgcctaccgggtggaccagggggtcctcaacaacggctgctttgtggacgcgctcaacgtggtgccgcacgtcttcctactcttcatcaccttccccatcctcttcattggatggggaagtcagagctccaaggtgcacatccaccacagcacatggcttcatttccctgggcacaacctgcggtggatcctgaccttcatgctgctcttcgtcctggtgtgtgagattgcagagggcatcctgtctgatggggtgaccgaatcccaccatctgcacctgtacatgccagccgggatggcgttcatggctgctgtcacctccgtggtctactatcacaacatcgagacttccaacttccccaagctgctaattgccctgctggtgtattggaccctggccttcatcaccaagaccatcaagtttgtcaagttcttggaccacgccatcggcttctcgcagctacgcttctgcctcacagggctgctggtgatcctctatgggatgctgctcctcgtggaggtcaatgtcatcagggtgaggagatacatcttcttcaagacaccgagggaggtgaagcctcccgaggacctgcaagacctgggggtacgcttcctgcagcccttcgtgaatctgctgtccaaaggcacctactggtggatgaacgccttcatcaagactgcccacaagaagcccatcgacttgcgagccatcgggaagctgcccatcgccatgagggccctcaccaactaccaacggctctgcgaggcctttgacgcccaggtgcggaaggacattcagggcactcaaggtgcccgggccatctggcaggcactcagccatgccttcgggaggcgcctggtcctcagcagcactttccgcatcttggccgacctgctgggcttcgccgggccactgtgcatctttgggatcgtggaccaccttgggaaggagaacgacgtcttccagcccaagacacaatttctcggggtttactttgtctcatcccaagagttccttgccaatgcctacgtcttagctgtgcttctgttccttgccctcctactgcaaaggacatttctgcaagcatcctactatgtggccattgaaactggaattaacttgagaggagcaatacagaccaagatttacaataaaattatgcacctgtccacctccaacctgtccatgggagaaatgactgctggacagatctgtaatctggttgccatcgacaccaatcagctcatgtggtttttcttcttgtgcccaaacctctgggctatgccagtacagatcattgtgggtgtgattctcctctactacatactcggagtcagtgccttaattggagcagctgtcatcattctactggctcctgtccagtacttcgtggccaccaagctgtctcaggcccagcggagcacactggagtattccaatgagcggctgaagcagaccaacgagatgctccgcggcatcaagctgctgaagctgtacgcctgggagaacatcttccgcacgcgggtggagacgacccgcaggaaggagatgaccagcctcagggcctttgccatctatacctccatctccattttcatgaacacggccatccccattgcagctgtcctcataactttcgtgggccatgtcagcttcttcaaagaggccgacttctcgccctccgtggcctttgcctccctctccctcttccatatcttggtcacaccgctgttcctgctgtccagtgtggtccgatctaccgtcaaagctctagtgagcgtgcaaaagctaagcgagttcctgtccagtgcagagatccgtgaggagcagtgtgccccccatgagcccacacctcagggcccagccagcaagtaccaggcggtgcccctcagggttgtgaaccgcaagcgtccagcccgggaggattgtcggggcctcaccggcccactgcagagcctggtccccagtgcagatggcgatgctgacaactgctgtgtccagatcatgggaggctacttcacgtggaccccagatggaatccccacactgtccaacatcaccattcgtatcccccgaggccagctgactatgatcgtggggcaggtgggctgcggcaagtcctcgctccttctagccgcactgggggagatgcagaaggtctcaggggctgtcttctggagcagccttcctgacagcgagataggagaggaccccagcccagagcgggagacagcgaccgacttggatatcaggaagagaggccccgtggcctatgcttcgcagaaaccatggctgctaaatgccactgtggaggagaacatcatctttgagagtcccttcaacaaacaacggtacaagatggtcattgaagcctgctctctgcagccagacatcgacatcctgccccatggagaccagacccagattggggaacggggcatcaacctgtctggtggtcaacgccagcgaatcagtgtggcccgagccctctaccagcacgccaacgttgtcttcttggatgaccccttctcagctctggatatccatctgagtgaccacttaatgcaggccggcatccttgagctgctccgggacgacaagaggacagtggtcttagtgacccacaagctacagtacctgccccatgcagactggatcattgccatgaaggatggcaccatccagagggagggtaccctcaaggacttccagaggtctgaatgccagctctttgagcactggaagaccctcatgaaccgacaggaccaagagctggagaaggagactgtcacagagagaaaagccacagagccaccccagggcctatctcgtgccatgtcctcgagggatggccttctgcaggatgaggaagaggaggaagaggaggcagctgagagcgaggaggatgacaacctgtcgtccatgctgcaccagcgtgctgagatcccatggcgagcctgcgccaagtacctgtcctccgccggcatcctgctcctgtcgttgctggtcttctcacagctgctcaagcacatggtcctggtggccatcgactactggctggccaagtggaccgacagcgccctgaccctgacccctgcagccaggaactgctccctcagccaggagtgcaccctcgaccagactgtctatgccatggtgttcacggtgctctgcagcctgggcattgtgctgtgcctcgtcacgtctgtcactgtggagtggacagggctgaaggtggccaagagactgcaccgcagcctgctaaaccggatcatcctagcccccatgaggttttttgagaccacgccccttgggagcatcctgaacagattttcatctgactgtaacaccatcgaccagcacatcccatccacgctggagtgcctgagccgctccaccctgctctgtgtctcagccctggccgtcatctcctatgtcacacctgtgttcctcgtggccctcttgcccctggccatcgtgtgctacttcatccagaagtacttccgggtggcgtccagggacctgcagcagctggatgacaccacccagcttccacttctctcacactttgccgaaaccgtagaaggactcaccaccatccgggccttcaggtatgaggcccggttccagcagaagcttctcgaatacacagactccaacaacattgcttccctcttcctcacagctgccaacagatggctggaagtccgaatggagtacatcggtgcatgtgtggtgctcatcgcagcggtgacctccatctccaactccctgcacagggagctctctgctggcctggtgggcctgggccttacctacgccctaatggtctccaactacctcaactggatggtgaggaacctggcagacatggagctccagctgggggctgtgaagcgcatccatgggctcctgaaaaccgaggcagagagctacgaggggctcctgggtgagcaccatcgctgatcccaaagaactggccagaccaagggaagatccagatccagaacctgagcgtgcgctacgacagctccctgaagccggtgctgaagcacgtcaatgccctcatctcccctggacagaagatcgggatctgcggccgcaccggcagtgggaagtcctccttctctcttgccttcttccgcatggtggacacgttcgaagggcacatcatcattgatggcattgacatcgccaaactgccgctgcacaccctgcgctcacgcctctccatcatcctgcaggaccccgtcctcttcagcggcaccatccgatttaacctggaccctgagaggaagtgctcagatagcacactgtgggaggccctggaaatcgcccagctgaagctggtggtgaaggcactgccaggaggcctcgatgccatcatcacagaaggcggggagaatttcagccagggacagaggcagctgttctgcctggcccgggccttcgtgaggaagaccagcatcttcatcatggacgaggccacggcttccattgacatggccacggaaaacatcctccaaaaggtggtgatgacagccttcgcagaccgcactgtggtcaccatcgcgcatcgagtgcacaccatcctgagtgcagacctggtgatcgtcctgaagcggggtgccatccttgagttcgataagccagagaagctgctcagccggaaggacagcgtcttcgcctccttcgtccgtgcagacaagtgacctgccagagcccaagtgccatcccacattcggaccctgcccatacccctgcctgggttttctaactgtaaatcacttgtaaataaatagatttgattatttcctana

SEQ ID NO: 414549 - DNA, 3672 bp, Homo sapiens
  misc_feature (3671)..(3671): n is a, c, g, or t
agagccatgggagactaggaagtctctaagcttcatagagagcctggcttggggggacacaggagccaaaggcagaggaagaagtggcagctttgtgcccccagaaacacgtgctcctgacctcacagttggccacagccagccaactctcccatccttctcccaccactttcccgtggggctaacttcaccctgtccacacggagtgacttaacagtttaagccccagagtcgggggccggggtacctgggacaagagtcctgagggaaatggggtgaggaactggaagtgccacagggctagagttctgcccctagcctactggagctgtgccccacaggctggccccactggactgcgctgcctccaagccatcctgggcatctccatgtgtagctgtcacgctcctcccactaaacgcctccctgtgcttcctctgcagttttcatgaacacggccatccccattgcagctgtcctcataactttcgtgggccatgtcagcttcttcaaagaggccgacttctcgccctccgtggcctttgcctccctctccctcttccatatcttggtcacaccgctgttcctgctgtccagtgtggtccgatctaccgtcaaagctctagtgagcgtgcaaaagctaagcgagttcctgtccagtgcagagatccgtgaggagcagtgtgccccccatgagcccacacctcagggcccagccagcaagtaccaggcggtgcccctcagggttgtgaaccgcaagcgtccagcccgggaggattgtcggggcctcaccggcccactgcagagcctggtccccagtgcagatggcgatgctgacaactgctgtgtccagatcatgggaggctacttcacgtggaccccagatggaatccccacactgtccaacatcaccattcgtatcccccgaggccagctgactatgatcgtggggcaggtgggctgcggcaagtcctcgctccttctagccgcactgggggagatgcagaaggtctcaggggctgtcttctggagcagccttcctgacagcgagataggagaggaccccagcccagagcgggagacagcgaccgacttggatatcaggaagagaggccccgtggcctatgcttcgcagaaaccatggctgctaaatgccactgtggaggagaacatcatctttgagagtcccttcaacaaacaacggtacaagatggtcattgaagcctgctctctgcagccagacatcgacatcctgccccatggagaccagacccagattggggaacggggcatcaacctgtctggtggtcaacgccagcgaatcagtgtggcccgagccctctaccagcacgccaacgttgtcttcttggatgaccccttctcagctctggatatccatctgagtgaccacttaatgcaggccggcatccttgagctgctccgggacgacaagaggacagtggtcttagtgacccacaagctacagtacctgccccatgcagactggatcattgccatgaaggatggcaccatccagagggagggtaccctcaaggacttccagaggtctgaatgccagctctttgagcactggaagaccctcatgaaccgacaggaccaagagctggagaaggagactgtcacagagagaaaagccacagagccaccccagggcctatctcgtgccatgtcctcgagggatggccttctgcaggatgaggaagaggaggaagaggaggcagctgagagcgaggaggatgacaacctgtcgtccatgctgcaccagcgtgctgagatcccatggcgagcctgcgccaagtacctgtcctccgccggcatcctgctcctgtcgttgctggtcttctcacagctgctcaagcacatggtcctggtggccatcgactactggctggccaagtggaccgacagcgccctgaccctgacccctgcagccaggaactgctccctcagccaggagtgcaccctcgaccagactgtctatgccatggtgttcacggtgctctgcagcctgggcattgtgctgtgcctcgtcacgtctgtcactgtggagtggacagggctgaaggtggccaagagactgcaccgcagcctgctaaaccggatcatcctagcccccatgaggttttttgagaccacgccccttgggagcatcctgaacagattttcatctgactgtaacaccatcgaccagcacatcccatccacgctggagtgcctgagccgctccaccctgctctgtgtctcagccctggccgtcatctcctatgtcacacctgtgttcctcgtggccctcttgcccctggccatcgtgtgctacttcatccagaagtacttccgggtggcgtccagggacctgcagcagctggatgacaccacccagcttccacttctctcacactttgccgaaaccgtagaaggactcaccaccatccgggccttcaggtatgaggcccggttccagcagaagcttctcgaatacacagactccaacaacattgcttccctcttcctcacagctgccaacagatggctggaagtccgaatggagtacatcggtgcatgtgtggtgctcatcgcagcggtgacctccatctccaactccctgcacagggagctctctgctggcctggtgggcctgggccttacctacgccctaatggtctccaactacctcaactggatggtgaggaacctggcagacatggagctccagctgggggctgtgaagcgcatccatgggctcctgaaaaccgaggcagagagctacgaggggctcctgggtgagcaccatcgctgatcccaaagaactggccagaccaagggaagatccagatccagaacctgagcgtgcgctacgacagctccctgaagccggtgctgaagcacgtcaatgccctcatctcccctggacagaagatcgggatctgcggccgcaccggcagtgggaagtcctccttctctcttgccttcttccgcatggtggacacgttcgaagggcacatcatcattgatggcattgacatcgccaaactgccgctgcacaccctgcgctcacgcctctccatcatcctgcaggaccccgtcctcttcagcggcaccatccgatttaacctggaccctgagaggaagtgctcagatagcacactgtgggaggccctggaaatcgcccagctgaagctggtggtgaaggcactgccaggaggcctcgatgccatcatcacagaaggcggggagaatttcagccagggacagaggcagctgttctgcctggcccgggccttcgtgaggaagaccagcatcttcatcatggacgaggccacggcttccattgacatggccacggaaaacatcctccaaaaggtggtgatgacagccttcgcagaccgcactgtggtcaccatcgcgcatcgagtgcacaccatcctgagtgcagacctggtgatcgtcctgaagcggggtgccatccttgagttcgataagccagagaagctgctcagccggaaggacagcgtcttcgcctccttcgtccgtgcagacaagtgacctgccagagcccaagtgccatcccacattcggaccctgcccatacccctgcctgggttttctaactgtaaatcacttgtaaataaatagatttgattatttcctana

SEQ ID NO: 414550 - DNA, 2541 bp, Homo sapiens
  misc_feature (2540)..(2540): n is a, c, g, or t
gaccctctgcaagtgctcgggccaactctgaccaggctgaccagctgcatcccctgcctctacccacgccaggtacaagatggtcattgaagcctgctctctgcagccagacatcgacatcctgccccatggagaccagacccagattggggaacggggcatcaacctgtctggtggtcaacgccagcgaatcagtgtggcccgagccctctaccagcacgccaacgttgtcttcttggatgaccccttctcagctctggatatccatctgagtgaccacttaatgcaggccggcatccttgagctgctccgggacgacaagaggacagtggtcttagtgacccacaagctacagtacctgccccatgcagactggatcattgccatgaaggatggcaccatccagagggagggtaccctcaaggacttccagaggtctgaatgccagctctttgagcactggaagaccctcatgaaccgacaggaccaagagctggagaaggagactgtcacagagagaaaagccacagagccaccccagggcctatctcgtgccatgtcctcgagggatggccttctgcaggatgaggaagaggaggaagaggaggcagctgagagcgaggaggatgacaacctgtcgtccatgctgcaccagcgtgctgagatcccatggcgagcctgcgccaagtacctgtcctccgccggcatcctgctcctgtcgttgctggtcttctcacagctgctcaagcacatggtcctggtggccatcgactactggctggccaagtggaccgacagcgccctgaccctgacccctgcagccaggaactgctccctcagccaggagtgcaccctcgaccagactgtctatgccatggtgttcacggtgctctgcagcctgggcattgtgctgtgcctcgtcacgtctgtcactgtggagtggacagggctgaaggtggccaagagactgcaccgcagcctgctaaaccggatcatcctagcccccatgaggttttttgagaccacgccccttgggagcatcctgaacagattttcatctgactgtaacaccatcgaccagcacatcccatccacgctggagtgcctgagccgctccaccctgctctgtgtctcagccctggccgtcatctcctatgtcacacctgtgttcctcgtggccctcttgcccctggccatcgtgtgctacttcatccagaagtacttccgggtggcgtccagggacctgcagcagctggatgacaccacccagcttccacttctctcacactttgccgaaaccgtagaaggactcaccaccatccgggccttcaggtatgaggcccggttccagcagaagcttctcgaatacacagactccaacaacattgcttccctcttcctcacagctgccaacagatggctggaagtccgaatggagtacatcggtgcatgtgtggtgctcatcgcagcggtgacctccatctccaactccctgcacagggagctctctgctggcctggtgggcctgggccttacctacgccctaatggtctccaactacctcaactggatggtgaggaacctggcagacatggagctccagctgggggctgtgaagcgcatccatgggctcctgaaaaccgaggcagagagctacgaggggctcctgggtgagcaccatcgctgatcccaaagaactggccagaccaagggaagatccagatccagaacctgagcgtgcgctacgacagctccctgaagccggtgctgaagcacgtcaatgccctcatctcccctggacagaagatcgggatctgcggccgcaccggcagtgggaagtcctccttctctcttgccttcttccgcatggtggacacgttcgaagggcacatcatcattgatggcattgacatcgccaaactgccgctgcacaccctgcgctcacgcctctccatcatcctgcaggaccccgtcctcttcagcggcaccatccgatttaacctggaccctgagaggaagtgctcagatagcacactgtgggaggccctggaaatcgcccagctgaagctggtggtgaaggcactgccaggaggcctcgatgccatcatcacagaaggcggggagaatttcagccagggacagaggcagctgttctgcctggcccgggccttcgtgaggaagaccagcatcttcatcatggacgaggccacggcttccattgacatggccacggaaaacatcctccaaaaggtggtgatgacagccttcgcagaccgcactgtggtcaccatcgcgcatcgagtgcacaccatcctgagtgcagacctggtgatcgtcctgaagcggggtgccatccttgagttcgataagccagagaagctgctcagccggaaggacagcgtcttcgcctccttcgtccgtgcagacaagtgacctgccagagcccaagtgccatcccacattcggaccctgcccatacccctgcctgggttttctaactgtaaatcacttgtaaataaatagatttgattatttcctana

SEQ ID NO: 414551 - DNA, 1495 bp, Homo sapiens
  misc_feature (1494)..(1494): n is a, c, g, or t
gcacgaggaaaaaagtgggcgggaaaagcataatcttaaaagatttgtaattttctgtatgtgccacatttatgtaaattaactataaaatatggaattcaggatcatgctgttttgcatgtactttataggttatatagcatgaaacatacaaattatcactgttctttagtatatagctccttgctcgtgcggacctgcagcagctggatgacaccacccagcttccacttctctcacactttgccgaaaccgtagaaggactcaccaccatccgggccttcaggtatgaggcccggttccagcagaagcttctcgaatacacagactccaacaacattgcttccctcttcctcacagctgccaacagatggctggaagtccgaatggagtacatcggtgcatgtgtggtgctcatcgcagcggtgacctccatctccaactccctgcacagggagctctctgctggcctggtgggcctgggccttacctacgccctaatggtctccaactacctcaactggatggtgaggaacctggcagacatggagctccagctgggggctgtgaagcgcatccatgggctcctgaaaaccgaggcagagagctacgaggggctcctgggtgagcaccatcgctgatcccaaagaactggccagaccaagggaagatccagatccagaacctgagcgtgcgctacgacagctccctgaagccggtgctgaagcacgtcaatgccctcatctcccctggacagaagatcgggatctgcggccgcaccggcagtgggaagtcctccttctctcttgccttcttccgcatggtggacacgttcgaagggcacatcatcattgatggcattgacatcgccaaactgccgctgcacaccctgcgctcacgcctctccatcatcctgcaggaccccgtcctcttcagcggcaccatccgatttaacctggaccctgagaggaagtgctcagatagcacactgtgggaggccctggaaatcgcccagctgaagctggtggtgaaggcactgccaggaggcctcgatgccatcatcacagaaggcggggagaatttcagccagggacagaggcagctgttctgcctggcccgggccttcgtgaggaagaccagcatcttcatcatggacgaggccacggcttccattgacatggccacggaaaacatcctccaaaaggtggtgatgacagccttcgcagaccgcactgtggtcaccatcgcgcatcgagtgcacaccatcctgagtgcagacctggtgatcgtcctgaagcggggtgccatccttgagttcgataagccagagaagctgctcagccggaaggacagcgtcttcgcctccttcgtccgtgcagacaagtgacctgccagagcccaagtgccatcccacattcggaccctgcccatacccctgcctgggttttctaactgtaaatcacttgtaaataaatagatttgattatttcctana

SEQ ID NO: 414552 - DNA, 4183 bp, Homo sapiens
  misc_feature (4182)..(4182): n is a, c, g, or t
agagccatgggagactaggaagtctctaagcttcatagagagcctggcttggggggacacaggagccaaaggcagaggaagaagtggcagctttgtgcccccagaaacacgtgctcctgacctcacagttggccacagccagccaactctcccatccttctcccaccactttcccgtggggctaacttcaccctgtccacacggagtgacttaacagtttaagccccagagtcgggggccggggtacctgggacaagagtcctgagggaaatggggtgaggaactggaagtgccacagggctagagttctgcccctagcctactggagctgtgccccacaggctggccccactggactgcgctgcctccaagccatcctgggcatctccatgtgtagctgtcacgctcctcccactaaacgcctccctgtgcttcctctgcagttttcatgaacacggccatccccattgcagctgtcctcataactttcgtgggccatgtcagcttcttcaaagaggccgacttctcgccctccgtggcctttgcctccctctccctcttccatatcttggtcacaccgctgttcctgctgtccagtgtggtccgatctaccgtcaaagctctagtgagcgtgcaaaagctaagcgagttcctgtccagtgcagagatccgtgaggagcagtgtgccccccatgagcccacacctcagggcccagccagcaagtaccaggcggtgcccctcagggttgtgaaccgcaagcgtccagcccgggaggattgtcggggcctcaccggcccactgcagagcctggtccccagtgcagatggcgatgctgacaactgctgtgtccagatcatgggaggctacttcacgtggaccccagatggaatccccacactgtccaacatcaccattcgtatcccccgaggccagctgactatgatcgtggggcaggtgggctgcggcaagtcctcgctccttctagccgcactgggggagatgcagaaggtctcaggggctgtcttctggagcagccttcctgacagcgagataggagaggaccccagcccagagcgggagacagcgaccgacttggatatcaggaagagaggccccgtggcctatgcttcgcagaaaccatggctgctaaatgccactgtggaggagaacatcatctttgagagtcccttcaacaaacaacggtacaagatggtcattgaagcctgctctctgcagccagacatcgacatcctgccccatggagaccagacccagattggggaacggggcatcaacctgtctggtggtcaacgccagcgaatcagtgtggcccgagccctctaccagcacgccaacgttgtcttcttggatgaccccttctcagctctggatatccatctgagtgaccacttaatgcaggccggcatccttgagctgctccgggacgacaagaggacagtggtcttagtgacccacaagctacagtacctgccccatgcagactggatcattgccatgaaggatggcaccatccagagggagggtaccctcaaggacttccagaggtctgaatgccagctctttgagcactggaagaccctcatgaaccgacaggaccaagagctggagaaggagactgtcacagagagaaaagccacagagccaccccagggcctatctcgtgccatgtcctcgagggatggccttctgcaggatgaggaagaggaggaagaggaggcagctgagagcgaggaggatgacaacctgtcgtccatgctgcaccagcgtgctgagatcccatggcgagcctgcgccaagtacctgtcctccgccggcatcctgctcctgtcgttgctggtcttctcacagctgctcaagcacatggtcctggtggccatcgactactggctggccaagtggaccgacagcgccctgaccctgacccctgcagccaggaactgctccctcagccaggagtgcaccctcgaccagactgtctatgccatggtgttcacggtgctctgcagcctgggcattgtgctgtgcctcgtcacgtctgtcactgtggagtggacagggctgaaggtggccaagagactgcaccgcagcctgctaaaccggatcatcctagcccccatgaggttttttgagaccacgccccttgggagcatcctgaacagattttcatctgactgtaacaccatcgaccagcacatcccatccacgctggagtgcctgagccgctccaccctgctctgtgtctcagccctggccgtcatctcctatgtcacacctgtgttcctcgtggccctcttgcccctggccatcgtgtgctacttcatccagaagtacttccgggtggcgtccagggacctgcagcagctggatgacaccacccagcttccacttctctcacactttgccgaaaccgtagaaggactcaccaccatccgggccttcaggtatgaggcccggttccagcagaagcttctcgaatacacagactccaacaacattgcttccctcttcctcacagctgccaacagatggctggaagtccgaatggagtacatcggtgcatgtgtggtgctcatcgcagcggtgacctccatctccaactccctgcacagggagctctctgctggcctggtgggcctgggccttacctacgccctaatggtgagcggcagtgggctagggcagaggaggggtcagacaccagcactcccggagcaccttcgtcactggagacatgagacactcccaggccttaccccaatttcatttgcatctgatgccagagggacagtgcgggcaggaaggctgaccagcaggccccagggcccaggccccagacaggtggaggttggggagccacatgactgaccctccctgtgcctccagggagggctgctctgagcaggcagtggatggcagcaaaaggaatctggggccctggcccctctccagccttaagaagagccattctggtggctgaggacagaactaagcgaccatggagtgtgcgccactggcttgctccccacaggtctccaactacctcaactggatggtgaggaacctggcagacatggagctccagctgggggctgtgaagcgcatccatgggctcctgaaaaccgaggcagagagctacgaggggctcctgggtgagaggctcagggagaggggtggggaagagtccaaggaggagtgtgtctgggttgggggccacaagggagcctggggatggggtggcactttcggatactagctgtggcccatgcctggtggctgagcccagcccggcccccagcaccatcgctgatcccaaagaactggccagaccaagggaagatccagatccagaacctgagcgtgcgctacgacagctccctgaagccggtgctgaagcacgtcaatgccctcatctcccctggacagaagatcgggatctgcggccgcaccggcagtgggaagtcctccttctctcttgccttcttccgcatggtggacacgttcgaagggcacatcatcattgatggcattgacatcgccaaactgccgctgcacaccctgcgctcacgcctctccatcatcctgcaggaccccgtcctcttcagcggcaccatccgatttaacctggaccctgagaggaagtgctcagatagcacactgtgggaggccctggaaatcgcccagctgaagctggtggtgaaggcactgccaggaggcctcgatgccatcatcacagaaggcggggagaatttcagccagggacagaggcagctgttctgcctggcccgggccttcgtgaggaagaccagcatcttcatcatggacgaggccacggcttccattgacatggccacggaaaacatcctccaaaaggtggtgatgacagccttcgcagaccgcactgtggtcaccatcgcgcatcgagtgcacaccatcctgagtgcagacctggtgatcgtcctgaagcggggtgccatccttgagttcgataagccagagaagctgctcagccggaaggacagcgtcttcgcctccttcgtccgtgcagacaagtgacctgccagagcccaagtgccatcccacattcggaccctgcccatacccctgcctgggttttctaactgtaaatcacttgtaaataaatagatttgattatttcctana

SEQ ID NO: 414553 - DNA, 3592 bp, Homo sapiens
  misc_feature (3591)..(3591): n is a, c, g, or t
agagccatgggagactaggaagtctctaagcttcatagagagcctggcttggggggacacaggagccaaaggcagaggaagaagtggcagctttgtgcccccagaaacacgtgctcctgacctcacagttggccacagccagccaactctcccatccttctcccaccactttcccgtggggctaacttcaccctgtccacacggagtgacttaacagtttaagccccagagtcgggggccggggtacctgggacaagagtcctgagggaaatggggtgaggaactggaagtgccacagggctagagttctgcccctagcctactggagctgtgccccacaggctggccccactggactgcgctgcctccaagccatcctgggcatctccatgtgtagctgtcacgctcctcccactaaacgcctccctgtgcttcctctgcagttttcatgaacacggccatccccattgcagctgtcctcataactttcgtgggccatgtcagcttcttcaaagaggccgacttctcgccctccgtggcctttgcctccctctccctcttccatatcttggtcacaccgctgttcctgctgtccagtgtggtccgatctaccgtcaaagctctagtgagcgtgcaaaagctaagcgagttcctgtccagtgcagagatccgtgaggagcagtgtgccccccatgagcccacacctcagggcccagccagcaagtaccaggcggtgcccctcagggttgtgaaccgcaagcgtccagcccgggaggattgtcggggcctcaccggcccactgcagagcctggtccccagtgcagatggcgatgctgacaactgctgtgtccagatcatgggaggctacttcacgtggaccccagatggaatccccacactgtccaacatcaccattcgtatcccccgaggccagctgactatgatcgtggggcaggtgggctgcggcaagtcctcgctccttctagccgcactgggggagatgcagaaggtctcaggggctgtcttctggagcagccttcctgacagcgagataggagaggaccccagcccagagcgggagacagcgaccgacttggatatcaggaagagaggccccgtggcctatgcttcgcagaaaccatggctgctaaatgccactgtggaggagaacatcatctttgagagtcccttcaacaaacaacggtacaagatggtcattgaagcctgctctctgcagccagacatcgacatcctgccccatggagaccagacccagattggggaacggggcatcaacctgtctggtggtcaacgccagcgaatcagtgtggcccgagccctctaccagcacgccaacgttgtcttcttggatgaccccttctcagctctggatatccatctgagtgaccacttaatgcaggccggcatccttgagctgctccgggacgacaagaggacagtggtcttagtgacccacaagctacagtacctgccccatgcagactggatcattgccatgaaggatggcaccatccagagggagggtaccctcaaggacttccagaggtctgaatgccagctctttgagcactggaagaccctcatgaaccgacaggaccaagagctggagaaggagactgtcacagagagaaaagccacagagccaccccagggcctatctcgtgccatgtcctcgagggatggccttctgcaggatgaggaagaggaggaagaggaggcagctgagagcgaggaggatgacaacctgtcgtccatgctgcaccagcgtgctgagatcccatggcgagcctgcgccaagtacctgtcctccgccggcatcctgctcctgtcgttgctggtcttctcacagctgctcaagcacatggtcctggtggccatcgactactggctggccaagtggaccgacagcgccctgaccctgacccctgcagccaggaactgctccctcagccaggagtgcaccctcgaccagactgtctatgccatggtgttcacggtgctctgcagcctgggcattgtgctgtgcctcgtcacgtctgtcactgtggagtggacagggctgaaggtggccaagagactgcaccgcagcctgctaaaccggatcatcctagcccccatgaggttttttgagaccacgccccttgggagcatcctgaacagattttcatctgactgtaacaccatcgaccagcacatcccatccacgctggagtgcctgagccgctccaccctgctctgtgtctcagccctggccgtcatctcctatgtcacacctgtgttcctcgtggccctcttgcccctggccatcgtgtgctacttcatccagaagtacttccgggtggcgtccagggacctgcagcagctggatgacaccacccagcttccacttctctcacactttgccgaaaccgtagaaggactcaccaccatccgggccttcaggtatgaggcccggttccagcagaagcttctcgaatacacagactccaacaacattgcttccctcttcctcacagctgccaacagatggctggaagtccgaatggagtacatcggtgcatgtgtggtgctcatcgcagcggtgacctccatctccaactccctgcacagggagctctctgctggcctggtgggcctgggccttacctacgccctaatggtctccaactacctcaactggatggtgaggaacctggcagacatggagctccagctgggggctgtgaagcgcatccatgggctcctgaaaaccgaggcagagagctacgaggggctcctgggtgagcaccatcgctgatcccaaagaactggccagaccaagggaagatccagatccagaacctgagcgtgcgctacgacagctccctgaagccggtgctgaagcacgtcaatgccctcatctcccctggacagaagatcgggatctgcggccgcaccggcagtgggaagtcctccttctctcttgccttcttccgcatggtggacacgttcgaaggaccccgtcctcttcagcggcaccatccgatttaacctggaccctgagaggaagtgctcagatagcacactgtgggaggccctggaaatcgcccagctgaagctggtggtgaaggcactgccaggaggcctcgatgccatcatcacagaaggcggggagaatttcagccagggacagaggcagctgttctgcctggcccgggccttcgtgaggaagaccagcatcttcatcatggacgaggccacggcttccattgacatggccacggaaaacatcctccaaaaggtggtgatgacagccttcgcagaccgcactgtggtcaccatcgcgcatcgagtgcacaccatcctgagtgcagacctggtgatcgtcctgaagcggggtgccatccttgagttcgataagccagagaagctgctcagccggaaggacagcgtcttcgcctccttcgtccgtgcagacaagtgacctgccagagcccaagtgccatcccacattcggaccctgcccatacccctgcctgggttttctaactgtaaatcacttgtaaataaatagatttgattatttcctana

SEQ ID NO: 414554 - DNA, 3459 bp, Homo sapiens
  misc_feature (3458)..(3458): n is a, c, g, or t
agagccatgggagactaggaagtctctaagcttcatagagagcctggcttggggggacacaggagccaaaggcagaggaagaagtggcagctttgtgcccccagaaacacgtgctcctgacctcacagttggccacagccagccaactctcccatccttctcccaccactttcccgtggggctaacttcaccctgtccacacggagtgacttaacagtttaagccccagagtcgggggccggggtacctgggacaagagtcctgagggaaatggggtgaggaactggaagtgccacagggctagagttctgcccctagcctactggagctgtgccccacaggctggccccactggactgcgctgcctccaagccatcctgggcatctccatgtgtagctgtcacgctcctcccactaaacgcctccctgtgcttcctctgcagttttcatgaacacggccatccccattgcagctgtcctcataactttcgtgggccatgtcagcttcttcaaagaggccgacttctcgccctccgtggcctttgcctccctctccctcttccatatcttggtcacaccgctgttcctgctgtccagtgtggtccgatctaccgtcaaagctctagtgagcgtgcaaaagctaagcgagttcctgtccagtgcagagatccgtgaggagcagtgtgccccccatgagcccacacctcagggcccagccagcaagtaccaggcggtgcccctcagggttgtgaaccgcaagcgtccagcccgggaggattgtcggggcctcaccggcccactgcagagcctggtccccagtgcagatggcgatgctgacaactgctgtgtccagatcatgggaggctacttcacgtggaccccagatggaatccccacactgtccaacatcaccattcgtatcccccgaggccagctgactatgatcgtggggcaggtgggctgcggcaagtcctcgctccttctagccgcactgggggagatgcagaaggtctcaggggctgtcttctggagcagccttcctgacagcgagataggagaggaccccagcccagagcgggagacagcgaccgacttggatatcaggaagagaggccccgtggcctatgcttcgcagaaaccatggctgctaaatgccactgtggaggagaacatcatctttgagagtcccttcaacaaacaacggtacaagatggtcattgaagcctgctctctgcagccagacatcgacatcctgccccatggagaccagacccagattggggaacggggcatcaacctgtctggtggtcaacgccagcgaatcagtgtggcccgagccctctaccagcacgccaacgttgtcttcttggatgaccccttctcagctctggatatccatctgagtgaccacttaatgcaggccggcatccttgagctgctccgggacgacaagaggacagtggtcttagtgacccacaagctacagtacctgccccatgcagactggatcattgccatgaaggatggcaccatccagagggagggtaccctcaaggacttccagaggtctgaatgccagctctttgagcactggaagaccctcatgaaccgacaggaccaagagctggagaaggagactgtcacagagagaaaagccacagagccaccccagggcctatctcgtgccatgtcctcgagggatggccttctgcaggatgaggaagaggaggaagaggaggcagctgagagcgaggaggatgacaacctgtcgtccatgctgcaccagcgtgctgagatcccatggcgagcctgcgccaagtacctgtcctccgccggcatcctgctcctgtcgttgctggtcttctcacagctgctcaagcacatggtcctggtggccatcgactactggctggccaagtggaccgacagcgccctgaccctgacccctgcagccaggaactgctccctcagccaggagtgcaccctcgaccagactgtctatgccatggtgttcacggtgctctgcagcctgggcattgtgctgtgcctcgtcacgtctgtcactgtggagtggacagggctgaaggtggccaagagactgcaccgcagcctgctaaaccggatcatcctagcccccatgaggttttttgagaccacgccccttgggagcatcctgaacagattttcatctgactgtaacaccatcgaccagcacatcccatccacgctggagtgcctgagccgctccaccctgctctgtgtctcagccctggccgtcatctcctatgtcacacctgtgttcctcgtggccctcttgcccctggccatcgtgtgctacttcatccagaagtacttccgggtggcgtccagggacctgcagcagctggatgacaccacccagcttccacttctctcacactttgccgaaaccgtagaaggactcaccaccatccgggccttcaggtatgaggcccggttccagcagaagcttctcgaatacacagactccaacaacattgcttccctcttcctcacagctgccaacagatggctggaagtccgaatggagtacatcggtgcatgtgtggtgctcatcgcagcggtgacctccatctccaactccctgcacagggagctctctgctggcctggtgggcctgggccttacctacgccctaatggtctccaactacctcaactggatggtgaggaacctggcagacatggagctccagctgggggctgtgaagcgcatccatgggctcctgaaaaccgaggcagagagctacgaggggctcctgggtgagcaccatcgctgatcccaaagaactggccagaccaagggaagatccagatccagaacctgagcgtgcgctacgacagctccctgaagccggtgctgaagcacgtcaatgccctcatctcccctggacagaagatcgggatctgcggccgcaccggcagtgggaagtcctccttctctcttgccttcttccgcatggtggacacgttcgaagatgccatcatcacagaaggcggggagaatttcagccagggacagaggcagctgttctgcctggcccgggccttcgtgaggaagaccagcatcttcatcatggacgaggccacggcttccattgacatggccacggaaaacatcctccaaaaggtggtgatgacagccttcgcagaccgcactgtggtcaccatcgcgcatcgagtgcacaccatcctgagtgcagacctggtgatcgtcctgaagcggggtgccatccttgagttcgataagccagagaagctgctcagccggaaggacagcgtcttcgcctccttcgtccgtgcagacaagtgacctgccagagcccaagtgccatcccacattcggaccctgcccatacccctgcctgggttttctaactgtaaatcacttgtaaataaatagatttgattatttcctana

SEQ ID NO: 414555 - DNA, 3786 bp, Homo sapiens
  misc_feature (3785)..(3785): n is a, c, g, or t
agagccatgggagactaggaagtctctaagcttcatagagagcctggcttggggggacacaggagccaaaggcagaggaagaagtggcagctttgtgcccccagaaacacgtgctcctgacctcacagttggccacagccagccaactctcccatccttctcccaccactttcccgtggggctaacttcaccctgtccacacggagtgacttaacagtttaagccccagagtcgggggccggggtacctgggacaagagtcctgagggaaatggggtgaggaactggaagtgccacagggctagagttctgcccctagcctactggagctgtgccccacaggctggccccactggactgcgctgcctccaagccatcctgggcatctccatgtgtagctgtcacgctcctcccactaaacgcctccctgtgcttcctctgcagttttcatgaacacggccatccccattgcagctgtcctcataactttcgtgggccatgtcagcttcttcaaagaggccgacttctcgccctccgtggcctttgcctccctctccctcttccatatcttggtcacaccgctgttcctgctgtccagtgtggtccgatctaccgtcaaagctctagtgagcgtgcaaaagctaagcgagttcctgtccagtgcagagatccgtgaggagcagtgtgccccccatgagcccacacctcagggcccagccagcaagtaccaggcggtgcccctcagggttgtgaaccgcaagcgtccagcccgggaggattgtcggggcctcaccggcccactgcagagcctggtccccagtgcagatggcgatgctgacaactgctgtgtccagatcatgggaggctacttcacgtggaccccagatggaatccccacactgtccaacatcaccattcgtatcccccgaggccagctgactatgatcgtggggcaggtgggctgcggcaagtcctcgctccttctagccgcactgggggagatgcagaaggtctcaggggctgtcttctggagcagccttcctgacagcgagataggagaggaccccagcccagagcgggagacagcgaccgacttggatatcaggaagagaggccccgtggcctatgcttcgcagaaaccatggctgctaaatgccactgtggaggagaacatcatctttgagagtcccttcaacaaacaacggtacaagatggtcattgaagcctgctctctgcagccagacatcgacatcctgccccatggagaccagacccagattggggaacggggcatcaacctgtctggtggtcaacgccagcgaatcagtgtggcccgagccctctaccagcacgccaacgttgtcttcttggatgaccccttctcagctctggatatccatctgagtgaccacttaatgcaggccggcatccttgagctgctccgggacgacaagaggacagtggtcttagtgacccacaagctacagtacctgccccatgcagactggatcattgccatgaaggatggcaccatccagagggagggtaccctcaaggacttccagaggtctgaatgccagctctttgagcactggaagaccctcatgaaccgacaggaccaagagctggagaaggagactgtcacagagagaaaagccacagagccaccccagggcctatctcgtgccatgtcctcgagggatggccttctgcaggatgaggaagaggaggaagaggaggcagctgagagcgaggaggatgacaacctgtcgtccatgctgcaccagcgtgctgagatcccatggcgagcctgcgccaagtacctgtcctccgccggcatcctgctcctgtcgttgctggtcttctcacagctgctcaagcacatggtcctggtggccatcgactactggctggccaagtggaccgacagcgccctgaccctgacccctgcagccaggaactgctccctcagccaggagtgcaccctcgaccagactgtctatgccatggtgttcacggtgctctgcagcctgggcattgtgctgtgcctcgtcacgtctgtcactgtggagtggacagggctgaaggtggccaagagactgcaccgcagcctgctaaaccggatcatcctagcccccatgaggttttttgagaccacgccccttgggagcatcctgaacagattttcatctgactgtaacaccatcgaccagcacatcccatccacgctggagtgcctgagccgctccaccctgctctgtgtctcagccctggccgtcatctcctatgtcacacctgtgttcctcgtggccctcttgcccctggccatcgtgtgctacttcatccagaagtacttccgggtggcgtccagggacctgcagcagctggatgacaccacccagcttccacttctctcacactttgccgaaaccgtagaaggactcaccaccatccgggccttcaggtatgaggcccggttccagcagaagcttctcgaatacacagactccaacaacattgcttccctcttcctcacagctgccaacagatggctggaagtccgaatggagtacatcggtgcatgtgtggtgctcatcgcagcggtgacctccatctccaactccctgcacagggagctctctgctggcctggtgggcctgggccttacctacgccctaatggtctccaactacctcaactggatggtgaggaacctggcagacatggagctccagctgggggctgtgaagcgcatccatgggctcctgaaaaccgaggcagagagctacgaggggctcctgggtgagcaccatcgctgatcccaaagaactggccagaccaagggaagatccagatccagaacctgagcgtgcgctacgacagctccctgaagccggtgctgaagcacgtcaatgccctcatctcccctggacagaagatcgggatctgcggccgcaccggcagtgggaagtcctccttctctcttgccttcttccgcatggtggacacgttcgaagtgagttgtaaggcgggcaccccacgtgtacccacagccaccagatgaggcctcagccctggcacgtggtcagacatgacaggaggcccagcagtcaccgccttcccctgcaccctcactgggacccatgcagggggcacatcatcattgatggcattgacatcgccaaactgccgctgcacaccctgcgctcacgcctctccatcatcctgcaggaccccgtcctcttcagcggcaccatccgatgccatcatcacagaaggcggggagaatttcagccagggacagaggcagctgttctgcctggcccgggccttcgtgaggaagaccagcatcttcatcatggacgaggccacggcttccattgacatggccacggaaaacatcctccaaaaggtggtgatgacagccttcgcagaccgcactgtggtcaccatcgcgccacaggagggccaccctcagctgtggcccccaccgcgggtggtattcccaccatcctgacccgccccctcctgccctgcccagcatcgagtgcacaccatcctgagtgcagacctggtgatcgtcctgaagcggggtgccatccttgagttcgataagccagagaagctgctcagccggaaggacagcgtcttcgcctccttcgtccgtgcagacaagtgacctgccagagcccaagtgccatcccacattcggaccctgcccatacccctgcctgggttttctaactgtaaatcacttgtaaataaatagatttgattatttcctana

SEQ ID NO: 414556 - DNA, 955 bp, Homo sapiens
agagccatgggagactaggaagtctctaagcttcatagagagcctggcttggggggacacaggagccaaaggcagaggaagaagtggcagctttgtgcccccagaaacacgtgctcctgacctcacagttggccacagccagccaactctcccatccttctcccaccactttcccgtggggctaacttcaccctgtccacacggagtgacttaacagtttaagccccagagtcgggggccggggtacctgggacaagagtcctgagggaaatggggtgaggaactggaagtgccacagggctagagttctgcccctagcctactggagctgtgccccacaggctggccccactggactgcgctgcctccaagccatcctgggcatctccatgtgtagctgtcacgctcctcccactaaacgcctccctgtgcttcctctgcagttttcatgaacacggccatccccattgcagctgtcctcatatgctgagcgtttccagtgtgggagggacccacaccctgggccaccctggcctcacttgtgcctctgtccacagactttcgtgggccatgtcagcttcttcaaagaggccgacttctcgccctccgtggcctttgcctccctctccctcttccatatcttggtcacaccgctgttcctgctgtccagtgtggtccgatctaccgtcaaagctctagtgaggtgaggggagggtccgggcgagggcactgggcaggcaggtcctgtgtcagcctcaaggcttgctcgagtgatggccaaaccacagctgtttggtcccggaacacacccccattgctgggccttgctgtagctggtcctggttggtcagagggacattggcctgtatggtttcccagctcgccatccctgagcaaggacttgcttacatacctcccaggagaggggactcactgtcactttcacgacaactta

SEQ ID NO: 414557 - DNA, 2268 bp, Homo sapiens
  misc_feature (110)..(110): n is a, c, g, or t
cggggcccggggggcgggggcctgacggccgggccgggcggcggagctgcaagggacagaggcgcggcaggcgcgcggagccagcggagccagctgagcccgagcccagnccgcgcccgcgccgccatgcccctggccttctgcggcagcgagaaccactcggccgcctaccgggtggaccagggggtcctcaacaacggctgctttgtggacgcgctcaacgtggtgccgcacgtcttcctactcttcatcaccttccccatcctcttcattggatggggaagtcagagctccaaggtgcacatccaccacagcacatggcttcatttccctgggcacaacctgcggtggatcctgaccttcatgctgctcttcgtcctggtgtgtgagattgcagagggcatcctgtctgatggggtgaccgaatcccaccatctgcacctgtacatgccagccgggatggcgttcatggctgctgtcacctccgtggtctactatcacaacatcgagacttccaacttccccaagctgctaattgccctgctggtgtattggaccctggccttcatcaccaagaccatcaagtttgtcaagttcttggaccacgccatcggcttctcgcagctacgcttctgcctcacagggctgctggtgatcctctatgggatgctgctcctcgtggaggtcaatgtcatcagggtgaggagatacatcttcttcaagacaccgagggaggtgaagcctcccgaggacctgcaagacctgggggtacgcttcctgcagcccttcgtgaatctgctgtccaaaggcacctactggtggatgaacgccttcatcaagactgcccacaagaagcccatcgacttgcgagccatcgggaagctgcccatcgccatgagggccctcaccaactaccaacggctctgcgaggcctttgacgcccaggtgcggaaggacattcagggcactcaaggtgcccgggccatctggcaggcactcagccatgccttcgggaggcgcctggtcctcagcagcactttccgcatcttggccgacctgctgggcttcgccgggccactgtgcatctttgggatcgtggaccaccttgggaaggagaacgacgtcttccagcccaagacacaatttctcggggtttactttgtctcatcccaagagttccttgccaatgcctacgtcttagctgtgcttctgttccttgccctcctactgcaaaggacatttctgcaagcatcctactatgtggccattgaaactggaattaacttgagaggagcaatacagaccaagatttacaataaaattatgcacctgtccacctccaacctgtccatgggagaaatgactgctggacagatctgtaatctggttgccatcgacaccaatcagctcatgtggtttttcttcttgtgcccaaacctctgggctatgccagtacagatcattgtgggtgtgattctcctctactacatactcggagtcagtgccttaattggagcagctgtcatcattctactggctcctgtccagtacttcgtggccaccaagctgtctcaggcccagcggagcacactggagtattccaatgagcggctgaagcagaccaacgagatgctccgcggcatcaagctgctgaagctgtacgcctgggagaacatcttccgcacgcgggtggagacgacccgcaggaaggagatgaccagcctcagggcctttgccatctatacctccatctccattttcatgaacacggccatccccattgcagctgtcctcatatgctgagcgtttccagtgtgggagggacccacaccctgggccaccctggcctcacttgtgcctctgtccacagactttcgtgggccatgtcagcttcttcaaagaggccgacttctcgccctccgtggcctttgcctccctctccctcttccatatcttggtcacaccgctgttcctgctgtccagtgtggtccgatctaccgtcaaagctctagtgaggtgaggggagggtccgggcgagggcactgggcaggcaggtcctgtgtcagcctcaaggcttgctcgagtgatggccaaaccacagctgtttggtcccggaacacacccccattgctgggccttgctgtagctggtcctggttggtcagagggacattggcctgtatggtttcccagctcgccatccctgagcaaggacttgcttacatacctcccaggagaggggactcactgtcactttcacgacaactta

SEQ ID NO: 414558 - DNA, 503 bp, Homo sapiens
gctccctgacagccctctcatttcccttccagtgctgagcgtttccagtgtgggagggacccacaccctgggccaccctggcctcacttgtgcctctgtccacagactttcgtgggccatgtcagcttcttcaaagaggccgacttctcgccctccgtggcctttgcctccctctccctcttccatatcttggtcacaccgctgttcctgctgtccagtgtggtccgatctaccgtcaaagctctagtgaggtgaggggagggtccgggcgagggcactgggcaggcaggtcctgtgtcagcctcaaggcttgctcgagtgatggccaaaccacagctgtttggtcccggaacacacccccattgctgggccttgctgtagctggtcctggttggtcagagggacattggcctgtatggtttcccagctcgccatccctgagcaaggacttgcttacatacctcccaggagaggggactcactgtcactttcacgacaactta

SEQ ID NO: 414559 - DNA, 530 bp, Homo sapiens
tgcggccgcaccggcagtgggaagtcctccttctctcttgccttcttccgcatggtggacacgttcgaagggcacatcatcattgatggcattgacatcgccaaactgccgctgcacaccctgcgctcacgcctctccatcatcctgcaggctcagggagaggggtggggaagagtccaaggaggagtgtgtctgggttgggggccacaagggagcctggggatggggtggcactttcggatactagctgtggcccatgcctggtggctgagcccagcccggcccccagcaccatcgctgatcccaaagaactggccagaccaagggaagatccagatccagaacctgagcgtgcgctacgacagctccctgaagccggtgctgaagcacgtcaatgccctcatctcccctggacagaagatcgggatctgcggccgccaactttttttttttttgtactggtaccccaggaggatgccttgtaactgctctttggtcatgatagtggtaatgaatccattcatgtcaaa

SEQ ID NO: 414560 - DNA, 2970 bp, Homo sapiens
  misc_feature (2969)..(2969): n is a, c, g, or t
ggccagtctcccactcccctgctctggaagtgatccaggggctggaatcagtgtcttttggctttcatggaggaggggaagccagagactattcactgggaactggctgcctttctgttctctcctgggcggtgggacacgcctaatgaagatcatgggaggctacttcacgtggaccccagatggaatccccacactgtccaacatcaccattcgtatcccccgaggccagctgactatgatcgtggggcaggtgggctgcggcaagtcctcgctccttctagccgcactgggggagatgcagaaggtctcaggggctgtcttctggagcagccttcctgacagcgagataggagaggaccccagcccagagcgggagacagcgaccgacttggatatcaggaagagaggccccgtggcctatgcttcgcagaaaccatggctgctaaatgccactgtggaggagaacatcatctttgagagtcccttcaacaaacaacggtacaagatggtcattgaagcctgctctctgcagccagacatcgacatcctgccccatggagaccagacccagattggggaacggggcatcaacctgtctggtggtcaacgccagcgaatcagtgtggcccgagccctctaccagcacgccaacgttgtcttcttggatgaccccttctcagctctggatatccatctgagtgaccacttaatgcaggccggcatccttgagctgctccgggacgacaagaggacagtggtcttagtgacccacaagctacagtacctgccccatgcagactggatcattgccatgaaggatggcaccatccagagggagggtaccctcaaggacttccagaggtctgaatgccagctctttgagcactggaagaccctcatgaaccgacaggaccaagagctggagaaggagactgtcacagagagaaaagccacagagccaccccagggcctatctcgtgccatgtcctcgagggatggccttctgcaggatgaggaagaggaggaagaggaggcagctgagagcgaggaggatgacaacctgtcgtccatgctgcaccagcgtgctgagatcccatggcgagcctgcgccaagtacctgtcctccgccggcatcctgctcctgtcgttgctggtcttctcacagctgctcaagcacatggtcctggtggccatcgactactggctggccaagtggaccgacagcgccctgaccctgacccctgcagccaggaactgctccctcagccaggagtgcaccctcgaccagactgtctatgccatggtgttcacggtgctctgcagcctgggcattgtgctgtgcctcgtcacgtctgtcactgtggagtggacagggctgaaggtggccaagagactgcaccgcagcctgctaaaccggatcatcctagcccccatgaggttttttgagaccacgccccttgggagcatcctgaacagattttcatctgactgtaacaccatcgaccagcacatcccatccacgctggagtgcctgagccgctccaccctgctctgtgtctcagccctggccgtcatctcctatgtcacacctgtgttcctcgtggccctcttgcccctggccatcgtgtgctacttcatccagaagtacttccgggtggcgtccagggacctgcagcagctggatgacaccacccagcttccacttctctcacactttgccgaaaccgtagaaggactcaccaccatccgggccttcaggtatgaggcccggttccagcagaagcttctcgaatacacagactccaacaacattgcttccctcttcctcacagctgccaacagatggctggaagtccgaatggagtacatcggtgcatgtgtggtgctcatcgcagcggtgacctccatctccaactccctgcacagggagctctctgctggcctggtgggcctgggccttacctacgccctaatggtctccaactacctcaactggatggtgaggaacctggcagacatggagctccagctgggggctgtgaagcgcatccatgggctcctgaaaaccgaggcagagagctacgaggggctcctgggtgagcaccatcgctgatcccaaagaactggccagaccaagggaagatccagatccagaacctgagcgtgcgctacgacagctccctgaagccggtgctgaagcacgtcaatgccctcatctcccctggacagaagatcgggatctgcggccgcaccggcagtgggaagtcctccttctctcttgccttcttccgcatggtggacacgttcgaagggcacatcatcattgatggcattgacatcgccaaactgccgctgcacaccctgcgctcacgcctctccatcatcctgcaggaccccgtcctcttcagcggcaccatccgatttaacctggaccctgagaggaagtgctcagatagcacactgtgggaggccctggaaatcgcccagctgaagctggtggtgaaggcactgccaggaggcctcgatgccatcatcacagaaggcggggagaatttcagccagggacagaggcagctgttctgcctggcccgggccttcgtgaggaagaccagcatcttcatcatggacgaggccacggcttccattgacatggccacggaaaacatcctccaaaaggtggtgatgacagccttcgcagaccgcactgtggtcaccatcgcgcatcgagtgcacaccatcctgagtgcagacctggtgatcgtcctgaagcggggtgccatccttgagttcgataagccagagaagctgctcagccggaaggacagcgtcttcgcctccttcgtccgtgcagacaagtgacctgccagagcccaagtgccatcccacattcggaccctgcccatacccctgcctgggttttctaactgtaaatcacttgtaaataaatagatttgattatttcctana

SEQ ID NO: 414561 - DNA, 3813 bp, Homo sapiens
  misc_feature (3812)..(3812): n is a, c, g, or t
agagccatgggagactaggaagtctctaagcttcatagagagcctggcttggggggacacaggagccaaaggcagaggaagaagtggcagctttgtgcccccagaaacacgtgctcctgacctcacagttggccacagccagccaactctcccatccttctcccaccactttcccgtggggctaacttcaccctgtccacacggagtgacttaacagtttaagccccagagtcgggggccggggtacctgggacaagagtcctgagggaaatggggtgaggaactggaagtgccacagggctagagttctgcccctagcctactggagctgtgccccacaggctggccccactggactgcgctgcctccaagccatcctgggcatctccatgtgtagctgtcacgctcctcccactaaacgcctccctgtgcttcctctgcagttttcatgaacacggccatccccattgcagctgtcctcataactttcgtgggccatgtcagcttcttcaaagaggccgacttctcgccctccgtggcctttgcctccctctccctcttccatatcttggtcacaccgctgttcctgctgtccagtgtggtccgatctaccgtcaaagctctagtgagcgtgcaaaagctaagcgagttcctgtccagtgcagagatccgtgaggagcagtgtgccccccatgagcccacacctcagggcccagccagcaagtaccaggcggtgcccctcagggttgtgaaccgcaagcgtccagcccgggaggattgtcggggcctcaccggcccactgcagagcctggtccccagtgcagatggcgatgctgacaactgctgtgtccagatcatgggaggctacttcacgtggaccccagatggaatccccacactgtccaacatcaccattcgtatcccccgaggccagctgactatgatcgtggggcaggtgggctgcggcaagtcctcgctccttctagccgcactgggggagatgcagaaggtctcaggggctgtcttctggagcagccttcctgacagcgagataggagaggaccccagcccagagcgggagacagcgaccgacttggatatcaggaagagaggccccgtggcctatgcttcgcagaaaccatggctgctaaatgccactgtggaggagaacatcatctttgagagtcccttcaacaaacaacggtacaagatggtcattgaagcctgctctctgcagccagacatcgacatcctgccccatggagaccagacccagattggggaacggggcatcaacctgtctggtggtcaacgccagcgaatcagtgtggcccgagccctctaccagcacgccaacgttgtcttcttggatgaccccttctcagctctggatatccatctgagtgaccacttaatgcaggccggcatccttgagctgctccgggacgacaagaggacagtggtcttagtgacccacaagctacagtacctgccccatgcagactggatcattgccatgaaggatggcaccatccagagggagggtaccctcaaggacttccagaggtctgaatgccagctctttgagcactggaagaccctcatgaaccgacaggaccaagagctggagaaggagactgtcacagagagaaaagccacagagccaccccagggcctatctcgtgccatgtcctcgagggatggccttctgcaggatgaggaagaggaggaagaggaggcagctgagagcgaggaggatgacaacctgtcgtccatgctgcaccagcgtgctgagatcccatggcgagcctgcgccaagtacctgtcctccgccggcatcctgctcctgtcgttgctggtcttctcacagctgctcaagcacatggtcctggtggccatcgactactggctggccaagtggaccgacagcgccctgaccctgacccctgcagccaggaactgctccctcagccaggagtgcaccctcgaccagactgtctatgccatggtgttcacggtgctctgcagcctgggcattgtgctgtgcctcgtcacgtctgtcactgtggagtggacagggctgaaggtggccaagagactgcaccgcagcctgctaaaccggatcatcctagcccccatgaggttttttgagaccacgccccttgggagcatcctgaacagattttcatctgactgtaacaccatcgaccagcacatcccatccacgctggagtgcctgagccgctccaccctgctctgtgtctcagccctggccgtcatctcctatgtcacacctgtgttcctcgtggccctcttgcccctggccatcgtgtgctacttcatccagaagtacttccgggtggcgtccagggacctgcagcagctggatgacaccacccagcttccacttctctcacactttgccgaaaccgtagaaggactcaccaccatccgggccttcaggtatgaggcccggttccagcagaagcttctcgaatacacagactccaacaacattgcttccctcttcctcacagctgccaacagatggctggaagtccgaatggagtacatcggtgcatgtgtggtgctcatcgcagcggtgacctccatctccaactccctgcacagggagctctctgctggcctggtgggcctgggccttacctacgccctaatggtctccaactacctcaactggatggtgaggaacctggcagacatggagctccagctgggggctgtgaagcgcatccatgggctcctgaaaaccgaggcagagagctacgaggggctcctgggtgagaggctcagggagaggggtggggaagagtccaaggaggagtgtgtctgggttgggggccacaagggagcctggggatggggtggcactttcggatactagctgtggcccatgcctggtggctgagcccagcccggcccccagcaccatcgctgatcccaaagaactggccagaccaagggaagatccagatccagaacctgagcgtgcgctacgacagctccctgaagccggtgctgaagcacgtcaatgccctcatctcccctggacagaagatcgggatctgcggccgcaccggcagtgggaagtcctccttctctcttgccttcttccgcatggtggacacgttcgaagggcacatcatcattgatggcattgacatcgccaaactgccgctgcacaccctgcgctcacgcctctccatcatcctgcaggaccccgtcctcttcagcggcaccatccgatttaacctggaccctgagaggaagtgctcagatagcacactgtgggaggccctggaaatcgcccagctgaagctggtggtgaaggcactgccaggaggcctcgatgccatcatcacagaaggcggggagaatttcagccagggacagaggcagctgttctgcctggcccgggccttcgtgaggaagaccagcatcttcatcatggacgaggccacggcttccattgacatggccacggaaaacatcctccaaaaggtggtgatgacagccttcgcagaccgcactgtggtcaccatcgcgcatcgagtgcacaccatcctgagtgcagacctggtgatcgtcctgaagcggggtgccatccttgagttcgataagccagagaagctgctcagccggaaggacagcgtcttcgcctccttcgtccgtgcagacaagtgacctgccagagcccaagtgccatcccacattcggaccctgcccatacccctgcctgggttttctaactgtaaatcacttgtaaataaatagatttgattatttcctana

SEQ ID NO: 414562 - DNA, 1485 bp, Homo sapiens
  misc_feature (1484)..(1484): n is a, c, g, or t
ccgacactctggactcccccagctcacacgggctttgtcagggcctccctctctgcgaatggtcaggggctttccctagggcactgccccgagcttcagggcagggacctgggggcagacagcgaggccacccttgtattgagggtgagcccctgcctatggccctggcccagctctcctctcgtttcccactctgtctctttgtctctgtctcactttgctgtggctgtccatgtcattctctgaccttgggatgtacctctgtccctgcctctctcatccttctatgtcactatctgtctccgtattgtaatttctgttggtacccaagtgccaggaagcaacgggatcagaggtggctccattgtagggcggggcacacagacacatccatgcataccactctcagctgcccctgtgtcctcctgccacacccatgcccatagagacacaccactgccccccagctctccttcagccaagtacccggcacacccagacccacaccaaggcccaggcaaatggacatccatgcctgcacttgcgtgccggtccctgtgtaagccctctctggacccactgcaggaaacaagcccaaacctgtggtgtccaaagagaaactagtcagaaaaccaggccaaaaagataccctgtgacctcccacacctgcacacacacccagagctagcatagaggctattcccagcagccccagagtcccagtggcggtgcctgcttctctctttccagatcgggatctgcggccgcaccggcagtgggaagtcctccttctctcttgccttcttccgcatggtggacacgttcgaagggcacatcatcattgatggcattgacatcgccaaactgccgctgcacaccctgcgctcacgcctctccatcatcctgcaggaccccgtcctcttcagcggcaccatccgatttaacctggaccctgagaggaagtgctcagatagcacactgtgggaggccctggaaatcgcccagctgaagctggtggtgaaggcactgccaggaggcctcgatgccatcatcacagaaggcggggagaatttcagccagggacagaggcagctgttctgcctggcccgggccttcgtgaggaagaccagcatcttcatcatggacgaggccacggcttccattgacatggccacggaaaacatcctccaaaaggtggtgatgacagccttcgcagaccgcactgtggtcaccatcgcgcatcgagtgcacaccatcctgagtgcagacctggtgatcgtcctgaagcggggtgccatccttgagttcgataagccagagaagctgctcagccggaaggacagcgtcttcgcctccttcgtccgtgcagacaagtgacctgccagagcccaagtgccatcccacattcggaccctgcccatacccctgcctgggttttctaactgtaaatcacttgtaaataaatagatttgattatttcctana

SEQ ID NO: 414563 - DNA, 3593 bp, Homo sapiens
  misc_feature (3592)..(3592): n is a, c, g, or t
agagccatgggagactaggaagtctctaagcttcatagagagcctggcttggggggacacaggagccaaaggcagaggaagaagtggcagctttgtgcccccagaaacacgtgctcctgacctcacagttggccacagccagccaactctcccatccttctcccaccactttcccgtggggctaacttcaccctgtccacacggagtgacttaacagtttaagccccagagtcgggggccggggtacctgggacaagagtcctgagggaaatggggtgaggaactggaagtgccacagggctagagttctgcccctagcctactggagctgtgccccacaggctggccccactggactgcgctgcctccaagccatcctgggcatctccatgtgtagctgtcacgctcctcccactaaacgcctccctgtgcttcctctgcagttttcatgaacacggccatccccattgcagctgtcctcataactttcgtgggccatgtcagcttcttcaaagaggccgacttctcgccctccgtggcctttgcctccctctccctcttccatatcttggtcacaccgctgttcctgctgtccagtgtggtccgatctaccgtcaaagctctagtgagcgtgcaaaagctaagcgagttcctgtccagtgcagagatccgtgaggagcagtgtgccccccatgagcccacacctcagggcccagccagcaagtaccaggcggtgcccctcagggttgtgaaccgcaagcgtccagcccgggaggattgtcggggcctcaccggcccactgcagagcctggtccccagtgcagatggcgatgctgacaactgctgtgtccagatcatgggaggctacttcacgtggaccccagatggaatccccacactgtccaacatcaccattcgtatcccccgaggccagctgactatgatcgtggggcaggtgggctgcggcaagtcctcgctccttctagccgcactgggggagatgcagaaggtctcaggggctgtcttctggagcagccttcctgacagcgagataggagaggaccccagcccagagcgggagacagcgaccgacttggatatcaggaagagaggccccgtggcctatgcttcgcagaaaccatggctgctaaatgccactgtggaggagaacatcatctttgagagtcccttcaacaaacaacggtacaagatggtcattgaagcctgctctctgcagccagacatcgacatcctgccccatggagaccagacccagattggggaacggggcatcaacctgtctggtggtcaacgccagcgaatcagtgtggcccgagccctctaccagcacgccaacgttgtcttcttggatgaccccttctcagctctggatatccatctgagtgaccacttaatgcaggccggcatccttgagctgctccgggacgacaagaggacagtggtcttagtgacccacaagctacagtacctgccccatgcagactggatcattgccatgaaggatggcaccatccagagggagggtaccctcaaggacttccagaggtctgaatgccagctctttgagcactggaagaccctcatgaaccgacaggaccaagagctggagaaggagactgtcacagagagaaaagccacagagccaccccagggcctatctcgtgccatgtcctcgagggatggccttctgcaggatgaggaagaggaggaagaggaggcagctgagagcgaggaggatgacaacctgtcgtccatgctgcaccagcgtgctgagatcccatggcgagcctgcgccaagtacctgtcctccgccggcatcctgctcctgtcgttgctggtcttctcacagctgctcaagcacatggtcctggtggccatcgactactggctggccaagtggaccgacagcgccctgaccctgacccctgcagccaggaactgctccctcagccaggagtgcaccctcgaccagactgtctatgccatggtgttcacggtgctctgcagcctgggcattgtgctgtgcctcgtcacgtctgtcactgtggagtggacagggctgaaggtggccaagagactgcaccgcagcctgctaaaccggatcatcctagcccccatgaggttttttgagaccacgccccttgggagcatcctgaacagattttcatctgactgtaacaccatcgaccagcacatcccatccacgctggagtgcctgagccgctccaccctgctctgtgtctcagccctggccgtcatctcctatgtcacacctgtgttcctcgtggccctcttgcccctggccatcgtgtgctacttcatccagaagtacttccgggtggcgtccagggacctgcagcagctggatgacaccacccagcttccacttctctcacactttgccgaaaccgtagaaggactcaccaccatccgggccttcaggtatgaggcccggttccagcagaagcttctcgaatacacagactccaacaacattgcttccctcttcctcacagctgccaacagatggctggaagtccgaatggagtacatcggtgcatgtgtggtgctcatcgcagcggtgacctccatctccaactccctgcacagggagctctctgctggcctggtgggcctgggccttacctacgccctaatggtctccaactacctcaactggatggtgaggaacctggcagacatggagctccagctgggggctgtgaagcgcatccatgggctcctgaaaaccgaggcagagagctacgaggggctcctgggtgagcaccatcgctgatcccaaagaactggccagaccaagggaagatccagatccagaacctgagcgtgcgctacgacagctccctgaagccggtgctgaagcacgtcaatgccctcatctcccctggacagaagatcgggatctgcggccgcaccggcagtgggaagtcctccttctctcttgccttcttccgcatggtggacacgttcgaagtgagttgtaaggcgggcaccccacgtgtacccacagccaccagatgaggcctcagccctggcacgtggtcagacatgacaggaggcccagcagtcaccgccttcccctgcaccctcactgggacccatgcagggatgccatcatcacagaaggcggggagaatttcagccagggacagaggcagctgttctgcctggcccgggccttcgtgaggaagaccagcatcttcatcatggacgaggccacggcttccattgacatggccacggaaaacatcctccaaaaggtggtgatgacagccttcgcagaccgcactgtggtcaccatcgcgcatcgagtgcacaccatcctgagtgcagacctggtgatcgtcctgaagcggggtgccatccttgagttcgataagccagagaagctgctcagccggaaggacagcgtcttcgcctccttcgtccgtgcagacaagtgacctgccagagcccaagtgccatcccacattcggaccctgcccatacccctgcctgggttttctaactgtaaatcacttgtaaataaatagatttgattatttcctana

SEQ ID NO: 414564 - DNA, 1002 bp, Homo sapiens
  misc_feature (28)..(28): n is a, c, g, or t
  misc_feature (46)..(46): n is a, c, g, or t
ccgcctttggaaaagccggggggtcccnaacccctggaacaccacngcacctttaaaaaaaacaggttaaaggccaaaagaacaaatgctctgattcctagtgccaaaggttcaattcagtgtatataactgaacacactcatccatttgtgcttttgtttttttttatggtgcttaaagtaaagagcccatcctttgcaagtcatccatgttgttacttaggcattttatcttggctcaaattgttgaagaatggtggcttgtttcatggtttttgtatttgtgtctaatgcacgttttaacatgatagacgcaatgcattgtgtagctagttttctggaaaagtcaatcttttaggaattgtttttcagatcttcaataaattttttctttaaatttcaaaaaacaatgtgcttgtgttgatgccttacaaaaaccattgtatatttgtgtattccttcttgtatttagacagtggtttttcaggtgcgtgctttgttttctggtatggcctttatggaatgagacgctttagctttggtacgtagcgctaatccatagcagctttggcagtttgctgtcttgagtcttagctaaaaagttagaagtttacatgactgttttttttattttccctaaattattacttactctgagcattaattaagggcattttcacctgtgtaaaattatggtcagcttttttctgtctataattgtttacttttgtgggtttactctagaaacatgagccaaaaatgtcaatagacaacacagtattaaaataacccaaaagttgtaaagggcaacgtttctcccctttgatagggacactaaagtggtctgtacttgggtagaggatggcagacgttaagaattaaaatgcgtctgggtgcagtggctcacgcttgtaatcccagcactttgggaggctgaggcgggcggatcacctgaggtcaggagttcgacaccagcctgatgaacatggagaaaccccatctc

SEQ ID NO: 414565 - DNA, 799 bp, Homo sapiens
tcatcgctgtctggaacagcgatgactcgagggtagagagtagggggcggtagtcgggggtggtgggagaaggaggaggcggcgaatcacttataaatggcgccgaagcaggacccgaagcctaaattccaggagggtgagcgagtgctgtgctttcatgggcctcttctttatgaagcaaagtgtgtaaaggttgccataaaggacaaacaagtgaaatacttcatacattacagtggttggaataaaaattgggatgaatgggttccggagagcagagtactcaaatacgtggacaccaatttgcagaaacagcgagaacttcaaaaagccaatcaggagcagtatgcagaggggaagatgagaggggctgccccaggaaagaagacatctggtctgcaacagaaaaatgttgaagtgaaaacgaaaaagaacaaacagaaaacacctggaaatggagatggtggcagtaccagtgagacccctcagcctcctcggaagaaaagggcccgggtagatcctactgttgaaaatgaggaaacattcatgaacagagttgaagttaaagtaaagattcctgaagagctaaaaccgtggcttgttgatgactgggacttaattaccaggcaaaaacagctcttttatcttcctgccaagaagaatgtggattccattcttgaggattatgcaaattacaagaaatctcgtggaaacacagataataaggagtatgcggtaattgaagttgtgcaaggatcagatgctaaatcttggcagacatccgaggcaccatgtccaa

SEQ ID NO: 414566 - DNA, 484 bp, Homo sapiens
  misc_feature (1)..(1): n is a, c, g, or t
naattcgcggccgcgttcgaacacggtgcgagaagacgacaggcggcgaatcacttataaatggcgccgaagcaggacccgaagcctaaattccaggagggtgagcgagtgctgtgctttcatgggcctcttctttatgaagcaaagtgtgtaaaggttgccataaaggacaaacaagtgaaatacttcatacattacagtggttggaataaaaattgggatgaatgggttccggagagcagagtactcaaatacgtggacaccaatttgcagaaacagcgagaacttcaaaaagccaatcaggagcagtatgcagaggggaagatgagaggggctgccccaggaaagaagacatctggtctgcaacagaaaaatgttgaagtgtaagaagctctttgttttgattttgcatactatatgtgaagataatattttatgttcattgtgtgttagactgtgttgaagtggaaactttggaacattg

SEQ ID NO: 414567 - DNA, 514 bp, Homo sapiens
  misc_feature (495)..(495): n is a, c, g, or t
atccttaattaaattaatcttttccccccggcggcgaatcacttataaatggcgccgaagcaggacccgaagcctaaattccaggagggtgagcgagtgctgtgctttcatgggcctcttctttatgaagcaaagtgtgtaaaggttgccataaaggacaaacaagtgaaatacttcatacattacagtggttggaataaaaattgggatgaatgggttccggagagcagagtactcaaatacgtggacaccaatttgcagaaacagcgagaacttcaaaaagccaatcaggagcagtatgcagaggggaagatgagaggggctgccccaggaaagaagacatctggtctgcaacagaaaaatgttgaagtgaaaacgaaaaagaacaaacagaaaacacctggaaatggagatggtggcagtaccagtgagacccctcagcctcctcggaagaaaagggcccgggtagatcctactgttgaaaatgaggcatcngaacaggttgaattaagtg

SEQ ID NO: 414568 - DNA, 2342 bp, Homo sapiens
  misc_feature (6)..(6): n is a, c, g, or t
  misc_feature (9)..(11): n is a, c, g, or t
  misc_feature (34)..(34): n is a, c, g, or t
aagganggnnnaagaaaccctatcggctaggtancgaggcggtagagagtagggggcggtagtcgggggtggtgggagaaggaggaggcggcgaatcacttataaatggcgccgaagcaggacccgaagcctaaattccaggagggtgagcgagtgctgtgctttcatgggcctcttctttatgaagcaaagtgtgtaaaggttgccataaaggacaaacaagtgaaatacttcatacattacagtggttggaataaaaattgggatgaatgggttccggagagcagagtactcaaatacgtggacaccaatttgcagaaacagcgagaacttcaaaaagccaatcaggagcagtatgcagaggggaagatgagaggggctgccccaggaaagaagacatctggtctgcaacagaaaaatgttgaagtgaaaacgaaaaagaacaaacagaaaacacctggaaatggagatggtggcagtaccagtgagacccctcagcctcctcggaagaaaagggcccgggtagatcctactgttgaaaatgaggaaacattcatgaacagagttgaagttaaagtaaagattcctgaagagctaaaaccgtggcttgttgatgactgggacttaattaccaggcaaaaacagctcttttatcttcctgccaagaagaatgtggattccattcttgaggattatgcaaattacaagaaatctcgtggaaacacagataataaggagtatgcggttaatgaagttgtggcagggataaaagaatacttcaacgtaatgttgggtacccagctactctataaatttgagagaccacagtatgctgaaattcttgcagatcatcccgatgcacccatgtcccaggtgtatggagcgccacatctcctgagattatttgtacgaattggagcaatgttggcttatacacctctggatgagaagagccttgctttattactcaattatcttcacgatttcctaaagtacctggcaaagaattctgcaactttgttcagtgccagcgattatgaagtggctcctcctgagtaccatcggaaagctgtgtgagaggcactctcactcacttatgtttggatctccgtaaacacatttttgttcttagtctatctcttgtacaaacgatgtgctttgaagatgttagtgtataacaattgatgtttgttttctgtttgattttaaacagagaaaaaataaaagggggtaatagctccttttttcttctttctttttttttttcatttcaaaattgctgccagtgttttcaatgatggacaacagagggatatgctgtagagtgttttattgcctagttgacaaagctgcttttgaatgctggtggttctattcctttgacactacgcacttttataatacatgttaatgctatatgacaaaatgctctgattcctagtgccaaaggttcaattcagtgtatataactgaacacactcatccatttgtgcttttgtttttttttatggtgcttaaagtaaagagcccatcctttgcaagtcatccatgttgttacttaggcattttatcttggctcaaattgttgaagaatggtggcttgtttcatggtttttgtatttgtgtctaatgcacgttttaacatgatagacgcaatgcattgtgtagctagttttctggaaaagtcaatcttttaggaattgtttttcagatcttcaataaattttttctttaaatttcaaaaaacaatgtgcttgtgttgatgccttacaaaaaccattgtatatttgtgtattccttcttgtatttagacagtggtttttcaggtgcgtgctttgttttctggtatggcctttatggaatgagacgctttagctttggtacgtagcgctaatccatagcagctttggcagtttgctgtcttgagtcttagctaaaaagttagaagtttacatgactgttttttttattttccctaaattattacttactctgagcattaattaagggcattttcacctgtgtaaaattatggtcagcttttttctgtctataattgtttacttttgtgggtttactctagaaacatgagccaaaaatgtcaatagacaacacagtattaaaataacccaaaagttgtaaagggcaacgtttctcccctttgatagggacactaaagtggtctgtacttgggtagaggatggcagacgttaagaattaaaatgcgtctgggtgcagtggctcacgcttgtaatcccagcactttgggaggctgaggcgggcggatcacctgaggtcaggagttcgacaccagcctgatgaacatggagaaaccccatctc

SEQ ID NO: 414569 - DNA, 1833 bp, Homo sapiens
  misc_feature (6)..(6): n is a, c, g, or t
  misc_feature (9)..(11): n is a, c, g, or t
  misc_feature (34)..(34): n is a, c, g, or t
  misc_feature (1763)..(1763): n is a, c, g, or t
  misc_feature (1769)..(1769): n is a, c, g, or t
  misc_feature (1771)..(1771): n is a, c, g, or t
  misc_feature (1786)..(1786): n is a, c, g, or t
  misc_feature (1788)..(1788): n is a, c, g, or t
  misc_feature (1790)..(1790): n is a, c, g, or t
  misc_feature (1795)..(1795): n is a, c, g, or t
  misc_feature (1798)..(1799): n is a, c, g, or t
  misc_feature (1803)..(1803): n is a, c, g, or t
  misc_feature (1807)..(1807): n is a, c, g, or t
  misc_feature (1816)..(1816): n is a, c, g, or t
  misc_feature (1825)..(1825): n is a, c, g, or t
aagganggnnnaagaaaccctatcggctaggtancgaggcggtagagagtagggggcggtagtcgggggtggtgggagaaggaggaggcggcgaatcacttataaatggcgccgaagcaggacccgaagcctaaattccaggagggtgagcgagtgctgtgctttcatgggcctcttctttatgaagcaaagtgtgtaaaggttgccataaaggacaaacaagtgaaatacttcatacattacagtggttggaataaaaattgggatgaatgggttccggagagcagagtactcaaatacgtggacaccaatttgcagaaacagcgagaacttcaaaaagccaatcaggagcagtatgcagaggggaagatgagaggggctgccccaggaaagaagacatctggtctgcaacagaaaaatgttgaagtgaaaacgaaaaagaacaaacagaaaacacctggaaatggagatggtggcagtaccagtgagacccctcagcctcctcggaagaaaagggcccgggtagatcctactgttgaaaatgaggaaacattcatgaacagagttgaagttaaagtaaagattcctgaagagctaaaaccgtggcttgttgatgactgggacttaattaccaggcaaaaacagctcttttatcttcctgccaagaagaatgtggattccattcttgaggattatgcaaattacaagaaatctcgtggaaacacagataataaggagtatgcggttaatgaagttgtggcagggataaaagaatacttcaacgtaatgttgggtacccagctactctataaatttgagagaccacagtatgctgaaattcttgcagatcatcccgatgcacccatgtcccaggtgtatggagcgccacatctcctgagattatttgtacgaattggagcaatgttggcttatacacctctggatgagaagagccttgctttattactcaattatcttcacgatttcctaaagtacctggcaaagaattctgcaactttgttcagtgccagcgattatgaagtggctcctcctgagtaccatcggaaagctgtgtgagaggcactctcactcacttatgtttggatctccgtaaacacatttttgttcttagtctatctcttgtacaaacgatgtgctttgaagatgttagtgtataacaattgatgtttgttttctgtttgattttaaacagagaaaaaataaaagggggtaatagctccttttttcttctttctttttttttttcatttcaaaattgctgccagtgttttcaatgatggacaacagagggatatgctgtagagtgttttattgcctagttgacaaagctgcttttgaatgctggtggttctattcctttgacactacgcacttttataatacatgttaatgctatatgacaaaatgctctgattcctagtgccaaaggttcaattcagtgtatataactgaacacactcatccatttgtgcttttgtttttttttatggtgcttaaagtaaagagcccatcctttgcaagtcatccatgttgttacttaggcattttatcttggctcaaattgttgaagaatggtggcttgtttcatggtttttgtatttgtgtctaatgcacgttttaacatgatagacgcaatgcattgtgtagctagttttctggaaaagtcaatcttttaggaattgtttttcagatcttcaataaattttttctttaaatttcaaaaaaaaaagaaaaaaaaaaanaacaanancgaaaaaagaagaanananaaaangannaaanaaancaaagaacnagaaacaanaaaacaaa

SEQ ID NO: 414570 - DNA, 1854 bp, Homo sapiens
  misc_feature (6)..(6): n is a, c, g, or t
  misc_feature (9)..(11): n is a, c, g, or t
  misc_feature (34)..(34): n is a, c, g, or t
  misc_feature (1784)..(1784): n is a, c, g, or t
  misc_feature (1790)..(1790): n is a, c, g, or t
  misc_feature (1792)..(1792): n is a, c, g, or t
  misc_feature (1807)..(1807): n is a, c, g, or t
  misc_feature (1809)..(1809): n is a, c, g, or t
  misc_feature (1811)..(1811): n is a, c, g, or t
  misc_feature (1816)..(1816): n is a, c, g, or t
  misc_feature (1819)..(1820): n is a, c, g, or t
  misc_feature (1824)..(1824): n is a, c, g, or t
  misc_feature (1828)..(1828): n is a, c, g, or t
  misc_feature (1837)..(1837): n is a, c, g, or t
  misc_feature (1846)..(1846): n is a, c, g, or t
aagganggnnnaagaaaccctatcggctaggtancgaggcggtagagagtagggggcggtagtcgggggtggtgggagaaggaggaggcggcgaatcacttataaatggcgccgaagcaggacccgaagcctaaattccaggagggtgagcgagtgctgtgctttcatgggcctcttctttatgaagcaaagtgtgtaaaggttgccataaaggacaaacaagtgaaatacttcatacattacagtggttggaataaaaattgggatgaatgggttccggagagcagagtactcaaatacgtggacaccaatttgcagaaacagcgagaacttcaaaaagccaatcaggagcagtatgcagaggggaagatgagaggggctgccccaggaaagaagacatctggtctgcaacagaaaaatgttgaagtgaaaacgaaaaagaacaaacagaaaacacctggaaatggagatggtggcagtaccagtgagacccctcagcctcctcggaagaaaagggcccgggtagatcctactgttgaaaatgaggaaacattcatgaacagagttgaagttaaagtaaagattcctgaagagctaaaaccgtggcttgttgatgactgggacttaattaccaggcaaaaacagctcttttatcttcctgccaagaagaatgtggattccattcttgaggattatgcaaattacaagaaatctcgtggaaacacagataataaggagtatgcggttaatgaagttgtggcagggataaaagaatacttcaacgtaatgttgggtacccagctactctataaatttgagagaccacagtatgctgaaattcttgcagatcatcccgatgcacccatgtcccaggtgtatggagcgccacatctcctgagattatttgtacgaattggagcaatgttggcttatacacctctggatgagaagagccttgctttattactcaattatcttcacgatttcctaaagtacctggcaaagaattctgcaactttgttcagtgccagcgattatgaagtggctcctcctgagtaccatcggaaagctgtgtgagaggcactctcactcacttatgtttggatctccgtaaacacatttttgttcttagtctatctcttgtacaaacgatgtgctttgaagatgttagtgtataacaattgatgtttgttttctgtttgattttaaacagagaaaaaataaaagggggtaatagctccttttttcttctttctttttttttttcatttcaaaattgctgccagtgttttcaatgatggacaacagagggatatgctgtagagtgttttattgcctagttgacaaagctgcttttgaatgctggtggttctattcctttgacactacgcacttttataatacatgttaatgctatatgacaaaatgctctgattcctagtgccaaaggttcaattcagtgtatataactgaacacactcatccatttgtgcttttgtttttttttatggtgcttaaagtaaagagcccatcctttgcaagtcatccatgttgttacttaggcattttatcttggctcaaattgttgaagaatggtggcttgtttcatggtttttgtatttgtgtctaatgcacgttttaacatgatagacgcaatgcattgtgtagctagttttctggaaaagtcaatcttttaggaattgtttttcagatcttccacataaaactttttttctccttttaaatttttccaaaagacagcacaaaaaaagaaaaaaaaaaanaacaanancgaaaaaagaagaanananaaaangannaaanaaancaaagaacnagaaacaanaaaacaaa

SEQ ID NO: 414571 - DNA, 1562 bp, Homo sapiens
  misc_feature (6)..(6): n is a, c, g, or t
  misc_feature (9)..(11): n is a, c, g, or t
  misc_feature (34)..(34): n is a, c, g, or t
aagganggnnnaagaaaccctatcggctaggtancgaggcggtagagagtagggggcggtagtcgggggtggtgggagaaggaggaggcggcgaatcacttataaatggcgccgaagcaggacccgaagcctaaattccaggagggtgagcgagtgctgtgctttcatgggcctcttctttatgaagcaaagtgtgtaaaggttgccataaaggacaaacaagtgaaatacttcatacattacagtggttggaataaaaattgggatgaatgggttccggagagcagagtactcaaatacgtggacaccaatttgcagaaacagcgagaacttcaaaaagccaatcaggagcagtatgcagaggggaagatgagaggggctgccccaggaaagaagacatctggtctgcaacagaaaaatgttgaagtgaaaacgaaaaagaacaaacagaaaacacctggaaatggagatggtggcagtaccagtgagacccctcagcctcctcggaagaaaagggcccgggtagatcctactgttgaaaatgaggaaacattcatgaacagagttgaagttaaagtaaagattcctgaagagctaaaaccgtggcttgttgatgactgggacttaattaccaggcaaaaacagctcttttatcttcctgccaagaagaatgtggattccattcttgaggattatgcaaattacaagaaatctcgtggaaacacagataataaggagtatgcggttaatgaagttgtggcagggataaaagaatacttcaacgtaatgttgggtacccagctactctataaatttgagagaccacagtatgctgaaattcttgcagatcatcccgatgcacccatgtcccaggtgtatggagcgccacatctcctgagattatttgtacgaattggagcaatgttggcttatacacctctggatgagaagagccttgctttattactcaattatcttcacgatttcctaaagtacctggcaaagaattctgcaactttgttcagtgccagcgattatgaagtggctcctcctgagtaccatcggaaagctgtgtgagaggcactctcactcacttatgtttggatctccgtaaacacatttttgttcttagtctatctcttgtacaaacgatgtgctttgaagatgttagtgtataacaattgatgtttgttttctgtttgattttaaacagagaaaaaataaaagggggtaatagctccttttttcttctttctttttttttttcatttcaaaattgctgccagtgttttcaatgatggacaacagagggatatgctgtagagtgttttattgcctagttgacaaagctgcttttgaatgctggtggttctattcctttgacactacgcacttttataatacatgttaatgctatatgacaaaatgctctgattcctagtgccaaaggttcaattcagtgtatataactgaacacactcatccatttgtgcttttgtttttttttatggtgcttaaagtaaagagcccatcctttgcaagtcatccatgttgttacttag

SEQ ID NO: 414572 - DNA, 2284 bp, Homo sapiens
  misc_feature (6)..(6): n is a, c, g, or t
  misc_feature (9)..(11): n is a, c, g, or t
  misc_feature (34)..(34): n is a, c, g, or t
aagganggnnnaagaaaccctatcggctaggtancgaggcggtagagagtagggggcggtagtcgggggtggtgggagaaggaggaggcggcgaatcacttataaatggcgccgaagcaggacccgaagcctaaattccaggagggtgagcgagtgctgtgctttcatgggcctcttctttatgaagcaaagtgtgtaaaggttgccataaaggacaaacaagtgaaatacttcatacattacagtggttggaataaaaattgggatgaatgggttccggagagcagagtactcaaatacgtggacaccaatttgcagaaacagcgagaacttcaaaaagccaatcaggagcagtatgcagaggggaagatgagaggggctgccccaggaaagaagacatctggtctgcaacagaaaaatgttgaagtgaaaacgaaaaagaacaaacagaaaacacctggaaatggagatggtggcagtaccagtgagacccctcagcctcctcggaagaaaagggcccgggtagatcctactgttgaaaatgaggaaacattcatgaacagagttgaagttaaagtaaagattcctgaagagctaaaaccgtggcttgttgatgactgggacttaattaccaggcaaaaacagctcttttatcttcctgccaagaagaatgtggattccattcttgaggattatgcaaattacaagaaatctcgtggaaacacagataataaggagtatgcggttaatgaagttgtggcagggataaaagaatacttcaacgtaatgttgggtacccagctactctataaatttgagagaccacagtatgctgaaattcttgcagatcatcccgatgcacccatgtcccaggtgtatggagcgccacatctcctgagattatttgtacgaattggagcaatgttggcttatacacctctggatgagaagagccttgctttattactcaattatcttcacgatttcctaaagtacctggcaaagaattctgcaactttgttcagtgccagcgattatgaagtggctcctcctgagtaccatcggaaagctgtgtgagaggcactctcactcacttatgtttggatctccgtaaacacatttttgttcttagtctatctcttgtacaaacgatgtgctttgaagatgttagtgtataacaattgatgtttgttttctgtttgattttaaacagagaaaaaataaaagggggtaatagctccttttttcttctttctttttttttttcatttcaaaattgctgccagtgttttcaatgatggacaacagagggatatgctgtagagtgttttattgcctagttgacaaagctgcttttgaatgctggtggttctattcctttgacactacgcacttttataatacatgttaatgctatatgacaaaatgctctgattcctagtgccaaatatggtgcttaaagtaaagagcccatcctttgcaagtcatccatgttgttacttaggcattttatcttggctcaaattgttgaagaatggtggcttgtttcatggtttttgtatttgtgtctaatgcacgttttaacatgatagacgcaatgcattgtgtagctagttttctggaaaagtcaatcttttaggaattgtttttcagatcttcaataaattttttctttaaatttcaaaaaacaatgtgcttgtgttgatgccttacaaaaaccattgtatatttgtgtattccttcttgtatttagacagtggtttttcaggtgcgtgctttgttttctggtatggcctttatggaatgagacgctttagctttggtacgtagcgctaatccatagcagctttggcagtttgctgtcttgagtcttagctaaaaagttagaagtttacatgactgttttttttattttccctaaattattacttactctgagcattaattaagggcattttcacctgtgtaaaattatggtcagcttttttctgtctataattgtttacttttgtgggtttactctagaaacatgagccaaaaatgtcaatagacaacacagtattaaaataacccaaaagttgtaaagggcaacgtttctcccctttgatagggacactaaagtggtctgtacttgggtagaggatggcagacgttaagaattaaaatgcgtctgggtgcagtggctcacgcttgtaatcccagcactttgggaggctgaggcgggcggatcacctgaggtcaggagttcgacaccagcctgatgaacatggagaaaccccatctc

SEQ ID NO: 414573 - DNA, 2449 bp, Homo sapiens
  misc_feature (6)..(6): n is a, c, g, or t
  misc_feature (9)..(11): n is a, c, g, or t
  misc_feature (34)..(34): n is a, c, g, or t
  misc_feature (1926)..(1927): n is a, c, g, or t
aagganggnnnaagaaaccctatcggctaggtancgaggcggtagagagtagggggcggtagtcgggggtggtgggagaaggaggaggcggcgaatcacttataaatggcgccgaagcaggacccgaagcctaaattccaggagggtgagtgtgcgcctttgggaaaaaggcacctaacggcgcaggagatagaggcgggctcgaggtgattgaggcttgagggccgggggcggcgcgggctgcgccctgagaaggcggcggtcagtgctttgtgcggggaaagcgcattgcggatggcaattccggtgagcgagtgctgtgctttcatgggcctcttctttatgaagcaaagtgtgtaaaggttgccataaaggacaaacaagtgaaatacttcatacattacagtggttggaataaaaattgggatgaatgggttccggagagcagagtactcaaatacgtggacaccaatttgcagaaacagcgagaacttcaaaaagccaatcaggagcagtatgcagaggggaagatgagaggggctgccccaggaaagaagacatctggtctgcaacagaaaaatgttgaagtgaaaacgaaaaagaacaaacagaaaacacctggaaatggagatggtggcagtaccagtgagacccctcagcctcctcggaagaaaagggcccgggtagatcctactgttgaaaatgaggaaacattcatgaacagagttgaagttaaagtaaagattcctgaagagctaaaaccgtggcttgttgatgactgggacttaattaccaggcaaaaacagctcttttatcttcctgccaagaagaatgtggattccattcttgaggattatgcaaattacaagaaatctcgtggaaacacagataataaggagtatgcggttaatgaagttgtggcagggataaaagaatacttcaacgtaatgttgggtacccagctactctataaatttgagagaccacagtatgctgaaattcttgcagatcatcccgatgcacccatgtcccaggtgtatggagcgccacatctcctgagattatttgtacgaattggagcaatgttggcttatacacctctggatgagaagagccttgctttattactcaattatcttcacgatttcctaaagtacctggcaaagaattctgcaactttgttcagtgccagcgattatgaagtggctcctcctgagtaccatcggaaagctgtgtgagaggcactctcactcacttatgtttggatctccgtaaacacatttttgttcttagtctatctcttgtacaaacgatgtgctttgaagatgttagtgtataacaattgatgtttgttttctgtttgattttaaacagagaaaaaataaaagggggtaatagctccttttttcttctttctttttttttttcatttcaaaattgctgccagtgttttcaatgatggacaacagagggatatgctgtagagtgttttattgcctagttgacaaagctgcttttgaatgctggtggttctattcctttgacactacgcacttttataatacatgttaatgctatatgacaaaatgctctgattcctagtgccaaaggttcaattcagtgtatataactgaacacactcatccatttgtgcttttgtttttttttatggtgcttaaagtaaagagcccatcctttgcaagtcatccatgttgttacttaggcattttatcttggctcaaattgttgaagaatggtggcttgtttcatggtttttgtatttgtgtctaatgcacgttttaacatgatagacgcaatgcattgtgtagctagttttctggaaaagtcaatcttttaggaattgtttttcagatcttcaataaattttttctttaaatttcaaaaaaaaaaaaaaaaaaaaaaaannaaaaaaaaaaaaaaaaaaaaagaggggggggcgcagcactaaaaagtacccccagggggggcacaagaatacacgggggtaccaccaggtttcgtctgtggcacaaaggggggcccattagagagggaggcaggtagtaaacgagcacatcgagcagcgtggcgcgcggcaatttataacaaaaacagctgtgtgaagaagtgggggaaaaaacggcgctaataacggtggggagacaactctttggagaagagaggaaacaactatcaactaagtgggggggagggaggagaccacatatatggtggggagaaaaaaatatccacatgagacgggagaattttatcgagaagcatataaaggggagaaaaaatttttttgaagacattttaaaaaaggagacatataataggggggttaaaaaaaaaagaaggaggagatatttagcgagcgaagagagaagaaaaaaaattttggtgagacaagagggacaatgtagcgatgtggggaaaaaaaattgtg

SEQ ID NO: 414574 - DNA, 2405 bp, Homo sapiens
  misc_feature (6)..(6): n is a, c, g, or t
  misc_feature (9)..(11): n is a, c, g, or t
  misc_feature (34)..(34): n is a, c, g, or t
  misc_feature (1882)..(1883): n is a, c, g, or t
aagganggnnnaagaaaccctatcggctaggtancgaggcggtagagagtagggggcggtagtcgggggtggtgggagaaggaggaggcggcgaatcacttataaatggcgccgaagcaggacccgaagcctaaattccaggagggtgagcgagtgctgtgctttcatgggcctcttctttatgaagcaaagtgtgtaaaggttgccataaaggacaaacaagtgaaatacttcatacattacagtggttggaataaaaaaagtgctgtgaggcccaggcgctctgaaaaatctttgaagacacatgaggatattgtagccctttttcctgttcctgaaggagctccctcagtacaccaccccctcctgacctctagttgggatgaatgggttccggagagcagagtactcaaatacgtggacaccaatttgcagaaacagcgagaacttcaaaaagccaatcaggagcagtatgcagaggggaagatgagaggggctgccccaggaaagaagacatctggtctgcaacagaaaaatgttgaagtgaaaacgaaaaagaacaaacagaaaacacctggaaatggagatggtggcagtaccagtgagacccctcagcctcctcggaagaaaagggcccgggtagatcctactgttgaaaatgaggaaacattcatgaacagagttgaagttaaagtaaagattcctgaagagctaaaaccgtggcttgttgatgactgggacttaattaccaggcaaaaacagctcttttatcttcctgccaagaagaatgtggattccattcttgaggattatgcaaattacaagaaatctcgtggaaacacagataataaggagtatgcggttaatgaagttgtggcagggataaaagaatacttcaacgtaatgttgggtacccagctactctataaatttgagagaccacagtatgctgaaattcttgcagatcatcccgatgcacccatgtcccaggtgtatggagcgccacatctcctgagattatttgtacgaattggagcaatgttggcttatacacctctggatgagaagagccttgctttattactcaattatcttcacgatttcctaaagtacctggcaaagaattctgcaactttgttcagtgccagcgattatgaagtggctcctcctgagtaccatcggaaagctgtgtgagaggcactctcactcacttatgtttggatctccgtaaacacatttttgttcttagtctatctcttgtacaaacgatgtgctttgaagatgttagtgtataacaattgatgtttgttttctgtttgattttaaacagagaaaaaataaaagggggtaatagctccttttttcttctttctttttttttttcatttcaaaattgctgccagtgttttcaatgatggacaacagagggatatgctgtagagtgttttattgcctagttgacaaagctgcttttgaatgctggtggttctattcctttgacactacgcacttttataatacatgttaatgctatatgacaaaatgctctgattcctagtgccaaaggttcaattcagtgtatataactgaacacactcatccatttgtgcttttgtttttttttatggtgcttaaagtaaagagcccatcctttgcaagtcatccatgttgttacttaggcattttatcttggctcaaattgttgaagaatggtggcttgtttcatggtttttgtatttgtgtctaatgcacgttttaacatgatagacgcaatgcattgtgtagctagttttctggaaaagtcaatcttttaggaattgtttttcagatcttcaataaattttttctttaaatttcaaaaaaaaaaaaaaaaaaaaaaaannaaaaaaaaaaaaaaaaaaaaagaggggggggcgcagcactaaaaagtacccccagggggggcacaagaatacacgggggtaccaccaggtttcgtctgtggcacaaaggggggcccattagagagggaggcaggtagtaaacgagcacatcgagcagcgtggcgcgcggcaatttataacaaaaacagctgtgtgaagaagtgggggaaaaaacggcgctaataacggtggggagacaactctttggagaagagaggaaacaactatcaactaagtgggggggagggaggagaccacatatatggtggggagaaaaaaatatccacatgagacgggagaattttatcgagaagcatataaaggggagaaaaaatttttttgaagacattttaaaaaaggagacatataataggggggttaaaaaaaaaagaaggaggagatatttagcgagcgaagagagaagaaaaaaaattttggtgagacaagagggacaatgtagcgatgtggggaaaaaaaattgtg

SEQ ID NO: 414575 - DNA, 2243 bp, Homo sapiens
  misc_feature (6)..(6): n is a, c, g, or t
  misc_feature (9)..(11): n is a, c, g, or t
  misc_feature (34)..(34): n is a, c, g, or t
  misc_feature (1720)..(1721): n is a, c, g, or t
aagganggnnnaagaaaccctatcggctaggtancgaggcggtagagagtagggggcggtagtcgggggtggtgggagaaggaggaggcggcgaatcacttataaatggcgccgaagcaggacccgaagcctaaattccaggagggtgagcgagtgctgtgctttcatgggcctcttctttatgaagcaaagtgtgtaaaggttgccataaaggacaaacaagtgaaatacttcatacattacagtggttggaataaaaattgggatgaatgggttccggagagcagagtactcaaatacgtggacaccaatttgcagaaacagcgagaacttcaaaaagccaatcaggagcagtatgcagaggggaagatgagaggggctgccccaggaaagaagacatctggtctgcaacagaaaaatgttgaagtgaaaacgaaaaagaacaaacagaaaacacctggaaatggagatggtggcagtaccagtgagacccctcagcctcctcggaagaaaagggcccgggtagatcctactgttgaaaatgaggaaacattcatgaacagagttgaagttaaagtaaagattcctgaagagctaaaaccgtggcttgttgatgactgggacttaattaccaggcaaaaacaggattatgcaaattacaagaaatctcgtggaaacacagataataaggagtatgcggttaatgaagttgtggcagggataaaagaatacttcaacgtaatgttgggtacccagctactctataaatttgagagaccacagtatgctgaaattcttgcagatcatcccgatgcacccatgtcccaggtgtatggagcgccacatctcctgagattatttgtacgaattggagcaatgttggcttatacacctctggatgagaagagccttgctttattactcaattatcttcacgatttcctaaagtacctggcaaagaattctgcaactttgttcagtgccagcgattatgaagtggctcctcctgagtaccatcggaaagctgtgtgagaggcactctcactcacttatgtttggatctccgtaaacacatttttgttcttagtctatctcttgtacaaacgatgtgctttgaagatgttagtgtataacaattgatgtttgttttctgtttgattttaaacagagaaaaaataaaagggggtaatagctccttttttcttctttctttttttttttcatttcaaaattgctgccagtgttttcaatgatggacaacagagggatatgctgtagagtgttttattgcctagttgacaaagctgcttttgaatgctggtggttctattcctttgacactacgcacttttataatacatgttaatgctatatgacaaaatgctctgattcctagtgccaaaggttcaattcagtgtatataactgaacacactcatccatttgtgcttttgtttttttttatggtgcttaaagtaaagagcccatcctttgcaagtcatccatgttgttacttaggcattttatcttggctcaaattgttgaagaatggtggcttgtttcatggtttttgtatttgtgtctaatgcacgttttaacatgatagacgcaatgcattgtgtagctagttttctggaaaagtcaatcttttaggaattgtttttcagatcttcaataaattttttctttaaatttcaaaaaaaaaaaaaaaaaaaaaaaannaaaaaaaaaaaaaaaaaaaaagaggggggggcgcagcactaaaaagtacccccagggggggcacaagaatacacgggggtaccaccaggtttcgtctgtggcacaaaggggggcccattagagagggaggcaggtagtaaacgagcacatcgagcagcgtggcgcgcggcaatttataacaaaaacagctgtgtgaagaagtgggggaaaaaacggcgctaataacggtggggagacaactctttggagaagagaggaaacaactatcaactaagtgggggggagggaggagaccacatatatggtggggagaaaaaaatatccacatgagacgggagaattttatcgagaagcatataaaggggagaaaaaatttttttgaagacattttaaaaaaggagacatataataggggggttaaaaaaaaaagaaggaggagatatttagcgagcgaagagagaagaaaaaaaattttggtgagacaagagggacaatgtagcgatgtggggaaaaaaaattgtg

SEQ ID NO: 414576 - DNA, 1020 bp, Homo sapiens
  misc_feature (6)..(6): n is a, c, g, or t
  misc_feature (9)..(11): n is a, c, g, or t
  misc_feature (34)..(34): n is a, c, g, or t
aagganggnnnaagaaaccctatcggctaggtancgaggcggtagagagtagggggcggtagtcgggggtggtgggagaaggaggaggcggcgaatcacttataaatggcgccgaagcaggacccgaagcctaaattccaggagggtgagcgagtgctgtgctttcatgggcctcttctttatgaagcaaagtgtgtaaaggttgccataaaggacaaacaagtgaaatacttcatacattacagtggttggaataaaaattgggatgaatgggttccggagagcagagtactcaaatacgtggacaccaatttgcagaaacagcgagaacttcaaaaagccaatcaggagcagtatgcagaggggaagatgagaggggctgccccaggaaagaagacatctggtctgcaacagaaaaatgttgaagtgaaaacgaaaaagaacaaacagaaaacacctggaaatggagatggtggcagtaccagtgagacccctcagcctcctcggaagaaaagggcccgggtagatcctactgttgaaaatgaggaaacattcatgaacagagttgaagttaaagtaaagattcctgaagagctaaaaccgtggcttgttgatgactgggacttaattaccaggcaaaaacagctcttttatcttcctgccaagaagaatgtggattccattcttgaggattatgcaaattacaagaaatctcgtggaaacacagataataaggagtatgcggttaatgaagttgtggcagggataaaagaatacttcaacgtaatgttgggtacccagctactctataaatttgagagaccacagtatgctgaaattcttgcagatcatcccgatgcacccatgtcccaggtgtatggagcgccacatctcctgagattatttgtacgaattggagcaatgttggcttatacacctctggatgagaagagccttgctttattactcaattatcttcacgatttcctaaaccatggcaaaaagcaaatttgcctcgga

SEQ ID NO: 414577 - DNA, 1651 bp, Homo sapiens
  misc_feature (1128)..(1129): n is a, c, g, or t
cggacgcgtgggtcgacccacgcgtccggaagaatgtggattccattcttgaggattatgcaaattacaagaaatctcgtggaaacacagataataaggagtatgcggttaatgaagttgtggcagggataaaagaatacttcaacgtaatgttgggtacccagctactctataaatttgagagaccacagtatgctgaaattcttgcagatcatcccgatgcacccatgtcccaggtgtatggagcgccacatctcctgagattatttgtacgaattggagcaatgttggcttatacacctctggatgagaagagccttgctttattactcaattatcttcacgatttcctaaagtacctggcaaagaattctgcaactttgttcagtgccagcgattatgaagtggctcctcctgagtaccatcggaaagctgtgtgagaggcactctcactcacttatgtttggatctccgtaaacacatttttgttcttagtctatctcttgtacaaacgatgtgctttgaagatgttagtgtataacaattgatgtttgttttctgtttgattttaaacagagaaaaaataaaagggggtaatagctccttttttcttctttctttttttttttcatttcaaaattgctgccagtgttttcaatgatggacaacagagggatatgctgtagagtgttttattgcctagttgacaaagctgcttttgaatgctggtggttctattcctttgacactacgcacttttataatacatgttaatgctatatgacaaaatgctctgattcctagtgccaaaggttcaattcagtgtatataactgaacacactcatccatttgtgcttttgtttttttttatggtgcttaaagtaaagagcccatcctttgcaagtcatccatgttgttacttaggcattttatcttggctcaaattgttgaagaatggtggcttgtttcatggtttttgtatttgtgtctaatgcacgttttaacatgatagacgcaatgcattgtgtagctagttttctggaaaagtcaatcttttaggaattgtttttcagatcttcaataaattttttctttaaatttcaaaaaaaaaaaaaaaaaaaaaaaannaaaaaaaaaaaaaaaaaaaaagaggggggggcgcagcactaaaaagtacccccagggggggcacaagaatacacgggggtaccaccaggtttcgtctgtggcacaaaggggggcccattagagagggaggcaggtagtaaacgagcacatcgagcagcgtggcgcgcggcaatttataacaaaaacagctgtgtgaagaagtgggggaaaaaacggcgctaataacggtggggagacaactctttggagaagagaggaaacaactatcaactaagtgggggggagggaggagaccacatatatggtggggagaaaaaaatatccacatgagacgggagaattttatcgagaagcatataaaggggagaaaaaatttttttgaagacattttaaaaaaggagacatataataggggggttaaaaaaaaaagaaggaggagatatttagcgagcgaagagagaagaaaaaaaattttggtgagacaagagggacaatgtagcgatgtggggaaaaaaaattgtg

SEQ ID NO: 414578 - DNA, 960 bp, Homo sapiens
  misc_feature (6)..(6): n is a, c, g, or t
  misc_feature (9)..(11): n is a, c, g, or t
  misc_feature (34)..(34): n is a, c, g, or t
aagganggnnnaagaaaccctatcggctaggtancgaggcggtagagagtagggggcggtagtcgggggtggtgggagaaggaggaggcggcgaatcacttataaatggcgccgaagcaggacccgaagcctaaattccaggagggtgagcgagtgctgtgctttcatgggcctcttctttatgaagcaaagtgtgtaaaggttgccataaaggacaaacaagtgaaatacttcatacattacagtggttggaataaaaattgggatgaatgggttccggagagcagagtactcaaatacgtggacaccaatttgcagaaacagcgagaacttcaaaaagccaatcaggagcagtatgcagaggggaagatgagaggggctgccccaggaaagaagacatctggtctgcaacagaaaaatgttgaagtgaaaacgaaaaagaacaaacagaaaacacctggaaatggagatggtggcagtaccagtgagacccctcagcctcctcggaagaaaagggcccgggtagatcctactgttgaaaatgaggaaacattcatgaacagagttgaagttaaagtaaagattcctgaagagctaaaaccgtggcttgttgatgactgggacttaattaccaggcaaaaacagctcttttatcttcctgccaagaagaatgtggattccattcttgaggattatgcaaattacaagaaatctcgtggaaacacagataataaggagtatgcggttaatgaagttgtggcagggataaaagaatacttcaacgtaatgttgggtacccagctactctataaatttgagagaccacagtatgctgaaattcttgcagatcatcccgatgcacccatgtcccaggtgtatggagcgccacatctcctgagattatttgcaggaccaaaactgtataggctttctatgtgttcataaaggtgtagaattgga

SEQ ID NO: 414579 - DNA, 1710 bp, Homo sapiens
  misc_feature (6)..(6): n is a, c, g, or t
  misc_feature (9)..(11): n is a, c, g, or t
  misc_feature (34)..(34): n is a, c, g, or t
  misc_feature (1187)..(1188): n is a, c, g, or t
aagganggnnnaagaaaccctatcggctaggtancgaggcggtagagagtagggggcggtagtcgggggtggtgggagaaggaggaggcggcgaatcacttataaatggcgccgaagcaggacccgaagcctaaattccaggagggtgagcgagtgctgtgctttcatgggcctcttctttatgaagcaaagtgtgtaaaggttgccataaaggacaaacaagtgaaatacttcatacattacagtggttggaataaaaattgggatgaatgggttccggagagcagagtactcaaatacgtggacaccaatttgcagaaacagcgagaacttcaaaaagccaatcaggagcagtatgcagaggggaagatgagaggggctgccccaggaaagaagacatctggtctgcaacagaaaaatgttgaagtgaaaacgaaaaagaacaaacagaaaacacctggaaatggagatggtggcataccatcggaaagctgtgtgagaggcactctcactcacttatgtttggatctccgtaaacacatttttgttcttagtctatctcttgtacaaacgatgtgctttgaagatgttagtgtataacaattgatgtttgttttctgtttgattttaaacagagaaaaaataaaagggggtaatagctccttttttcttctttctttttttttttcatttcaaaattgctgccagtgttttcaatgatggacaacagagggatatgctgtagagtgttttattgcctagttgacaaagctgcttttgaatgctggtggttctattcctttgacactacgcacttttataatacatgttaatgctatatgacaaaatgctctgattcctagtgccaaaggttcaattcagtgtatataactgaacacactcatccatttgtgcttttgtttttttttatggtgcttaaagtaaagagcccatcctttgcaagtcatccatgttgttacttaggcattttatcttggctcaaattgttgaagaatggtggcttgtttcatggtttttgtatttgtgtctaatgcacgttttaacatgatagacgcaatgcattgtgtagctagttttctggaaaagtcaatcttttaggaattgtttttcagatcttcaataaattttttctttaaatttcaaaaaaaaaaaaaaaaaaaaaaaannaaaaaaaaaaaaaaaaaaaaagaggggggggcgcagcactaaaaagtacccccagggggggcacaagaatacacgggggtaccaccaggtttcgtctgtggcacaaaggggggcccattagagagggaggcaggtagtaaacgagcacatcgagcagcgtggcgcgcggcaatttataacaaaaacagctgtgtgaagaagtgggggaaaaaacggcgctaataacggtggggagacaactctttggagaagagaggaaacaactatcaactaagtgggggggagggaggagaccacatatatggtggggagaaaaaaatatccacatgagacgggagaattttatcgagaagcatataaaggggagaaaaaatttttttgaagacattttaaaaaaggagacatataataggggggttaaaaaaaaaagaaggaggagatatttagcgagcgaagagagaagaaaaaaaattttggtgagacaagagggacaatgtagcgatgtggggaaaaaaaattgtg

SEQ ID NO: 414580 - DNA, 1368 bp, Homo sapiens
  misc_feature (845)..(846): n is a, c, g, or t
ggctcttctcatccagaggtgtataagccaacattgctccaattcgtacaaataatctcacgatttcctaaagtacctggcaaagaattctgcaactttgttcagtgccagcgattatgaagtggctcctcctgagtaccatcggaaagctgtgtgagaggcactctcactcacttatgtttggatctccgtaaacacatttttgttcttagtctatctcttgtacaaacgatgtgctttgaagatgttagtgtataacaattgatgtttgttttctgtttgattttaaacagagaaaaaataaaagggggtaatagctccttttttcttctttctttttttttttcatttcaaaattgctgccagtgttttcaatgatggacaacagagggatatgctgtagagtgttttattgcctagttgacaaagctgcttttgaatgctggtggttctattcctttgacactacgcacttttataatacatgttaatgctatatgacaaaatgctctgattcctagtgccaaaggttcaattcagtgtatataactgaacacactcatccatttgtgcttttgtttttttttatggtgcttaaagtaaagagcccatcctttgcaagtcatccatgttgttacttaggcattttatcttggctcaaattgttgaagaatggtggcttgtttcatggtttttgtatttgtgtctaatgcacgttttaacatgatagacgcaatgcattgtgtagctagttttctggaaaagtcaatcttttaggaattgtttttcagatcttcaataaattttttctttaaatttcaaaaaaaaaaaaaaaaaaaaaaaannaaaaaaaaaaaaaaaaaaaaagaggggggggcgcagcactaaaaagtacccccagggggggcacaagaatacacgggggtaccaccaggtttcgtctgtggcacaaaggggggcccattagagagggaggcaggtagtaaacgagcacatcgagcagcgtggcgcgcggcaatttataacaaaaacagctgtgtgaagaagtgggggaaaaaacggcgctaataacggtggggagacaactctttggagaagagaggaaacaactatcaactaagtgggggggagggaggagaccacatatatggtggggagaaaaaaatatccacatgagacgggagaattttatcgagaagcatataaaggggagaaaaaatttttttgaagacattttaaaaaaggagacatataataggggggttaaaaaaaaaagaaggaggagatatttagcgagcgaagagagaagaaaaaaaattttggtgagacaagagggacaatgtagcgatgtggggaaaaaaaattgtg

SEQ ID NO: 414581 - DNA, 808 bp, Homo sapiens
  misc_feature (6)..(6): n is a, c, g, or t
  misc_feature (9)..(11): n is a, c, g, or t
  misc_feature (34)..(34): n is a, c, g, or t
aagganggnnnaagaaaccctatcggctaggtancgaggcggtagagagtagggggcggtagtcgggggtggtgggagaaggaggaggcggcgaatcacttataaatggcgccgaagcaggacccgaagcctaaattccaggagggtgagcgagtgctgtgctttcatgggcctcttctttatgaagcaaagtgtgtaaaggttgccataaaggacaaacaagtgaaatacttcatacattacagtggttggaataaaaattgggatgaatgggttccggagagcagagtactcaaatacgtggacaccaatttgcagaaacagcgagaacttcaaaaagccaatcaggagcagtatgcagaggggaagatgagaggggctgccccaggaaagaagacatctggtctgcaacagaaaaatgttgaagtgaaaacgaaaaagaacaaacagaaaacacctggaaatggagatggtggcagtaccagtgagacccctcagcctcctcggaagaaaagggcccgggtagatcctactgttgaaaatgaggaaacattcatgaacagagttgaagttaaagtaaagattcctgaagagctaaaaccgtggcttgttgatgactgggacttaattaccaggcaaaaacagctcttttatcttcctgccaagaagaatgtggattccattcttgaggattatgcaaattacaagaaatctcgtggaaacacagataataaggagtatgcggtaattgaagttgtgcaaggatcagatgctaaatcttggcagacatccgaggcaccatgtccaa

SEQ ID NO: 414582 - DNA, 765 bp, Homo sapiens
  misc_feature (6)..(6): n is a, c, g, or t
  misc_feature (9)..(11): n is a, c, g, or t
  misc_feature (34)..(34): n is a, c, g, or t
aagganggnnnaagaaaccctatcggctaggtancgaggcggtagagagtagggggcggtagtcgggggtggtgggagaaggaggaggcggcgaatcacttataaatggcgccgaagcaggacccgaagcctaaattccaggagggtgagcgagtgctgtgctttcatgggcctcttctttatgaagcaaagtgtgtaaaggttgccataaaggacaaacaagtgaaatacttcatacattacagtggttggaataaaaattgggatgaatgggttccggagagcagagtactcaaatacgtggacaccaatttgcagaaacagcgagaacttcaaaaagccaatcaggagcagtatgcagaggggaagatgagaggggctgccccaggaaagaagacatctggtctgcaacagaaaaatgttgaagtgaaaacgaaaaagaacaaacagaaaacacctggaaatggagatggtggcagtaccagtgagacccctcagcctcctcggaagaaaagggcccgggtagatcctactgttgaaaatgaggaaacattcatgaacagagttgaagttaaagtaaagattcctgaagagctaaaaccgtggcttgttgatgactgggacttaattaccaggcaaaaacagctcttttatcttcctgccaagaagaatgtggattccattcttgaggattatgcaaattacaagaaatctcgtggaaacacagataataaggagtttgaccgcttaatgcaagcttgctgg

SEQ ID NO: 414583 - DNA, 1398 bp, Homo sapiens
  misc_feature (6)..(6): n is a, c, g, or t
  misc_feature (9)..(11): n is a, c, g, or t
  misc_feature (34)..(34): n is a, c, g, or t
  misc_feature (875)..(876): n is a, c, g, or t
aagganggnnnaagaaaccctatcggctaggtancgaggcggtagagagtagggggcggtagtcgggggtggtgggagaaggaggaggcggcgaatcacttataaatggcgccgaagcaggacccgaagcctaaattccaggagggtgagcgagtgctgtgctttcatgggcctcttctttatgaagcaaagtgccagcgattatgaagtggctcctcctgagtaccatcggaaagctgtgtgagaggcactctcactcacttatgtttggatctccgtaaacacatttttgttcttagtctatctcttgtacaaacgatgtgctttgaagatgttagtgtataacaattgatgtttgttttctgtttgattttaaacagagaaaaaataaaagggggtaatagctccttttttcttctttctttttttttttcatgttttattgcctagttgacaaagctgcttttgaatgctggtggttctattcctttgacactacgcacttttataatacatgttaatgctatatgacaaaatgctctgattcctagtgccaaaggttcaattcagtgtatataactgaacacactcatccatttgtgcttttgtttttttttatggtgcttaaagtaaagagcccatcctttgcaagtcatccatgttgttacttaggcattttatcttggctcaaattgttgaagaatggtggcttgtttcatggtttttgtatttgtgtctaatgcacgttttaacatgatagacgcaatgcattgtgtagctagttttctggaaaagtcaatcttttaggaattgtttttcagatcttcaataaattttttctttaaatttcaaaaaaaaaaaaaaaaaaaaaaaannaaaaaaaaaaaaaaaaaaaaagaggggggggcgcagcactaaaaagtacccccagggggggcacaagaatacacgggggtaccaccaggtttcgtctgtggcacaaaggggggcccattagagagggaggcaggtagtaaacgagcacatcgagcagcgtggcgcgcggcaatttataacaaaaacagctgtgtgaagaagtgggggaaaaaacggcgctaataacggtggggagacaactctttggagaagagaggaaacaactatcaactaagtgggggggagggaggagaccacatatatggtggggagaaaaaaatatccacatgagacgggagaattttatcgagaagcatataaaggggagaaaaaatttttttgaagacattttaaaaaaggagacatataataggggggttaaaaaaaaaagaaggaggagatatttagcgagcgaagagagaagaaaaaaaattttggtgagacaagagggacaatgtagcgatgtggggaaaaaaaattgtg

SEQ ID NO: 414584 - DNA, 691 bp, Homo sapiens
  misc_feature (6)..(6): n is a, c, g, or t
  misc_feature (9)..(11): n is a, c, g, or t
  misc_feature (34)..(34): n is a, c, g, or t
  misc_feature (650)..(650): n is a, c, g, or t
  misc_feature (660)..(660): n is a, c, g, or t
aagganggnnnaagaaaccctatcggctaggtancgaggcggtagagagtagggggcggtagtcgggggtggtgggagaaggaggaggcggcgaatcacttataaatggcgccgaagcaggacccgaagcctaaattccaggagggtgagcgagtgctgtgctttcatgggcctcttctttatgaagcaaagtgtgtaaaggttgccataaaggacaaacaagtgaaatacttcatacattacagtggttggaataaaaattgggatgaatgggttccggagagcagagtactcaaatacgtggacaccaatttgcagaaacagcgagaacttcaaaaagccaatcaggagcagtatgcagaggggaagatgagaggggctgccccaggaaagaagacatctggtctgcaacagaaaaatgttgaagtgaaaacgaaaaagaacaaacagaaaacacctggaaatggagatggtggcagtaccagtgagacccctcagcctcctcggaagaaaagggcccgggtagatcctactgttgaaaatgaggaaacattcatgaacagagttgaagttaaagtaaagattcctgaagagctaaaaccgtggcttgttgatgactgggacttaattaccaggcaaaaacagctctnttatcttccngccagattggacataaggtaccagctcgatg

SEQ ID NO: 414585 - DNA, 823 bp, Homo sapiens
  misc_feature (6)..(6): n is a, c, g, or t
  misc_feature (9)..(11): n is a, c, g, or t
  misc_feature (34)..(34): n is a, c, g, or t
  misc_feature (458)..(458): n is a, c, g, or t
  misc_feature (460)..(462): n is a, c, g, or t
  misc_feature (465)..(465): n is a, c, g, or t
  misc_feature (473)..(475): n is a, c, g, or t
  misc_feature (481)..(482): n is a, c, g, or t
aagganggnnnaagaaaccctatcggctaggtancgaggcggtagagagtagggggcggtagtcgggggtggtgggagaaggaggaggcggcgaatcacttataaatggcgccgaagcaggacccgaagcctaaattccaggagggtgagcgagtgctgtgctttcatgggcctcttctttatgaagcaaagtgtgtaaaggttgccataaaggacaaacaagtgaaatacttcatacattacagtggttggaataaaaattgggatgaatgggttccggagagcagagtactcaaatacgtggacaccaatttgcagaaacagcgagaacttcaaaaagccaatcaggagcagtatgcagaggggaagatgagaggggctgccccaggaaagaagacatctggtctgcaacagaaaaatgttgaagtacgaaaaagaacaaacagaaaacacctggnannnganatggtggnnntaccanngagaccccttattctcctctggagataaagcgccggttttattctactcgtgagaatgacgaaacactaatgaacacgagttgagtttacgtctaaaattcctgtagagcttaaatccagaatcgtagatgactggcacttaattgctaagccaaaacaagtctattatctttcttgcctgagtaatttggaccccaatctatacggatatgctaattaaacaaatgtcatgaaacccagtaataatggggttttagttatgaacataggtatggcttaaaattcttaaattatatcggggcctcattctctttaagtgtagccactctttccaatgctta

SEQ ID NO: 414586 - DNA, 522 bp, Homo sapiens
  misc_feature (6)..(6): n is a, c, g, or t
  misc_feature (9)..(11): n is a, c, g, or t
  misc_feature (34)..(34): n is a, c, g, or t
  misc_feature (457)..(457): n is a, c, g, or t
  misc_feature (460)..(460): n is a, c, g, or t
  misc_feature (499)..(499): n is a, c, g, or t
aagganggnnnaagaaaccctatcggctaggtancgaggcggtagagagtagggggcggtagtcgggggtggtgggagaaggaggaggcggcgaatcacttataaatggcgccgaagcaggacccgaagcctaaattccaggagggtgagcgagtgctgtgctttcatgggcctcttctttatgaagcaaagtgtgtaaaggttgccataaaggacaaacaagtgaaatacttcatacattacagtggttggaataaaaattgggatgaatgggttccggagagcagagtactcaaatacgtggacaccaatttgcagaaacagcgagaacttcaaaaagccaatcaggagcagtatgcagaggggaagatgagaggggctgccccaggaaagaagacatctggtctgcaacagaaaaatgttgaagtacgaaaaagaacaaacagaaaacaccttnaangccacacccgcccacgcccacgcacacccctgcacccgncgcccaactaaaacccccccccg

SEQ ID NO: 414587 - DNA, 852 bp, Homo sapiens
  misc_feature (6)..(6): n is a, c, g, or t
  misc_feature (9)..(11): n is a, c, g, or t
  misc_feature (34)..(34): n is a, c, g, or t
  misc_feature (811)..(811): n is a, c, g, or t
  misc_feature (821)..(821): n is a, c, g, or t
aagganggnnnaagaaaccctatcggctaggtancgaggcggtagagagtagggggcggtagtcgggggtggtgggagaaggaggaggcggcgaatcacttataaatggcgccgaagcaggacccgaagcctaaattccaggagggtgagtgtgcgcctttgggaaaaaggcacctaacggcgcaggagatagaggcgggctcgaggtgattgaggcttgagggccgggggcggcgcgggctgcgccctgagaaggcggcggtcagtgctttgtgcggggaaagcgcattgcggatggcaattccggtgagcgagtgctgtgctttcatgggcctcttctttatgaagcaaagtgtgtaaaggttgccataaaggacaaacaagtgaaatacttcatacattacagtggttggaataaaaattgggatgaatgggttccggagagcagagtactcaaatacgtggacaccaatttgcagaaacagcgagaacttcaaaaagccaatcaggagcagtatgcagaggggaagatgagaggggctgccccaggaaagaagacatctggtctgcaacagaaaaatgttgaagtgaaaacgaaaaagaacaaacagaaaacacctggaaatggagatggtggcagtaccagtgagacccctcagcctcctcggaagaaaagggcccgggtagatcctactgttgaaaatgaggaaacattcatgaacagagttgaagttaaagtaaagattcctgaagagctaaaaccgtggcttgttgatgactgggacttaattaccaggcaaaaacagctctnttatcttccngccagattggacataaggtaccagctcgatg

SEQ ID NO: 414588 - DNA, 500 bp, Homo sapiens
  misc_feature (6)..(6): n is a, c, g, or t
  misc_feature (9)..(11): n is a, c, g, or t
  misc_feature (34)..(34): n is a, c, g, or t
aagganggnnnaagaaaccctatcggctaggtancgaggcggtagagagtagggggcggtagtcgggggtggtgggagaaggaggaggcggcgaatcacttataaatggcgccgaagcaggacccgaagcctaaattccaggagggtgagcgagtgctgtgctttcatgggcctcttctttatgaagcaaagtgtgtaaaggttgccataaaggacaaacaagtgaaatacttcatacattacagtggttggaataaaaattgggatgaatgggttccggagagcagagtactcaaatacgtggacaccaatttgcagaaacagcgagaacttcaaaaagccaatcagtaagtttgttttgtgaactgaatattaaggagaaatgcctgtagattaattctggacatggaatgaacaatggagatcatgttggctgccctgcctataaaatgattcctggtacctttcagctgctgtgttacagctttgacttcaagcga

SEQ ID NO: 414589 - DNA, 507 bp, Homo sapiens
  misc_feature (6)..(6): n is a, c, g, or t
  misc_feature (9)..(11): n is a, c, g, or t
  misc_feature (34)..(34): n is a, c, g, or t
aagganggnnnaagaaaccctatcggctaggtancgaggcggtagagagtagggggcggtagtcgggggtggtgggagaaggaggaggcggcgaatcacttataaatggcgccgaagcaggacccgaagcctaaattccaggagggtgagcgagtgctgtgctttcatgggcctcttctttatgaagcaaagtgtgtaaaggttgccataaaggacaaacaagtgaaatacttcatacattacagtggttggaataaaaattgggatgaatgggttccggagagcagagtactcaaatacgtggacaccaatttgcagaaacagcgagaacttcaaaaagccaatcaggagcagtatggagagggtcagacgtgtggcagtggcttactggggttaagaagcagcagtcccaggggctcagaggctggggcggcctggtatgacacagcaaggaaaaggcctttagaaatgggacaaagtcatgccctgcccccatggatacatccc

SEQ ID NO: 414590 - DNA, 885 bp, Homo sapiens
  misc_feature (13)..(13): n is a, c, g, or t
  misc_feature (34)..(34): n is a, c, g, or t
  misc_feature (58)..(58): n is a, c, g, or t
ttttgtttttttnttatggtgcttaaaagtaaangaaggccgcccattccctcttttntgccaaaaaagtttcaattcccacaatggttttggttatactatagcgcattttatcttggctcaaattgttgaagaatggtggcttgtttcatggtttttgtatttgtgtctaatgcacgttttaacatgatagacgcaatgcattgtgtagctagttttctggaaaagtcaatcttttaggaattgtttttcagatcttcaataaattttttctttaaatttcaaaaaacaatgtgcttgtgttgatgccttacaaaaaccattgtatatttgtgtattccttcttgtatttagacagtggtttttcaggtgcgtgctttgttttctggtatggcctttatggaatgagacgctttagctttggtacgtagcgctaatccatagcagctttggcagtttgctgtcttgagtcttagctaaaaagttagaagtttacatgactgttttttttattttccctaaattattacttactctgagcattaattaagggcattttcacctgtgtaaaattatggtcagcttttttctgtctataattgtttacttttgtgggtttactctagaaacatgagccaaaaatgtcaatagacaacacagtattaaaataacccaaaagttgtaaagggcaacgtttctcccctttgatagggacactaaagtggtctgtacttgggtagaggatggcagacgttaagaattaaaatgcgtctgggtgcagtggctcacgcttgtaatcccagcactttgggaggctgaggcgggcggatcacctgaggtcaggagttcgacaccagcctgatgaacatggagaaaccccatctc

SEQ ID NO: 414591 - DNA, 1046 bp, Homo sapiens
ataggctaggtacgaggctgggtggtggcggcgaatcacttataaatggcgccgaagcaggacccgaagcctaaattccaggagggtgagcgagtgctgtgctttcatgggcctcttctttatgaagcaaagtgtgtaaaggttgccataaaggacaaacaagtgaaatacttcatacattacagtggttggaataaaaattgggatgaatgggttccggagagcagagtactcaaatacgtggacaccaatttgcagaaacagcgagaacttcaaaaagccaatcaggagcagtatgcagaggggaagatgagaggggctgccccaggaaagaagacatctggtctgcaacagaaaaatgttgaagtgaaaacgaaaaagaacaaacagaaaacacctggaaatggagatggtggcagtaccagtgagacccctcagcctcctcggaagaaaagggcccgggtagatcctactgttgaaaatgaggaaacattcatgaacagagttgaagttaaagtaaagattcctgaagagctaaaaccgtggcttgttgatgactgggacttaattaccaggcaaaaacagctcttttatcttcctgccaagaagaatgtggattccattcttgaggattatgcaaattacaagaaatctcgtggaaacacagataataaggagtatgcggttaatgaagttgtggcagggataaaagaatacttcaacgtaatgttgggtacccagctactctataaatttgagagaccacagtatgctgaaattcttgcagatcatcccgatgcacccatgtcccaggtgtatggagcgccacatctcctgagattatttgtacgaattggagcagtgggttatacacctctggtgggagaaaaagggctttggtttattactcaagttatcctttccggaattcctaaagtaccgggaagatttgggacttggcacggggcagggataatagaagggcctcctgggtaccccggaagcgggtggaagaggactcccactttgttggccccggacaaata

SEQ ID NO: 414592 - DNA, 814 bp, Homo sapiens
  misc_feature (449)..(449): n is a, c, g, or t
  misc_feature (451)..(453): n is a, c, g, or t
  misc_feature (456)..(456): n is a, c, g, or t
  misc_feature (464)..(466): n is a, c, g, or t
  misc_feature (472)..(473): n is a, c, g, or t
tcatcgctgtctggaacagcgatgactcgagggtagagagtagggggcggtagtcgggggtggtgggagaaggaggaggcggcgaatcacttataaatggcgccgaagcaggacccgaagcctaaattccaggagggtgagcgagtgctgtgctttcatgggcctcttctttatgaagcaaagtgtgtaaaggttgccataaaggacaaacaagtgaaatacttcatacattacagtggttggaataaaaattgggatgaatgggttccggagagcagagtactcaaatacgtggacaccaatttgcagaaacagcgagaacttcaaaaagccaatcaggagcagtatgcagaggggaagatgagaggggctgccccaggaaagaagacatctggtctgcaacagaaaaatgttgaagtacgaaaaagaacaaacagaaaacacctggnannnganatggtggnnntaccanngagaccccttattctcctctggagataaagcgccggttttattctactcgtgagaatgacgaaacactaatgaacacgagttgagtttacgtctaaaattcctgtagagcttaaatccagaatcgtagatgactggcacttaattgctaagccaaaacaagtctattatctttcttgcctgagtaatttggaccccaatctatacggatatgctaattaaacaaatgtcatgaaacccagtaataatggggttttagttatgaacataggtatggcttaaaattcttaaattatatcggggcctcattctctttaagtgtagccactctttccaatgctta

SEQ ID NO: 414593 - DNA, 2288 bp, Homo sapiens
  misc_feature (6)..(6): n is a, c, g, or t
  misc_feature (9)..(11): n is a, c, g, or t
  misc_feature (34)..(34): n is a, c, g, or t
  misc_feature (1765)..(1766): n is a, c, g, or t
aagganggnnnaagaaaccctatcggctaggtancgaggcggtagagagtagggggcggtagtcgggggtggtgggagaaggaggaggcggcgaatcacttataaatggcgccgaagcaggacccgaagcctaaattccaggagggtgagcgagtgctgtgctttcatgggcctcttctttatgaagcaaagtgtgtaaaggttgccataaaggacaaacaagtgaaatacttcatacattacagtggttggaataaaaattgggatgaatgggttccggagagcagagtactcaaatacgtggacaccaatttgcagaaacagcgagaacttcaaaaagccaatcaggagcagtatgcagaggggaagatgagaggggctgccccaggaaagaagacatctggtctgcaacagaaaaatgttgaagtgaaaacgaaaaagaacaaacagaaaacacctggaaatggagatggtggcagtaccagtgagacccctcagcctcctcggaagaaaagggcccgggtagatcctactgttgaaaatgaggaaacattcatgaacagagttgaagttaaagtaaagattcctgaagagctaaaaccgtggcttgttgatgactgggacttaattaccaggcaaaaacagctcttttatcttcctgccaagaagaatgtggattccattcttgaggattatgcaaattacaagaaatctcgtggaaacacagataataaggagtatgcggttaatgaagttgtggcagggataaaagaatacttcaacgtaatgttgggtacccagctactctataaatttgagagaccacagtatgctgaaattcttgcagatcatcccgatgcacccatgtcccaggtgtatggagcgccacatctcctgagattatttgtacgaattggagcaatgttggcttatacacctctggatgagaagagccttgctttattactcaattatcttcacgatttcctaaagtacctggcaaagaattctgcaactttgttcagtgccagcgattatgaagtggctcctcctgagtaccatcggaaagctgtgtgagaggcactctcactcacttatgtttggatctccgtaaacacatttttgttcttagtctatctcttgtacaaacgatgtgctttgaagatgttagtgtataacaattgatgtttgttttctgtttgattttaaacagagaaaaaataaaagggggtaatagctccttttttcttctttctttttttttttcatttcaaaattgctgccagtgttttcaatgatggacaacagagggatatgctgtagagtgttttattgcctagttgacaaagctgcttttgaatgctggtggttctattcctttgacactacgcacttttataatacatgttaatgctatatgacaaaatgctctgattcctagtgccaaaggttcaattcagtgtatataactgaacacactcatccatttgtgcttttgtttttttttatggtgcttaaagtaaagagcccatcctttgcaagtcatccatgttgttacttaggcattttatcttggctcaaattgttgaagaatggtggcttgtttcatggtttttgtatttgtgtctaatgcacgttttaacatgatagacgcaatgcattgtgtagctagttttctggaaaagtcaatcttttaggaattgtttttcagatcttcaataaattttttctttaaatttcaaaaaaaaaaaaaaaaaaaaaaaannaaaaaaaaaaaaaaaaaaaaagaggggggggcgcagcactaaaaagtacccccagggggggcacaagaatacacgggggtaccaccaggtttcgtctgtggcacaaaggggggcccattagagagggaggcaggtagtaaacgagcacatcgagcagcgtggcgcgcggcaatttataacaaaaacagctgtgtgaagaagtgggggaaaaaacggcgctaataacggtggggagacaactctttggagaagagaggaaacaactatcaactaagtgggggggagggaggagaccacatatatggtggggagaaaaaaatatccacatgagacgggagaattttatcgagaagcatataaaggggagaaaaaatttttttgaagacattttaaaaaaggagacatataataggggggttaaaaaaaaaagaaggaggagatatttagcgagcgaagagagaagaaaaaaaattttggtgagacaagagggacaatgtagcgatgtggggaaaaaaaattgtg

SEQ ID NO: 414594 - DNA, 2072 bp, Homo sapiens
  misc_feature (6)..(6): n is a, c, g, or t
  misc_feature (9)..(11): n is a, c, g, or t
  misc_feature (34)..(34): n is a, c, g, or t
  misc_feature (1870)..(1871): n is a, c, g, or t
  misc_feature (2020)..(2020): n is a, c, g, or t
  misc_feature (2044)..(2045): n is a, c, g, or t
  misc_feature (2048)..(2048): n is a, c, g, or t
aagganggnnnaagaaaccctatcggctaggtancgaggcggtagagagtagggggcggtagtcgggggtggtgggagaaggaggaggcggcgaatcacttataaatggcgccgaagcaggacccgaagcctaaattccaggagggtgagcgagtgctgtgctttcatgggcctcttctttatgaagcaaagtgtgtaaaggttgccataaaggacaaacaagtgaaatacttcatacattacagtggttggaataaaaattgggatgaatgggttccggagagcagagtactcaaatacgtggacaccaatttgcagaaacagcgagaacttcaaaaagccaatcaggagcagtatgcagaggggaagatgagaggggctgccccaggaaagaagacatctggtctgcaacagaaaaatgttgaagtgaaaacgaaaaagaacaaacagaaaacacctggaaatggagatggtggcagtaccagtgagacccctcagcctcctcggaagaaaagggcccgggtagatcctactgttgaaaatgaggaaacattcatgaacagagttgaagttaaagtaaagattcctgaagagctaaaaccgtggcttgttgatgactgggacttaattaccaggcaaaaacagctcttttatcttcctgccaagaagaatgtggattccattcttgaggattatgcaaattacaagaaatctcgtggaaacacagataataaggagtatgcggttaatgaagttgtggcagggataaaagaatacttcaacgtaatgttgggtacccagctactctataaatttgagagaccacagtatgctgaaattcttgcagatcatcccgatgcacccatgtcccaggtgtatggagcgccacatctcctgagattatttgtacgaattggagcaatgttggcttatacacctctggatgagaagagccttgctttattactcaattatcttcacgatttcctaaagtacctggcaaagaattctgcaactttgttcagtgccagcgattatgaagtggctcctcctgagtaccatcggaaagctgtgtgagaggcactctcactcacttatgtttggatctccgtaaacacatttttgttcttagtctatctcttgtacaaacgatgtgctttgaagatgttagtgtataacaattgatgtttgttttctgtttgattttaaacagagaaaaaataaaagggggtaatagctccttttttcttctttctttttttttttcatttcaaaattgctgccagtgttttcaatgatggacaacagagggatatgctgtagagtgttttattgcctagttgacaaagctgcttttgaatgctggtggttctattcctttgacactacgcacttttataatacatgttaatgctatatgacaaaatgctctgattcctagtgccaaaggttcaattcagtgtatataactgaacacactcatccatttgtgcttttgtttttttttatggtgcttaaagtaaagagcccatcctttgcaagtcatccatgttgttacttaggcattttatcttggctcaaattgttgaagaatggtggcttgtttcatggtttttgtatttgtgtctaatgcacgttttaacatgatagacgcaatgcattgtgtagctagttttctggaaaagtcaatcttttaggaattgtttttcagatcttcaataaattttttctttaaatttcaaaaagaaaaaaagaaaaaaaagaaaaaagaaaagagagagagagagagagagagagagagagagagagagaggtcccaggtgtatggagcgccacatctcctgagattatttgtacgaattggagcatnntggcttatacacctctggatgagaagagccttgctttattactcaattatcttcacgatttcctaaagtacctggcaaagaattcttcaactttgttcagtgccagcgattatgaagtggctcctcctgagtaccatcggaaagctgtntgagaggcactctcactcacttannttnggatcccgtaaacaaatgtggtcc

SEQ ID NO: 414595 - DNA, 2230 bp, Homo sapiens
  misc_feature (1707)..(1708): n is a, c, g, or t
cggacgcgtgggtcgacccacgcgtccgggcggcgaatcacttataaatggcgccgaagcaggacccgaagcctaaattccaggagggtgagcgagtgctgtgctttcatgggcctcttctttatgaagcaaagtgtgtaaaggttgccataaaggacaaacaagtgaaatacttcatacattacagtggttggaataaaaattgggatgaatgggttccggagagcagagtactcaaatacgtggacaccaatttgcagaaacagcgagaacttcaaaaagccaatcaggagcagtatgcagaggggaagatgagaggggctgccccaggaaagaagacatctggtctgcaacagaaaaatgttgaagtgaaaacgaaaaagaacaaacagaaaacacctggaaatggagatggtggcagtaccagtgagacccctcagcctcctcggaagaaaagggcccgggtagatcctactgttgaaaatgaggaaacattcatgaacagagttgaagttaaagtaaagattcctgaagagctaaaaccgtggcttgttgatgactgggacttaattaccaggcaaaaacagctcttttatcttcctgccaagaagaatgtggattccattcttgaggattatgcaaattacaagaaatctcgtggaaacacagataataaggagtatgcggttaatgaagttgtggcagggataaaagaatacttcaacgtaatgttgggtacccagctactctataaatttgagagaccacagtatgctgaaattcttgcagatcatcccgatgcacccatgtcccaggtgtatggagcgccacatctcctgagattatttgtacgaattggagcaatgttggcttatacacctctggatgagaagagccttgctttattactcaattatcttcacgatttcctaaagtacctggcaaagaattctgcaactttgttcagtgccagcgattatgaagtggctcctcctgagtaccatcggaaagctgtgtgagaggcactctcactcacttatgtttggatctccgtaaacacatttttgttcttagtctatctcttgtacaaacgatgtgctttgaagatgttagtgtataacaattgatgtttgttttctgtttgattttaaacagagaaaaaataaaagggggtaatagctccttttttcttctttctttttttttttcatttcaaaattgctgccagtgttttcaatgatggacaacagagggatatgctgtagagtgttttattgcctagttgacaaagctgcttttgaatgctggtggttctattcctttgacactacgcacttttataatacatgttaatgctatatgacaaaatgctctgattcctagtgccaaaggttcaattcagtgtatataactgaacacactcatccatttgtgcttttgtttttttttatggtgcttaaagtaaagagcccatcctttgcaagtcatccatgttgttacttaggcattttatcttggctcaaattgttgaagaatggtggcttgtttcatggtttttgtatttgtgtctaatgcacgttttaacatgatagacgcaatgcattgtgtagctagttttctggaaaagtcaatcttttaggaattgtttttcagatcttcaataaattttttctttaaatttcaaaaaaaaaaaaaaaaaaaaaaaannaaaaaaaaaaaaaaaaaaaaagaggggggggcgcagcactaaaaagtacccccagggggggcacaagaatacacgggggtaccaccaggtttcgtctgtggcacaaaggggggcccattagagagggaggcaggtagtaaacgagcacatcgagcagcgtggcgcgcggcaatttataacaaaaacagctgtgtgaagaagtgggggaaaaaacggcgctaataacggtggggagacaactctttggagaagagaggaaacaactatcaactaagtgggggggagggaggagaccacatatatggtggggagaaaaaaatatccacatgagacgggagaattttatcgagaagcatataaaggggagaaaaaatttttttgaagacattttaaaaaaggagacatataataggggggttaaaaaaaaaagaaggaggagatatttagcgagcgaagagagaagaaaaaaaattttggtgagacaagagggacaatgtagcgatgtggggaaaaaaaattgtg

SEQ ID NO: 414596 - DNA, 2219 bp, Homo sapiens
  misc_feature (6)..(6): n is a, c, g, or t
  misc_feature (9)..(11): n is a, c, g, or t
  misc_feature (34)..(34): n is a, c, g, or t
  misc_feature (1696)..(1697): n is a, c, g, or t
aagganggnnnaagaaaccctatcggctaggtancgaggcggtagagagtagggggcggtagtcgggggtggtgggagaaggaggaggcggcgaatcacttataaatggcgccgaagcaggacccgaagcctaaattccaggagggtgagcgagtgctgtgctttcatgggcctcttctttatgaagcaaagtgtgtaaaggttgccataaaggacaaacaagtgaaatacttcatacattacagtggttggaataaaaattgggatgaatgggttccggagagcagagtactcaaatacgtggacaccaatttgcagaaacagcgagaacttcaaaaagccaatcaggagcagtatgcagaggggaagatgagaggggctgccccaggaaagaagacatctggtctgcaacagaaaaatgttgaagtgaaaacgaaaaagaacaaacagaaaacacctggaaatggagatggtggcagtaccagtgagacccctcagcctcctcggaagaaaagggcccgggtagatcctactgttgaaaatgaggaaacattcatgaacagagttgaagttaaagtaaagattcctgaagagctaaaaccgtggcttgttgatgactgggacttaattaccaggcaaaaacagctcttttatcttcctgccaagaagaatgtggattccattcttgaggattatgcaaattacaagaaatctcgtggaaacacagataataaggagtatgcggttaatgaagttgtggcagggataaaagaatacttcaacgtaatgttgggtacccagctactctataaatttgagagaccacagtatgctgaaattcttgcagatcatcccgatgcacccatgtcccaggtgtatggagcgccacatctcctgagattatttgtacgaattggagcaatgttggcttatacacctctggatgagaagagccttgctttattactcaattatcttcacgatttcctaaagtacctggcaaagaattctgcaactttgttcagtgccagcgattatgaagtggctcctcctgagtaccatcggaaagctgtgtgagaggcactctcactcacttatgtttggatctccgtaaacacatttttgttcttagtctatctcttgtacaaacgatgtgctttgaagatgttagtgtataacaattgatgtttgttttctgttttcaaaattgctgccagtgttttcaatgatggacaacagagggatatgctgtagagtgttttattgcctagttgacaaagctgcttttgaatgctggtggttctattcctttgacactacgcacttttataatacatgttaatgctatatgacaaaatgctctgattcctagtgccaaaggttcaattcagtgtatataactgaacacactcatccatttgtgcttttgtttttttttatggtgcttaaagtaaagagcccatcctttgcaagtcatccatgttgttacttaggcattttatcttggctcaaattgttgaagaatggtggcttgtttcatggtttttgtatttgtgtctaatgcacgttttaacatgatagacgcaatgcattgtgtagctagttttctggaaaagtcaatcttttaggaattgtttttcagatcttcaataaattttttctttaaatttcaaaaaaaaaaaaaaaaaaaaaaaannaaaaaaaaaaaaaaaaaaaaagaggggggggcgcagcactaaaaagtacccccagggggggcacaagaatacacgggggtaccaccaggtttcgtctgtggcacaaaggggggcccattagagagggaggcaggtagtaaacgagcacatcgagcagcgtggcgcgcggcaatttataacaaaaacagctgtgtgaagaagtgggggaaaaaacggcgctaataacggtggggagacaactctttggagaagagaggaaacaactatcaactaagtgggggggagggaggagaccacatatatggtggggagaaaaaaatatccacatgagacgggagaattttatcgagaagcatataaaggggagaaaaaatttttttgaagacattttaaaaaaggagacatataataggggggttaaaaaaaaaagaaggaggagatatttagcgagcgaagagagaagaaaaaaaattttggtgagacaagagggacaatgtagcgatgtggggaaaaaaaattgtg

SEQ ID NO: 414597 - DNA, 2349 bp, Homo sapiens
  misc_feature (6)..(6): n is a, c, g, or t
  misc_feature (9)..(11): n is a, c, g, or t
  misc_feature (34)..(34): n is a, c, g, or t
  misc_feature (1826)..(1827): n is a, c, g, or t
aagganggnnnaagaaaccctatcggctaggtancgaggcggtagagagtagggggcggtagtcgggggtggtgggagaaggaggaggcggcgaatcacttataaatggcgccgaagcaggacccgaagcctaaattccaggagggtgagtgtgcgcctttgggaaaaaggcacctaacggcgcaggagatagaggcgggctcgaggtgagcgagtgctgtgctttcatgggcctcttctttatgaagcaaagtgtgtaaaggttgccataaaggacaaacaagtgaaatacttcatacattacagtggttggaataaaaattgggatgaatgggttccggagagcagagtactcaaatacgtggacaccaatttgcagaaacagcgagaacttcaaaaagccaatcaggagcagtatgcagaggggaagatgagaggggctgccccaggaaagaagacatctggtctgcaacagaaaaatgttgaagtgaaaacgaaaaagaacaaacagaaaacacctggaaatggagatggtggcagtaccagtgagacccctcagcctcctcggaagaaaagggcccgggtagatcctactgttgaaaatgaggaaacattcatgaacagagttgaagttaaagtaaagattcctgaagagctaaaaccgtggcttgttgatgactgggacttaattaccaggcaaaaacagctcttttatcttcctgccaagaagaatgtggattccattcttgaggattatgcaaattacaagaaatctcgtggaaacacagataataaggagtatgcggttaatgaagttgtggcagggataaaagaatacttcaacgtaatgttgggtacccagctactctataaatttgagagaccacagtatgctgaaattcttgcagatcatcccgatgcacccatgtcccaggtgtatggagcgccacatctcctgagattatttgtacgaattggagcaatgttggcttatacacctctggatgagaagagccttgctttattactcaattatcttcacgatttcctaaagtacctggcaaagaattctgcaactttgttcagtgccagcgattatgaagtggctcctcctgagtaccatcggaaagctgtgtgagaggcactctcactcacttatgtttggatctccgtaaacacatttttgttcttagtctatctcttgtacaaacgatgtgctttgaagatgttagtgtataacaattgatgtttgttttctgtttgattttaaacagagaaaaaataaaagggggtaatagctccttttttcttctttctttttttttttcatttcaaaattgctgccagtgttttcaatgatggacaacagagggatatgctgtagagtgttttattgcctagttgacaaagctgcttttgaatgctggtggttctattcctttgacactacgcacttttataatacatgttaatgctatatgacaaaatgctctgattcctagtgccaaaggttcaattcagtgtatataactgaacacactcatccatttgtgcttttgtttttttttatggtgcttaaagtaaagagcccatcctttgcaagtcatccatgttgttacttaggcattttatcttggctcaaattgttgaagaatggtggcttgtttcatggtttttgtatttgtgtctaatgcacgttttaacatgatagacgcaatgcattgtgtagctagttttctggaaaagtcaatcttttaggaattgtttttcagatcttcaataaattttttctttaaatttcaaaaaaaaaaaaaaaaaaaaaaaannaaaaaaaaaaaaaaaaaaaaagaggggggggcgcagcactaaaaagtacccccagggggggcacaagaatacacgggggtaccaccaggtttcgtctgtggcacaaaggggggcccattagagagggaggcaggtagtaaacgagcacatcgagcagcgtggcgcgcggcaatttataacaaaaacagctgtgtgaagaagtgggggaaaaaacggcgctaataacggtggggagacaactctttggagaagagaggaaacaactatcaactaagtgggggggagggaggagaccacatatatggtggggagaaaaaaatatccacatgagacgggagaattttatcgagaagcatataaaggggagaaaaaatttttttgaagacattttaaaaaaggagacatataataggggggttaaaaaaaaaagaaggaggagatatttagcgagcgaagagagaagaaaaaaaattttggtgagacaagagggacaatgtagcgatgtggggaaaaaaaattgtg

SEQ ID NO: 414598 - DNA, 2241 bp, Homo sapiens
  misc_feature (6)..(6): n is a, c, g, or t
  misc_feature (9)..(11): n is a, c, g, or t
  misc_feature (34)..(34): n is a, c, g, or t
  misc_feature (1718)..(1719): n is a, c, g, or t
aagganggnnnaagaaaccctatcggctaggtancgaggcggtagagagtagggggcggtagtcgggggtggtgggagaaggaggaggcggcgaatcacttataaatggcgccgaagcaggacccgaagcctaaattccaggaggtgtgtaaaggttgccataaaggacaaacaagtgaaatacttcatacattacagtggttggaataaaaattgggatgaatgggttccggagagcagagtactcaaatacgtggacaccaatttgcagaaacagcgagaacttcaaaaagccaatcaggagcagtatgcagaggggaagatgagaggggctgccccaggaaagaagacatctggtctgcaacagaaaaatgttgaagtgaaaacgaaaaagaacaaacagaaaacacctggaaatggagatggtggcagtaccagtgagacccctcagcctcctcggaagaaaagggcccgggtagatcctactgttgaaaatgaggaaacattcatgaacagagttgaagttaaagtaaagattcctgaagagctaaaaccgtggcttgttgatgactgggacttaattaccaggcaaaaacagctcttttatcttcctgccaagaagaatgtggattccattcttgaggattatgcaaattacaagaaatctcgtggaaacacagataataaggagtatgcggttaatgaagttgtggcagggataaaagaatacttcaacgtaatgttgggtacccagctactctataaatttgagagaccacagtatgctgaaattcttgcagatcatcccgatgcacccatgtcccaggtgtatggagcgccacatctcctgagattatttgtacgaattggagcaatgttggcttatacacctctggatgagaagagccttgctttattactcaattatcttcacgatttcctaaagtacctggcaaagaattctgcaactttgttcagtgccagcgattatgaagtggctcctcctgagtaccatcggaaagctgtgtgagaggcactctcactcacttatgtttggatctccgtaaacacatttttgttcttagtctatctcttgtacaaacgatgtgctttgaagatgttagtgtataacaattgatgtttgttttctgtttgattttaaacagagaaaaaataaaagggggtaatagctccttttttcttctttctttttttttttcatttcaaaattgctgccagtgttttcaatgatggacaacagagggatatgctgtagagtgttttattgcctagttgacaaagctgcttttgaatgctggtggttctattcctttgacactacgcacttttataatacatgttaatgctatatgacaaaatgctctgattcctagtgccaaaggttcaattcagtgtatataactgaacacactcatccatttgtgcttttgtttttttttatggtgcttaaagtaaagagcccatcctttgcaagtcatccatgttgttacttaggcattttatcttggctcaaattgttgaagaatggtggcttgtttcatggtttttgtatttgtgtctaatgcacgttttaacatgatagacgcaatgcattgtgtagctagttttctggaaaagtcaatcttttaggaattgtttttcagatcttcaataaattttttctttaaatttcaaaaaaaaaaaaaaaaaaaaaaaannaaaaaaaaaaaaaaaaaaaaagaggggggggcgcagcactaaaaagtacccccagggggggcacaagaatacacgggggtaccaccaggtttcgtctgtggcacaaaggggggcccattagagagggaggcaggtagtaaacgagcacatcgagcagcgtggcgcgcggcaatttataacaaaaacagctgtgtgaagaagtgggggaaaaaacggcgctaataacggtggggagacaactctttggagaagagaggaaacaactatcaactaagtgggggggagggaggagaccacatatatggtggggagaaaaaaatatccacatgagacgggagaattttatcgagaagcatataaaggggagaaaaaatttttttgaagacattttaaaaaaggagacatataataggggggttaaaaaaaaaagaaggaggagatatttagcgagcgaagagagaagaaaaaaaattttggtgagacaagagggacaatgtagcgatgtggggaaaaaaaattgtg

SEQ ID NO: 414599 - DNA, 2220 bp, Homo sapiens
  misc_feature (6)..(6): n is a, c, g, or t
  misc_feature (9)..(11): n is a, c, g, or t
  misc_feature (34)..(34): n is a, c, g, or t
  misc_feature (1697)..(1698): n is a, c, g, or t
aagganggnnnaagaaaccctatcggctaggtancgaggcggtagagagtagggggcggtagtcgggggtggtgggagaaggaggaggcggcgaatcacttataaatggcgccgaagcaggacccgaagcctaaattccaggagggtgagcgagtgctgtgctttcatgggcctcttctttatgaagcaaagttgggatgaatgggttccggagagcagagtactcaaatacgtggacaccaatttgcagaaacagcgagaacttcaaaaagccaatcaggagcagtatgcagaggggaagatgagaggggctgccccaggaaagaagacatctggtctgcaacagaaaaatgttgaagtgaaaacgaaaaagaacaaacagaaaacacctggaaatggagatggtggcagtaccagtgagacccctcagcctcctcggaagaaaagggcccgggtagatcctactgttgaaaatgaggaaacattcatgaacagagttgaagttaaagtaaagattcctgaagagctaaaaccgtggcttgttgatgactgggacttaattaccaggcaaaaacagctcttttatcttcctgccaagaagaatgtggattccattcttgaggattatgcaaattacaagaaatctcgtggaaacacagataataaggagtatgcggttaatgaagttgtggcagggataaaagaatacttcaacgtaatgttgggtacccagctactctataaatttgagagaccacagtatgctgaaattcttgcagatcatcccgatgcacccatgtcccaggtgtatggagcgccacatctcctgagattatttgtacgaattggagcaatgttggcttatacacctctggatgagaagagccttgctttattactcaattatcttcacgatttcctaaagtacctggcaaagaattctgcaactttgttcagtgccagcgattatgaagtggctcctcctgagtaccatcggaaagctgtgtgagaggcactctcactcacttatgtttggatctccgtaaacacatttttgttcttagtctatctcttgtacaaacgatgtgctttgaagatgttagtgtataacaattgatgtttgttttctgtttgattttaaacagagaaaaaataaaagggggtaatagctccttttttcttctttctttttttttttcatttcaaaattgctgccagtgttttcaatgatggacaacagagggatatgctgtagagtgttttattgcctagttgacaaagctgcttttgaatgctggtggttctattcctttgacactacgcacttttataatacatgttaatgctatatgacaaaatgctctgattcctagtgccaaaggttcaattcagtgtatataactgaacacactcatccatttgtgcttttgtttttttttatggtgcttaaagtaaagagcccatcctttgcaagtcatccatgttgttacttaggcattttatcttggctcaaattgttgaagaatggtggcttgtttcatggtttttgtatttgtgtctaatgcacgttttaacatgatagacgcaatgcattgtgtagctagttttctggaaaagtcaatcttttaggaattgtttttcagatcttcaataaattttttctttaaatttcaaaaaaaaaaaaaaaaaaaaaaaannaaaaaaaaaaaaaaaaaaaaagaggggggggcgcagcactaaaaagtacccccagggggggcacaagaatacacgggggtaccaccaggtttcgtctgtggcacaaaggggggcccattagagagggaggcaggtagtaaacgagcacatcgagcagcgtggcgcgcggcaatttataacaaaaacagctgtgtgaagaagtgggggaaaaaacggcgctaataacggtggggagacaactctttggagaagagaggaaacaactatcaactaagtgggggggagggaggagaccacatatatggtggggagaaaaaaatatccacatgagacgggagaattttatcgagaagcatataaaggggagaaaaaatttttttgaagacattttaaaaaaggagacatataataggggggttaaaaaaaaaagaaggaggagatatttagcgagcgaagagagaagaaaaaaaattttggtgagacaagagggacaatgtagcgatgtggggaaaaaaaattgtg

SEQ ID NO: 414600 - DNA, 1106 bp, Homo sapiens
  misc_feature (6)..(6): n is a, c, g, or t
  misc_feature (9)..(11): n is a, c, g, or t
  misc_feature (34)..(34): n is a, c, g, or t
aagganggnnnaagaaaccctatcggctaggtancgaggcggtagagagtagggggcggtagtcgggggtggtgggagaaggaggaggcggcgaatcacttataaatggcgccgaagcaggacccgaagcctaaattccaggagggtgagcgagtgctgtgctttcatgggcctcttctttatgaagcaaagtgtgtaaaggttgccataaaggacaaacaagtgaaatacttcatacattacagtggttggaataaaaattgggatgaatgggttccggagagcagagtactcaaatacgtggacaccaatttgcagaaacagcgagaacttcaaaaagccaatcaggagcagtatgcagaggggaagatgagaggggctgccccaggaaagaagacatctggtctgcaacagaaaaatgttgaagtgaaaacgaaaaagaacaaacagaaaacacctggaaatggagatggtggcagtaccagtgagacccctcagcctcctcggaagaaaagggcccgggtagatcctactgttgaaaatgaggaaacattcatgaacagagttgaagttaaagtaaagattcctgaagagctaaaaccgtggcttgttgatgactgggacttaattaccaggcaaaaacagctcttttatcttcctgccaagaagaatgtggattccattcttgaggattatgcaaattacaagaaatctcgtggaaacacagataataaggagtatgcggttaatgaagttgtggcagggataaaagaatacttcaacgtaatgttgggtacccagctactctataaatttgagagaccacagtatgctgaaattcttgcagatcatcccgatgcacccatgtcccaggtgtatggagcgccacatctcctgagattatttgtacgaattggagcagtgggttatacacctctggtgggagaaaaagggctttggtttattactcaagttatcctttccggaattcctaaagtaccgggaagatttgggacttggcacggggcagggataatagaagggcctcctgggtaccccggaagcgggtggaagaggactcccactttgttggccccggacaaata

SEQ ID NO: 414601 - DNA, 1809 bp, Homo sapiens
  misc_feature (6)..(6): n is a, c, g, or t
  misc_feature (9)..(11): n is a, c, g, or t
  misc_feature (34)..(34): n is a, c, g, or t
  misc_feature (1286)..(1287): n is a, c, g, or t
aagganggnnnaagaaaccctatcggctaggtancgaggcggtagagagtagggggcggtagtcgggggtggtgggagaaggaggaggcggcgaatcacttataaatggcgccgaagcaggacccgaagcctaaattccaggagggtgagcgagtgctgtgctttcatgggcctcttctttatgaagcaaagtgtgtaaaggttgccataaaggacaaacaagtgaaatacttcatacattacagtggttggaataaaaattgggatgaatgggttccggagagcagagtactcaaatacgtggacaccaatttgcagaaacagcgagaacttcaaaaagccaatcaggagcagtatgcagaggggaagatgagaggggctgccccaggaaagaagacatctggtctgcaacagaaaaatgttgaagttacgaattggagcaatgttggcttatacacctctggatgagaagagccttgctttattactcaattatcttcacgatttcctaaagtacctggcaaagaattctgcaactttgttcagtgccagcgattatgaagtggctcctcctgagtaccatcggaaagctgtgtgagaggcactctcactcacttatgtttggatctccgtaaacacatttttgttcttagtctatctcttgtacaaacgatgtgctttgaagatgttagtgtataacaattgatgtttgttttctgtttgattttaaacagagaaaaaataaaagggggtaatagctccttttttcttctttctttttttttttcatttcaaaattgctgccagtgttttcaatgatggacaacagagggatatgctgtagagtgttttattgcctagttgacaaagctgcttttgaatgctggtggttctattcctttgacactacgcacttttataatacatgttaatgctatatgacaaaatgctctgattcctagtgccaaaggttcaattcagtgtatataactgaacacactcatccatttgtgcttttgtttttttttatggtgcttaaagtaaagagcccatcctttgcaagtcatccatgttgttacttaggcattttatcttggctcaaattgttgaagaatggtggcttgtttcatggtttttgtatttgtgtctaatgcacgttttaacatgatagacgcaatgcattgtgtagctagttttctggaaaagtcaatcttttaggaattgtttttcagatcttcaataaattttttctttaaatttcaaaaaaaaaaaaaaaaaaaaaaaannaaaaaaaaaaaaaaaaaaaaagaggggggggcgcagcactaaaaagtacccccagggggggcacaagaatacacgggggtaccaccaggtttcgtctgtggcacaaaggggggcccattagagagggaggcaggtagtaaacgagcacatcgagcagcgtggcgcgcggcaatttataacaaaaacagctgtgtgaagaagtgggggaaaaaacggcgctaataacggtggggagacaactctttggagaagagaggaaacaactatcaactaagtgggggggagggaggagaccacatatatggtggggagaaaaaaatatccacatgagacgggagaattttatcgagaagcatataaaggggagaaaaaatttttttgaagacattttaaaaaaggagacatataataggggggttaaaaaaaaaagaaggaggagatatttagcgagcgaagagagaagaaaaaaaattttggtgagacaagagggacaatgtagcgatgtggggaaaaaaaattgtg

SEQ ID NO: 414602 - DNA, 917 bp, Homo sapiens
  misc_feature (6)..(6): n is a, c, g, or t
  misc_feature (9)..(11): n is a, c, g, or t
  misc_feature (34)..(34): n is a, c, g, or t
aagganggnnnaagaaaccctatcggctaggtancgaggcggtagagagtagggggcggtagtcgggggtggtgggagaaggaggaggcggcgaatcacttataaatggcgccgaagcaggacccgaagcctaaattccaggagggtgagcgagtgctgtgctttcatgggcctcttctttatgaagcaaagtgtgtaaaggttgccataaaggacaaacaagtgaaatacttcatacattacagtggttggaataaaaattgggatgaatgggttccggagagcagagtactcaaatacgtggacaccaatttgcagaaacagcgagaacttcaaaaagccaatcaggagcagtatgcagaggggaagatgagaggggctgccccaggaaagaagacatctggtctgcaacagaaaaatgttgaagtgaaaacgaaaaagaacaaacagaaaacacctggaaatggagatggtggcagtaccagtgagacccctcagcctcctcggaagaaaagggcccgggtagatcctactgttgaaaatgaggaaacattcatgaacagagttgaagttaaagtaaagattcctgaagagctaaaaccgtggcttgttgatgactgggacttaattaccaggcaaaaacagctcttttatcttcctgccaagaagaatgtggattccattcttgaggattatgcaaattacaagaaatctcgtggaaacacagataataaggagtatgcggttaatgaagttgtggcagggataaaagaatacttcaacgtaatgttgggtacccagctactctataaatttgagagaccacatcatattaggagaaaaaaaaagagacagataagaaaagcccttctttaaaagccctagatctactccacgatgatctccggtccggccta

SEQ ID NO: 414603 - DNA, 675 bp, Homo sapiens
  misc_feature (6)..(6): n is a, c, g, or t
  misc_feature (9)..(11): n is a, c, g, or t
  misc_feature (34)..(34): n is a, c, g, or t
aagganggnnnaagaaaccctatcggctaggtancgaggcggtagagagtagggggcggtagtcgggggtggtgggagaaggaggaggcggcgaatcacttataaatggcgccgaagcaggacccgaagcctaaattccaggagggtgagcgagtgctgtgctttcatgggcctcttctttatgaagcaaagtgtgtaaaggttgccataaaggacaaacaagtgaaatacttcatacattacagtggttggaataaaaattgggatgaatgggttccggagagcagagtactcaaatacgtggacaccaatttgcagaaacagcgagaacttcaaaaagccaatcaggagcagtatgcagaggggaagatgagaggggctgccccaggaaagaagacatctggtctgcaacagaaaaatgttgaagtgaaaacgaaaaagaacaaacagaaaacacctggaaatggagatggtggcagtaccagtgagacccctcagcctcctcggaagaaaagggcccgggtagatcctactgttgaaaatgaggaaacattcatgaacagagttgaagttaaagtaaagattcctgaagagctaaaaccgtggcttgttgatgactgggacttaattaccaggcaaaaacagcagctctttatctcctgcgagatgtggttc

SEQ ID NO: 414604 - DNA, 571 bp, Homo sapiens
  misc_feature (6)..(6): n is a, c, g, or t
  misc_feature (9)..(11): n is a, c, g, or t
  misc_feature (34)..(34): n is a, c, g, or t
  misc_feature (552)..(552): n is a, c, g, or t
aagganggnnnaagaaaccctatcggctaggtancgaggcggtagagagtagggggcggtagtcgggggtggtgggagaaggaggaggcggcgaatcacttataaatggcgccgaagcaggacccgaagcctaaattccaggagggtgagcgagtgctgtgctttcatgggcctcttctttatgaagcaaagtgtgtaaaggttgccataaaggacaaacaagtgaaatacttcatacattacagtggttggaataaaaattgggatgaatgggttccggagagcagagtactcaaatacgtggacaccaatttgcagaaacagcgagaacttcaaaaagccaatcaggagcagtatgcagaggggaagatgagaggggctgccccaggaaagaagacatctggtctgcaacagaaaaatgttgaagtgaaaacgaaaaagaacaaacagaaaacacctggaaatggagatggtggcagtaccagtgagacccctcagcctcctcggaagaaaagggcccgggtagatcctactgttgaaaatgaggcatcngaacaggttgaattaagtg

SEQ ID NO: 414605 - DNA, 775 bp, Homo sapiens
  misc_feature (6)..(6): n is a, c, g, or t
  misc_feature (9)..(11): n is a, c, g, or t
  misc_feature (34)..(34): n is a, c, g, or t
  misc_feature (450)..(451): n is a, c, g, or t
aagganggnnnaagaaaccctatcggctaggtancgaggcggtagagagtagggggcggtagtcgggggtggtgggagaaggaggaggcggcgaatcacttataaatggcgccgaagcaggacccgaagcctaaattccaggagggtgagcgagtgctgtgctttcatgggcctcttctttatgaagcaaagtgtgtaaaggttgccataaaggacaaacaagtgaaatacttcatacattacagtggttggaataaaaattgggatgaatgggttccggagagcagagtactcaaatacgtggacaccaatttgcagaaacagcgagaacttcaaaaagccaatcaggagcagtatgcagaggggaagatgagaggggctgccccaggaaagaagacatctggtctgcaacagaaaaatgttgaagtaaaaaaaaaaaaaaaaaaaaannaaaaaaaaaaaaaaaaaaaaactttttggggggcttgggccttggaaaaagtttttaaaacctttggtgggcgacggcggggggcccaagtatggtacgggagaccggggcataagggggtccagaggggaaaactccggggccaatagacaaaggcggtggggagtttcctccacaatttaaaaaaaacggccgcgggggggacgaccgagaccgtgttctgtgaacaaaacccccagaagggagagtcacaggagggacacaaaaagggggattctatcagcaaggggggtcaaagagaacccgagatatcatattatccgg

SEQ ID NO: 414606 - DNA, 424 bp, Homo sapiens
  misc_feature (6)..(6): n is a, c, g, or t
  misc_feature (9)..(11): n is a, c, g, or t
  misc_feature (34)..(34): n is a, c, g, or t
aagganggnnnaagaaaccctatcggctaggtancgaggcggtagagagtagggggcggtagtcgggggtggtgggagaaggaggaggcggcgaatcacttataaatggcgccgaagcaggacccgaagcctaaattccaggagggtgagcgagtgctgtgctttcatgggcctcttctttatgaagcaaagtgtgtaaaggttgccataaaggacaaacaagtgaaatacttcatacattacagtggttggaataaaaattgggatgaatgggttccggagagcagagtactcaaatacgtggacaccaatttgcagaaacagcgagaacttcaaaaagccaatcaggagcagtatgcagaggggaagatgagaggggctgccccaggtgttttctgtttgttctttttcgttttcacttcaa

SEQ ID NO: 414607 - DNA, 180 bp, Homo sapiens
acattatgctaagagaaataagccaaacacagaaaggcaaatactctgcatgaaatagaaatactgtttaattaggagaatctggttgtgatgcacagagagcattgtctgctagctcattaccttaaatccgacttccatgacacaagactaagaatccaaacttatttgtagatggaa

SEQ ID NO: 414608 - DNA, 2238 bp, Homo sapiens
  misc_feature (2230)..(2232): n is a, c, g, or t
  misc_feature (2234)..(2234): n is a, c, g, or t
  misc_feature (2236)..(2237): n is a, c, g, or t
ggccagagaggagccaggagccatgagggtggcattaggcatgctctggctcttggcccttgcgtggcccccccaggcccggggcttctgcccctctcaatgcagctgcagcctccatatcatgggtgatggcagcaaggccaggacagtagtgtgcaacgaccctgacatgaccctgcccccggcgtccatccccccggacacctccagactgcgcctggagcggacggccatacgcagggttcctggcgaggccttcaggcccctgggccgcctggagcagctgtggctgccttacaacgccctcagcgagctcaacgccctcatgctgcggggtctgcgacgcctgcgggagctgcggctgcccgggaaccgcctggccgccttcccctgggcggcgctcagggacgcccccaagctgcggctgctggacctgcaggccaaccgcctctcggctgtgcccgctgaggccgcgcgcttcctggagaacctcaccttcctcgacctctccagcaaccagctgatgaggctcccgcaggagctcatcgtctcctgggctcacctggagaccggtatctttcctcccggccaccaccccaggcgggtcctagggctacaggacaacccctgggcatgtgactgccgactctatgacctggttcatcttttggatggctgggccccaaacttggccttcattgagactgaactgagatgtgccagcccacgtagcctggccggagtggccttcagccagcttgaactgaggaagtgccagggcccagagctccatccaggagtggccagcatcaggtcccttttgggtggcacagcattgctacgctgtggagctactggagtccctgggcccgagatgagctggaggagggccaatggcaggccccttaacggtacagtgcaccaggaagtctccagtgacggcacgagctggactctgctgggcctgcctgcagtgtcccaccttgactccggagactacatctgccaagccaagaacttcctgggagcctctgaaactgttatctccttgattgtcactgagccgccgacttccacagaacacagtgggagcccaggggcactatgggcaaggacaggtggcggaggggaagctgctgcttacaacaacaagctggtggccaggcatgtcccccagattcccaaacccgctgtcctggccactggaccctctgtgcccagcacaaaggaggagctgacccttgagcacttccagatggatgccctgggagagctctctgatgggcgggcaggaccctcagaggcacgaatggtgaggtctgtgaaggtggtgggggacacttaccacagcgtgtccttggtgtggaaggcaccccaggctaagaacacaactgccttcagtgtcctctacgcggtctttgggcagcacagcatgcggcgggtgattgtgcagcctgggaagaccagagtgaccatcactgggctgttgcccaagaccaagtatgtggcgtgtgtctgtgtgcagggcctggtgccccggaaggagcagtgtgttattttctccaccaatgaagtggtggatgctgagaacactcagcagcttatcaatgtggtggtgatcagtgtggccatcgtcattgccctgcctctcacgctgcttgtctgctgcagtgctcttcagaagcgctgccgaaagtgcttcaacaaggactccactgaggccacagttacctacgtcaacctagagagactgggctacagcgaggacggcttggaggagctgtcccggcacagtgtcagcgaggctgacaggcttctctcagctcgttccagtgtggactttcaggcctttggagtcaaagggggcaggagaatcaatgagtacttctgctgagggatatgcctccgcaactcacacacctgcctgcccacgctccttctttagctctgacacctgagtacacgatcacccactcttacctgctcgggtacctgcttactcagatacttacacacaacaacagcagcagcaagctgctactgcaacaaccgctaacacttgttaagcacttactacagactagaaagtgttctaagtgctaaattcttgtaacaatcatttgcagcaggcatcactattctctccatttccctggggtggggggttaagaaacttgcctgtatcagtcagcttttgctgtataacaaatgaaagcaaaatcttggtgannnananna

SEQ ID NO: 414609 - DNA, 2058 bp, Homo sapiens
tggtccccccaacagatctttgggggcagcctctatgggacaagagtgacacagggctggagaagaggagtgaggagcctccttgtgtctgatgcacagatgtggccctttcaaaccctggtgtcaccctctgggtgactggatccccagctccagcctcttcctgggccagccaggaaggctggaggaaagctctttgctgagtgcatgcatgggagtgtggggggtgactgagccctccccatgcaaggggcttggcctgggaccctggaagctgtttcccagatggggcccttgctgcgtgacggggtctccatgcgctttatttatttgcagtctgttttctaggcggtggagctagacactgaccggaatgacatacttttctgtgtgtgattcactgtgtactggtcagcacaggctggccagagagctgttcttgtttctggtgttgtcacgtcttcttgttttctctaagtttaaaaaaaagtccttggtttaatacactaaaatcccaactggaggcctcccgtgtctggtgggggtgatgcagtggccccgggtggagaggccccatggtgaggtcaccagctcccatggccaggagttggcagggagaagcctctgagggctagggctgggggaggctgtggcagggaccgtgtttcctgttcagaggctgtgctgagaaccgacttgacctggaccactgccccatgagaagcaggcagcatcctagcctggccccgagaggtagctgcttgttctgttgacaacctttgttcaacgacccaaaacataagtccctttcctttttagagtctggcgatcaaaagtgtcttaagtcagtagaatcctgagggtggactagggtgaagtgaactgaaacagactcgacacaggtcattttgtgtagcactgagactcctctccctgcctgaggccacctcccactgcctccctaccagcaaggttactgcagaatcttggagaagataaaggacctggccctggaagcctgcttccctttcccaaccttggaagcaaattctgtcccatcagagcccccctccctagtggctcccaccagagacctccctagtggctgctgtaagggttggcaagcaggcaaaaggcgggggagggagggcagagggtagtgttagaggaagccccatagggcccctgggtgggggtggggaggcatcctgaggacacagggctatgctcagacttaggagtgaagactgggtttaggggccctgggggcactcctgttgccaagggctacccaggggtcagagcatcctgacaaggaggacccgtccaaacgcactggtgctaatgccctatggcatctgccaccacaggagaaatggaccccagtccttgatcttccctcccctttgtctagatggtcctctttatccccactccagggatcacatgacttggcaaagcaagatgggaaatgatcctcccagagcctggctccaaggcttcttgaagagggaggatcacccctcccatccctgctacagaggaaaaggcaggaaggccggttctgctccgatgggactccaggagaccaaagccctgagccctgagcccagctcttccacttactactgtgtggtgccaggcaagctgtgcacaacctggagtttttagtaaggttccgttgggatgcttgtaagcagtgaatacgatgatgtctgttcattgtttgtcatcaggtctcacctggagcagccttgttactgtggggaaaaggaaccaagtgaagggaatcggcctctgatgagagcctgccatgtgccaggcaccatactaggtgctttgcattcctaatctcatcattatcacacaaccacctaaccattatccctgttttacagagaaaccaaagacaggaaccaagtctgaaacagagccccaagaagaagctcttttcctgagctaccagtgccccttggagaggcagggaattgggctggaagaatggtggaatggaatagcaaagatggaagatgaccctgtcctttctgggtgaggtcc

SEQ ID NO: 414610 - DNA, 2330 bp, Homo sapiens
tggtccccccaacagatctttgggggcagcctctatgggacaagagtgacacagggctggagaagaggagtgaggagcctccttgtgtctgatgcacagatgtggccctttcaaaccctggtgtcaccctctgggtgactggatccccagctccagcctcttcctgggccagccaggaaggctggaggaaagctctttgctgagtgcatgcatgggagtgtggggggtgactgagccctccccatgcaaggggcttggcctgggaccctggaagctgtttccctactgggataaagttgcgtcagccgcaggggtctctgccctcaaagaccccccactgcagggagccccaccccataagagggtcacggaagtccatgtccgcccacccccagtggcttctggtgtggccgtattggcctagaggggctgactggggagggtcagggccaagccctcagcatctgctcctgtccctgctttttcacccctgctgcctgaagtggtagccccgcctgctgcttctccacctcccctccccacctcttctctcccagatggggcccttgctgcgtgacggggtctccatgcgctttatttatttgcagtctgttttctaggcggtggagctagacactgaccggaatgacatacttttctgtgtgtgattcactgtgtactggtcagcacaggctggccagagagctgttcttgtttctggtgttgtcacgtcttcttgttttctctaagtttaaaaaaaagtccttggtttaatacactaaaatcccaactggaggcctcccgtgtctggtgggggtgatgcagtggccccgggtggagaggccccatggtgaggtcaccagctcccatggccaggagttggcagggagaagcctctgagggctagggctgggggaggctgtggcagggaccgtgtttcctgttcagaggctgtgctgagaaccgacttgacctggaccactgccccatgagaagcaggcagcatcctagcctggccccgagaggtagctgcttgttctgttgacaacctttgttcaacgacccaaaacataagtccctttcctttttagagtctggcgatcaaaagtgtcttaagtcagtagaatcctgagggtggactagggtgaagtgaactgaaacagactcgacacaggtcattttgtgtagcactgagactcctctccctgcctgaggccacctcccactgcctccctaccagcaaggttactgcagaatcttggagaagataaaggacctggccctggaagcctgcttccctttcccaaccttggaagcaaattctgtcccatcagagcccccctccctagtggctcccaccagagacctccctagtggctgctgtaagggttggcaagcaggcaaaaggcgggggagggagggcagagggtagtgttagaggaagccccatagggcccctgggtgggggtggggaggcatcctgaggacacagggctatgctcagacttaggagtgaagactgggtttaggggccctgggggcactcctgttgccaagggctacccaggggtcagagcatcctgacaaggaggacccgtccaaacgcactggtgctaatgccctatggcatctgccaccacaggagaaatggaccccagtccttgatcttccctcccctttgtctagatggtcctctttatccccactccagggatcacatgacttggcaaagcaagatgggaaatgatcctcccagagcctggctccaaggcttcttgaagagggaggatcacccctcccatccctgctacagaggaaaaggcaggaaggccggttctgctccgatgggactccaggagaccaaagccctgagccctgagcccagctcttccacttactactgtgtggtgccaggcaagctgtgcacaacctggagtttttagtaaggttccgttgggatgcttgtaagcagtgaatacgatgatgtctgttcattgtttgtcatcaggtctcacctggagcagccttgttactgtggggaaaaggaaccaagtgaagggaatcggcctctgatgagagcctgccatgtgccaggcaccatactaggtgctttgcattcctaatctcatcattatcacacaaccacctaaccattatccctgttttacagagaaaccaaagacaggaaccaagtctgaaacagagccccaagaagaagctcttttcctgagctaccagtgccccttggagaggcagggaattgggctggaagaatggtggaatggaatagcaaagatggaagatgaccctgtcctttctgggtgaggtcc

SEQ ID NO: 414611 - DNA, 238 bp, Homo sapiens
tcacttgttcagggtctgtttctaggtgaacccaacctgcaacacttgaccagcaagatttctagtttgtctcctcaaatggccccactgatttgtaactttttagtgcctataatttttaggttcagatcacatttggggtcattttaaaggatttctgtcttattcagccaccccagcggctcagtgttgggtgtattgggaagcctcttggatagaaggaggggacttttgtaca

SEQ ID NO: 414612 - DNA, 894 bp, Homo sapiens
tgtccccaccatgtgcttggttctcagctagaagtagaagaaataaagacaggcttgtgttaatatagcctagtgtaagtagcatgatagaattagctcagagtgtgcaaccttgagggagaagactctgacctgtaactgagcagctgccgtggttgggggtggttattggaggaggaggagaaagaaagacagctcagggaaaacatcctctcctggaaaagtgttaaagtgaatgcatacctgaaccaagcctcaaatggtgagtaagatttccggaagcaagggaatacatgggtcatattcaaggaactgaaagatggttggaagagttcagtataactagagccagggcatgagggctgtggatggagtttgggagatttactttgggagttgtctccgtgttttatataggttatagatgttgtcgaaaaaatagaaaatatgagtcagctgaaacaacaatcatacatgtaccactcagatacattgctgagtttttccttcacctgtatcatttttgcaaaattggatcacagtaggttagctattttgtaacctgcttttttttttaatggtgaaaaacatatatatttagaatttgccagctggattcaacttagatgatcccaattttttggcagcctctaaaagcagcatgctcaggagccagctgaacatgggctttcttctctccatcagccctgatcacggtgttgatcttggccacattggtgtcatagagctcctccacagcctgtttgatcttatgctttttgacctcgacatccacaatgaacacaagtgcattgttgtcctctgtcttcttcatggccaagtcagtggcctgggagaacttgttggtcgcatagtggtcaggcctgggggaga

SEQ ID NO: 414613 - DNA, 436 bp, Homo sapiens
aggagaggaggcaaaaagaagaggaagcagcaagactggctctggaagaagccacgaaacaagcccaggaacaagccaggcaaaaagctgctttggagaaacattttcatttctatcaagaactccataaggaagccagtggcctgcagtggacacagaacatttccagaccatgggtttactcttatttccagttcctacaaatacccaggccttaaggctagaagaaaactaaaaaatttaggatgttgcagtcaagcaccagataagagtgacttccctaaatgttattcaaggtcccttcagaaatctgataatctgttaaaatttttgttgtgaaatgcctattttatcagcactgctaaccagataagcacacatttaagttaaccatatcagagtgcaatgcatttcgaaaaatccaaaaaactaaaaa

SEQ ID NO: 414614 - DNA, 884 bp, Homo sapiens
cactaggctaggtacgaggcggtggtaatcggcacgaggcgccgggttcccgctcgcccggcgccatggatccgctgtcgccgccgctctgcacgctgccgccgggccccgagccgccccgcttcgtgtgctactgcgaaggggaggaaagcggggagggggaccgcggcggcttcaacctctacgtgaccgacgccgcggagctttggagcacctgcttcacgccggacagcctggcggccctcaaagcccgttttggcctgagtgcggctgaggacatcaccccccggttcagggcagcctgtgagcagcaagctgtggctctgactctgcaggaggacagagcatccctgacgctttcaggggggccctcggcactggcctttgacctctccaaggtaccaggcccagaggcagcccccaggctgcgggcgctgacactgggcctggcaaaacgcgtgtggagcctggagcggcgactggcagctgcagaagagacagctgtcagcccgaggaagagcccccggcctgcagggcctcagctcttcttaccagacccagatccccagagaggtggccctggacctggagtcaggaggcggtgtccaggagagtcgctcatcaaccccgggttcaagagtaagaaaccagctggtggcgtggacttcgatgagacctgaaggtgcagcacaagcgtggccccgcggggagtccgcctatgaggggagaggcagtctttgaggcccccatcagagaccccccgccaccacctccacctgcctgtcctgggccaggactaacacggctcctcaaattccttccctgtcaaataaacagctcccttggttggaggcaacaaatgcaaaaacaataaaaaacagggg

SEQ ID NO: 414615 - DNA, 907 bp, Homo sapiens
cactaggctaggtacgaggcggtggtaatcggcacgaggcgccgggttcccgctcgcccggcgccatggatccgctgtcgccgccgctctgcacgctgccgccgggccccgagccgccccgcttcgtgtgctactgcgaaggggaggaaagcggggagggggaccgcggcggcttcaacctctacgtgaccgacgccgcggagctttggagcacctgcttcacgccggacagcctggcggccctcaaagcccgttttggcctgagtgcggctgaggacatcaccccccggttcagggcagcctgtgagcagcaagctgtggctctgactctgcaggaggacagagcatccctgacgctttcaggggggccctcggcactggcctttgacctctccaaggtaccaggcccagaggcagcccccaggctgcgggcgctgacactgggcctggcaaaacgcgtgtggagcctggagcggcgactggcagctgcagaagagacagctgtcagcccgaggaagagcccccggcctgcagggcctcagctcttcttaccagacccagatccccagagaggtggccctggacctggagtcaggaggcggtgtccaggagagtcgctcatcaaccccgggttcaagagtaagaaaccagctggtggcgtggacttcgatgagacctgaaggtgcagcacaagcgtggccccgcggggagtccgcctatgaggggagaggcagtctttgaggcccccatcagagaccccccgccaccacctccacctgcctgtcctgggccaggactaacacggctcctcaaattccttccctgtcaaataaacagctcccttggttggaggcaaaaaaaaaaacaaaaaaaaaaaaatagaaaaacaaaaaaaaaaaaaaaaaaa

SEQ ID NO: 414616 - DNA, 1209 bp, Homo sapiens
cactaggctaggtacgaggcggtggtaatcggcacgaggcgccgggttcccgctcgcccggcgccatggatccgctgtcgccgccgctctgcacgctgccgccgggccccgagccgccccgcttcgtgtgctactgcgaaggggaggaaagcggggagggggaccgcggcggcttcaacctctacgtgaccgacgccgcggagctttggagcacctgcttcacgccggacagcctggcggccctcgtgggtaactgggcgggtctgggagccgccacacccctccttgcagtgcagatcgtctatggggcgacagacatctgggattccccagaaggctctgacaccctctgcccgccctgtagctgtagtcctcccattggctagggctctggggtcgggcaggtttcgggtgcccccagtgggcctcgggttccaggcagctcgtgacaagcccctgtgctctctagaaagcccgttttggcctgagtgcggctgaggacatcaccccccggttcaggtgagacccaagcagggaggaaggacgggtggggaggaggagggtctgccacagctctccgcacctctcctctcccagggcagcctgtgagcagcaagctgtggctctgactctgcaggaggacagagcatccctgacgctttcaggggggccctcggcactggcctttgacctctccaaggtaccaggcccagaggcagcccccaggctgcgggcgctgacactgggcctggcaaaacgcgtgtggagcctggagcggcgactggcagctgcagaagagacagctgtcagcccgaggaagagcccccggcctgcagggcctcagctcttcttaccagacccagatccccagagaggtggccctggacctggagtcaggaggcggtgtccaggagagtcgctcatcaaccccgggttcaagagtaagaaaccagctggtggcgtggacttcgatgagacctgaaggtgcagcacaagcgtggccccgcggggagtccgcctatgaggggagaggcagtctttgaggcccccatcagagaccccccgccaccacctccacctgcctgtcctgggccaggactaacacggctcctcaaattccttccctgtcaaataaacagctcccttggttggaggcaaaaaaaaaaacaaaaaaaaaaaaatagaaaaacaaaaaaaaaaaaaaaaaaa

SEQ ID NO: 414617 - DNA, 816 bp, Homo sapiens
acggctaggtacgaggctgggtttatggatccgctgtcgccgccgctctgcacgctgccgccgggccccgagccgccccgcttcgtgtgctactgcgaaggggaggaaagcggggagggggaccgcggcggcttcaacctctacgtgaccgacgccgcggagctttggagcacctgcttcacgccggacagcctggcggccctcggcagcctgtgagcagcaagctgtggctctgactctgcaggaggacagagcatccctgacgctttcaggggggccctcggcactggcctttgacctctccaaggtaccaggcccagaggcagcccccaggctgcgggcgctgacactgggcctggcaaaacgcgtgtggagcctggagcggcgactggcagctgcagaagagacagctgtcagcccgaggaagagcccccggcctgcagggcctcagctcttcttaccagacccagatccccagagaggtggccctggacctggagtcaggaggcggtgtccaggagagtcgctcatcaaccccgggttcaagagtaagaaaccagctggtggcgtggacttcgatgagacctgaaggtgcagcacaagcgtggccccgcggggagtccgcctatgaggggagaggcagtctttgaggcccccatcagagaccccccgccaccacctccacctgcctgtcctgggccaggactaacacggctcctcaaattccttccctgtcaaataaacagctcccttggttggaggcaaaaaaaaaaacaaaaaaaaaaaaatagaaaaacaaaaaaaaaaaaaaaaaaa

SEQ ID NO: 414618 - DNA, 924 bp, Homo sapiens
cactaggctaggtacgaggcggtggtaatcggcacgaggcgccgggttcccgctcgcccggcgccatggatccgctgtcgccgccgctctgcacgctgccgccgggccccgagccgccccgcttcgtgtgctactgcgaaggggaggaaagcggggagggggaccgcggcggcttcaacctctaaaagcccgttttggcctgagtgcggctgaggacatcaccccccggttcaggtgagacccaagcagggaggaaggacgggtggggaggaggagggtctgccacagctctccgcacctctcctctcccagggcagcctgtgagcagcaagctgtggctctgactctgcaggaggacagagcatccctgacgctttcaggggggccctcggcactggcctttgacctctccaaggtaccaggcccagaggcagcccccaggctgcgggcgctgacactgggcctggcaaaacgcgtgtggagcctggagcggcgactggcagctgcagaagagacagctgtcagcccgaggaagagcccccggcctgcagggcctcagctcttcttaccagacccagatccccagagaggtggccctggacctggagtcaggaggcggtgtccaggagagtcgctcatcaaccccgggttcaagagtaagaaaccagctggtggcgtggacttcgatgagacctgaaggtgcagcacaagcgtggccccgcggggagtccgcctatgaggggagaggcagtctttgaggcccccatcagagaccccccgccaccacctccacctgcctgtcctgggccaggactaacacggctcctcaaattccttccctgtcaaataaacagctcccttggttggaggcaaaaaaaaaaacaaaaaaaaaaaaatagaaaaacaaaaaaaaaaaaaaaaaaa

SEQ ID NO: 414619 - DNA, 985 bp, Homo sapiens
cactaggctaggtacgaggcggtggtaatcggcacgaggcgccgggttcccgctcgcccggcgccatggatccgctgtcgccgccgctctgcacgctgccgccgggccccgagccgccccgcttcgtgtgctactgcgaaggggaggaaagcggggagggggaccgcggcggcttcaacctctacgtgaccgacgccgcggagctttggagcacctgcttcacgccggacagcctggcggccctcaaagcccgttttggcctgagtgcggctgaggacatcaccccccggttcaggtgagacccaagcagggaggaaggacgggtggggaggaggagggtctgccacagctctccgcacctctcctctcccagggcagcctgtgagcagcaagctgtggctctgactctgcaggaggacagagcatccctgacgctttcaggggggccctcggcactggcctttgacctctccaaggtaccaggcccagaggcagcccccaggctgcgggcgctgacactgggcctggcaaaacgcgtgtggagcctggagcggcgactggcagctgcagaagagacagctgtcagcccgaggaagagcccccggcctgcagggcctcagctcttcttaccagacccagatccccagagaggtggccctggacctggagtcaggaggcggtgtccaggagagtcgctcatcaaccccgggttcaagagtaagaaaccagctggtggcgtggacttcgatgagacctgaaggtgcagcacaagcgtggccccgcggggagtccgcctatgaggggagaggcagtctttgaggcccccatcagagaccccccgccaccacctccacctgcctgtcctgggccaggactaacacggctcctcaaattccttccctgtcaaataaacagctcccttggttggaggcaaaaaaaaaaacaaaaaaaaaaaaatagaaaaacaaaaaaaaaaaaaaaaaaa

SEQ ID NO: 414620 - DNA, 828 bp, Homo sapiens
cactaggctaggtacgaggcggtggtaatcggcacgaggcgccgggttcccgctcgcccggcgccatggatccgctgtcgccgccgctctgcacgctgccgccgggccccgagccgccccgcttcgtgtgctactgcgaaggggaggaaagcggggagggggaccgcggcggcttcaacctctacgtgaccgacgccgcggagctttggagcacctgcttcacgccggacagcctggcggccctcaaagcccgttttggcctgagtgcggctgaggacatcaccccccggttcagggcagcctgtgagcagcaagctgtggctctgactctgcaggaggacagagcatccctgacgctttcaggggggccctcggcactggcctttgacctctccaaggtaccaggcccagaggcagcccccaggctgcgggcgctgacactgggcctggcaaaacgcgtgtggagcctggagcggcgactggcagctgcagaagagacagctgtcagcccgaggaagagcccccggcctgcagggcctcagctcttcttaccagacccagatccccagagaggtggccctggacctggagtcaggaggcggtgtccaggagagtcgctcatcaaccccgggttcaagagtaagaaaccagctggtggcgtggacttcgatgagacctgaaggtgcagcacaagcgtggccccgcggggagtccgcctatgaggggagaggcagtctttgaggcccccatcagagaccccccgccaccacctccaccttcttcttcctcctcctcttcctccccaccttactcagacatctggtacca

SEQ ID NO: 414621 - DNA, 995 bp, Homo sapiens
cactaggctaggtacgaggcggtggtaatcggcacgaggcgccgggttcccgctcgcccggcgccatggatccgctgtcgccgccgctctgcacgctgccgccgggccccgagccgccccgcttcgtgtgctactgcgaaggggaggaaagcggggagggggaccgcggcggcttcaacctctacgtgaccgacgccgcggagctttggagcacctgcttcacgccggacagcctggcggccctcaaagcccgttttggcctgagtgcggctgaggacatcaccccccggttcagggcagcctgtgagcagcaagctgtggctctgactctgcaggaggacagagcatccctgacgctttcaggggggccctcggcactggcctttgacctctccaaggtaccaggcccagaggcagcccccaggctgcgggcgctgacactgggcctggcaaaacgcgtgtggagcctggagcggcgactggcagctgcagaagagacagctgtcagcccgaggaagagcccccggcctgcagggcctcagctcttcttaccagacccagatccccagagaggtggccctggacctggagtcaggaggcggtgtccaggagagtcgctcatcaaccccgggttcaagagtaagaaaccagctggtggcgtggacttcgatgagacctgaaggtgcagcacaagcgtggccccgcggggagtccgcctatgaggggagaggcagtctttgaggcccccatcagagaccccccgccaccacctccacctgcctgtcctgggccaggactaacacggctcctcaaattccttccctgtcaataaccgtccttgggtcggaaaaaaacacaccacacacacacaaaaaaaaaccccggcgtttttgcgggggcgaaaggataaaggacaggtacttttccgccccttttcaggggtatcccgccccttttggtaattaacttctcatatcatatactatataggtaag

SEQ ID NO: 414622 - DNA, 1131 bp, Homo sapiens
cactaggctaggtacgaggcggtggtaatcggcacgaggcgccgggttcccgctcgcccggcgccatggatccgctgtcgccgccgctctgcacgctgccgccgggccccgagccgccccgcttcgtgtgctactgcgaaggggaggaaagcggggagggggaccgcggcggcttcaacctctacgtgaccgacgccgcggagctttggagcacctgcttcacgccggacagcctggcggccctcgtgggtaactgggcgggtctgggagccgccacacccctccttgcagtgcagatcgtctatggggcgacagacatctgggattccccagaaggctctgacaccctctgcccgccctgtagctgtagtcctcccattggctagggctctggggtcgggcaggtttcgggtgcccccagtgggcctcgggttccaggcagctcgtgacaagcccctgtgctctctagaaagcccgttttggcctgagtgcggctgaggacatcaccccccggttcagggcagcctgtgagcagcaagctgtggctctgactctgcaggaggacagagcatccctgacgctttcaggggggccctcggcactggcctttgacctctccaaggtaccaggcccagaggcagcccccaggctgcgggcgctgacactgggcctggcaaaacgcgtgtggagcctggagcggcgactggcagctgcagaagagacagctgtcagcccgaggaagagcccccggcctgcagggcctcagctcttcttaccagacccagatccccagagaggtggccctggacctggagtcaggaggcggtgtccaggagagtcgctcatcaaccccgggttcaagagtaagaaaccagctggtggcgtggacttcgatgagacctgaaggtgcagcacaagcgtggccccgcggggagtccgcctatgaggggagaggcagtctttgaggcccccatcagagaccccccgccaccacctccacctgcctgtcctgggccaggactaacacggctcctcaaattccttccctgtcaaataaacagctcccttggttggaggcaaaaaaaaaaacaaaaaaaaaaaaatagaaaaacaaaaaaaaaaaaaaaaaaa

SEQ ID NO: 414623 - DNA, 1299 bp, Homo sapiens
cactaggctaggtacgaggcggtggtaatcggcacgaggcgccgggttcccgctcgcccggcgccatggatccgctgtcgccgccgctctgcacgctgccgccgggccccgagccgccccgcttcgtgtgctactgcgaaggggaggaaagcggggagggggaccgcggcggcttcaacctctacgtgaccgacgccgcggagctttggagcacctgcttcacgccggacagcctggcggccctcgtgggtaactgggcgggtctgggagccgccacacccctccttgcagtgcagatcgtctatggggcgacagacatctgggattccccagaaggctctgacaccctctgcccgccctgtagctgtagtcctcccattggctagggctctggggtcgggcaggtttcgggtgcccccagtgggcctcgggttccaggcagctcgtgacaagcccctgtgctctctagaaagcccgttttggcctgagtgcggctgaggacatcaccccccggttcagggcagcctgtgagcagcaagctgtggctctgactctgcaggaggacagagcatccctgacgctttcaggggggccctcggcactggcctttgacctctccaaggtaccaggcccagaggcagcccccaggctgcgggcgctgacactgggcctggcaaaacgcgtgtggagcctggagcggcgactggcagctgcagaagagacagctgtcagcccgaggaagagcccccggcctgcagggcctcagctcttcttaccaggtaaggcatgtccgcctgtgactcaagtagggctgtgctctttaacctggaactcagtttccccccaaacaagactcacgctccagagagaatgcctatctattcggagaaggttgtggttgggatgctgccaggttcaggagctgcccctgtcctgttttcccccagacccagatccccagagaggtggccctggacctggagtcaggaggcggtgtccaggagagtcgctcatcaaccccgggttcaagagtaagaaaccagctggtggcgtggacttcgatgagacctgaaggtgcagcacaagcgtggccccgcggggagtccgcctatgaggggagaggcagtctttgaggcccccatcagagaccccccgccaccacctccacctgcctgtcctgggccaggactaacacggctcctcaaattccttccctgtcaaataaacagctcccttggttggaggcaaaaaaaaaaacaaaaaaaaaaaaatagaaaaacaaaaaaaaaaaaaaaaaaa

SEQ ID NO: 414624 - DNA, 399 bp, Homo sapiens
ttgtgtcactgatacatttctgaaaacacaagaagattccctcctactatttctccacttaaaatacttaatactgaaaagctgagtgtcattggttgttgaatttctgctggagttggcgagatgactgttaacactctaaaattaggggcttcgctttccctcgggcttatgagaatggtttaaatataatagatactcagtaaatatttattgattgatacacagctttgggatcccaagtcaggatctgcctctactcagtctaataatgccctttggggagaaacatttttcattacagatttctcttaattgtaagaaatctttaattctgaaaggttaaaaaaaaagttcagttcagtcgttctttaaatcttttgggtcataggaaccttt

SEQ ID NO: 414625 - DNA, 451 bp, Homo sapiens
caacatgccgagccctagagtggtcctccctctcccaccaccaactatcctacctggcctcccaagaactgcctttggtgactcttgtattctctgtcttgcttcatgcctgggaaatttcagggcatatattaaggggaaaaccttagggaaacctgaaccttcaaaactgggtagaatgaatggatggaatggaagaatttactgcagcgaaatcatcttcaaattccttttaggttggaagcttcttaccctggcaagtgaagaagtacatttggttatatgtttataatccatgtgctactgggtgaaagatgataggacaagaacatttgaaatgtatgtgttagggatctctgcccagcagtttccatcaaaagagcacacccatgattatcgtacaaatggatgggacagcaggattctactcacgtaaaatgtttgtccctga

SEQ ID NO: 414626 - DNA, 4064 bp, Homo sapiens
cccctagtcttagtgactcgcactgaagcgccgattcctggcttttgcaaggctgtggtcggtggtcatcagtgctcttgacccaggtccagcgagccttttccctggtgttgcagctgttgttgtaccgccgccgtcgccgccgtcgccgcctgctctgcggggtcatggtgtgcttccgcctcttcccggttccgggctcagggctcgttctggtctgcctagtcctgggagctgtgcggtcttatgcattggaacttaatttgacagattcagaaaatgccacttgcctttatgcaaaatggcagatgaatttcacagtacgctatgaaactacaaataaaacttataaaactgtaaccatttcagaccatggcactgtgacatataatggaagcatttgtggggatgatcagaatggtcccaaaatagcagtgcagttcggacctggcttttcctggattgcgaattttaccaaggcagcatctacttattcaattgacagcgtctcattttcctacaacactggtgataacacaacatttcctgatgctgaagataaaggaattcttactgttgatgaacttttggccatcagaattccattgaatgacctttttagatgcaatagtttatcaactttggaaaagaatgatgttgtccaacactactgggatgttcttgtacaagcttttgtccaaaatggcacagtgagcacaaatgagttcctgtgtgataaagacaaaacttcaacagtggcacccaccatacacaccactgtgccatctcctactacaacacctactccaaaggaaaaaccagaagctggaacctattcagttaataatggcaatgatacttgtctgctggctaccatggggctgcagctgaacatcactcaggataaggttgcttcagttattaacatcaaccccaatacaactcactccacaggcagctgccgttctcacactgctctacttagactcaatagcagcaccattaagtatctagactttgtctttgctgtgaaaaatgaaaaccgattttatctgaaggaagtgaacatcagcatgtatttggttaatggctccgttttcagcattgcaaataacaatctcagctactgggatgcccccctgggaagttcttatatgtgcaacaaagagcagactgtttcagtgtctggagcatttcagataaatacctttgatctaagggttcagcctttcaatgtgacacaaggaaagtattctacagcccaagagtgttcgctggatgatgacaccattctaatcccaattatagttggtgctggtctttcaggcttgattatcgttatagtgattgcttacgtaattggcagaagaaaaagttatgctggatatcagactctgtaacactaatcaatacgtgatctctgttacaaaagaaaaaagcaagtacaagttccaacatgcaatactggtcaacttaaggtatatttagttgcagtccagctctttagaatgggtggtatgggggatttcaaacttaaacaaaaaactatcaactacaaattagttgcctgactttggtttttccaaccaaggaatttaaaactgttatttttacagcaaaagatgtgcaaaatcactggattataagttctattttactgtcttgaattagtatttcagtgttttcattttagacattcagactaaaaatacaccgtttagaaaaaacaatttttgaaaaagagattttttttccctgcaggtagttgagttggaacaacatgttctaccgtggatttgtacttgctccttttgctctttttttttgtgtgtgtgtgtgtgtgtgtgtgtgtgtgtgtgtgtgtgtgatttttgtttgcaggttaacttagctactttggcattgctgcatatttgacctttgagagatataatagtagatttgaacaggggctggtattattatgttcttagcaataaatgcttttctaatgccttttgaatacatttgtatttatgtggctgtaatgacaaaagatacaaaagctttttaaaatttagagtaggtattaatcttattgtttaatcttttttttaaaaaaactggatatttcaatcttttaaattgcaatatataagactattccaactgggcatttcaatccattttttaggtgctttagagataattgcttgccagtgccaattgagggcattagtactttgtgctcataaattggcctctgtatgcagtactaaaattaatgcagatttctctttagccttccaacatttcttgttgatagtgatgtattttattattttctttttcttaagaaatgccagtgtgtcctagaacctagataacgaagtgcacttacacttataaaataacttgcatctaggctgggcgtggcggctcacgcctgtaatcccagcactttgggaggccgaagtgggtggatcacttgaggccaggagtttgagaccagcctggccaacatggtgaaaccccatctctatcagaaatacaaaaaattagctgggcgtggtggtgggcgcctgtaatcccagttactcgggaggctgaggcaggagaatcacttgaacccgggaggcagaggttgcggtgagccaagagcgcaccattgcactccagcctgggcgacaaaaacgaaactccatctcaaaacaaaacaaaacaaaacaaacaaacaaacaaaacttgcatctaaccaaaaagtcttggttttatcttaatccattaaaaagttgttctttgtttccagcttgcattgattgctacaacatcactaatttggctttcacatttaaatggttctgtgctaatcaaaactttcgttgttattattcgttatggtagaatcatttttaattcacgtgctttgtgttcagttttgtggtctgagagatgtaccaattgtcaaattaccgtgtaccacctaatgtttataggagaaagcaaaatacatcagcttggtagttaacacatcaaatatttcttgctgcttctaggagaacttttttggtgtgtgttggaatggctgagcaaatattaaaattgttaatatgcagccatatatggaaggttcctgtggggttgttttttcgtgttttttttttttgtggtgggattatgtgcctcccattcactagaaaatgagaaaattgtctgggttccaaaatattgacattgaatggatcaatacacacacacagacatatatatatatatgcacacatatataggcagttgcatgctagcatgggtatttttataacaatataactgagttatattggaattataaatattttccgtcacttaaatttgttctttgtttagcctgaaaacctttatggctcaagatcagattcctgactaacccctctcttagagctacagcgagctgcattaccagcttaaaacacttcttagggattaaatatagatgtaatttttcaaaatcgtttttaatttaaactgtgttttagtgtaaaattgttaaccttgtaagatggataatgtgtataagaatgtaggccttaactatttcacatgagtcaaaacaaagcagctttaaaaaaataattggaagcacaagtgcatggcactgactgaatgctgttaatatttctaaaagtttctacattcagattatatgcctgattcatagtaaaatacctctaataaacactgttttatagaaaacctgacttcagtgaatatttttgtattttacatgggccagtttatatactgctatttacactattatttcctatagctacatgttctttgtaccttttgtagttttatttgtattactagattcataccttgatggtaacgctctatctggttttgggtgtttttcatgttttagcatttgtataaagaaactggtccatgtaaatactttccatgttttttcttcaaatgtttaaaccactagttgatgtatggtatctttagatatttgcctgtctgtttgctcaaaattgcttctaaaacaataaagattcttttatttcttaaggcaa

SEQ ID NO: 414627 - DNA, 417 bp, Homo sapiens
gactagttctagatcgcgagcgcccacgcgtccgcggacgcgtgggtcgcccacgcgtctctaataaacactgttttatagaaaacctgacttcagtgaatatttttgtattttacatgggccagtttatatactgctatttacactattatttcctatagctacatgttctttgtaccttttgtagttttatttgtattactagattcataccttgatggtaacgctctatctggttttgggtgtttttcatgttttagcatttgtataaagaaactggtccatgtaaatactttccatgttttttcttcaaatgtttaaaccactagttgatgtatggtatctttagatatttgcctgtctgtttgctcaaaattgcttctaaaacaataaagattcttttatttcttaaggcaa

SEQ ID NO: 414628 - DNA, 3928 bp, Homo sapiens
cccctagtcttagtgactcgcactgaagcgccgattcctggcttttgcaaggctgtggtcggtggtcatcagtgctcttgacccaggtccagcgagccttttccctggtgttgcagctgttgttgtaccgccgccgtcgccgccgtcgccgcctgctctgcggggtcatggtgtgcttccgcctcttcccggttccgggctcagggctcgttctggtctgcctagtcctgggagctgtgcggtcttatgcattggaacttaatttgacagattcagaaaatgccacttgcctttatgcaaaatggcagatgaatttcacagtacgctatgaaactacaaataaaacttataaaactgtaaccatttcagaccatggcactgtgacatataatggaagcatttgtggggatgatcagaatggtcccaaaatagcagtgcagttcggacctggcttttcctggattgcgaattttaccaaggcagcatctacttattcaattgacagcgtctcattttcctacaacactggtgataacacaacatttcctgatgctgaagataaaggaattcttactgttgatgaacttttggccatcagaattccattgaatgacctttttagatgcaatagtttatcaactttggaaaagaatgatgttgtccaacactactgggatgttcttgtacaagcttttgtccaaaatggcacagtgagcacaaatgagttcctgtgtgataaagacaaaacttcaacagtggcacccaccatacacaccactgtgccatctcctactacaacacctactccaaaggaaaaaccagaagctggaacctattcagttaataatggcaatgatacttgtctgctggctaccatggggctgcagctgaacatcactcaggataaggttgcttcagttattaacatcaaccccaatacaactcactccacaggcagctgccgttctcacactgctctacttagactcaatagcagcaccattaagtatctagactttgtctttgctgtgaaaaatgaaaaccgattttatctgaaggaagtgaacatcagcatgtatttggttaatggctccgttttcagcattgcaaataacaatctcagctactgggatgcccccctgggaagttcttatatgtgcaacaaagagcagactgtttcagtgtctggagcatttcagataaatacctttgatctaagggttcagcctttcaatgtgacacaaggaaagtattctacagcccaagagtgttcgctggatgatgacaccattctaatcccaattatagttggtgctggtctttcaggcttgattatcgttatagtgattgcttacgtaattggcagaagaaaaagttatgctggatatcagactctgtaacactaatcaatacgtgatctctgttacaaaagaaaaaagcaagtacaagttccaacatgcaatactggtcaacttaaggtatatttagttgcagtccagctctttagaatgggtggtatgggggatttcaaacttaaacaaaaaactatcaactacaaattagttgcctgactttggtttttccaaccaaggaatttaaaactgttatttttacagcaaaagatgtgcaaaatcactggattataagttctattttactgtcttgaattagtatttcagtgttttcattttagacattcagactaaaaatacaccgtttagaaaaaacaatttttgaaaaagagattttttttccctgcaggtagttgagttggaacaacatgttctaccgtggatttgtacttgctccttttgctctttttttttgtgtgtgtgtgtgtgtgtgtgtgtgtgtgtgtgtgtgtgtgatttttgtttgcaggttaacttagctactttggcattgctgcatatttgacctttgagagatataatagtagatttgaacaggggctggtattattatgttcttagcaataaatgcttttctaatgccttttgaatacatttgtatttatgtggctgtaatgacaaaagatacaaaagctttttaaaatttagagtaggtattaatcttattgtttaatcttttttttaaaaaaactggatatttcaatcttttaaattgcaatatataagactattccaactgggcatttcaatccattttttaggtgctttagagataattgcttgccagtgccaattgagggcattagtactttgtgctcataaattggcctctgtatgcagtactaaaattaatgcagatttctctttagccttccaacatttcttgttgatagtgatgtattttattattttctttttcttaagaaatgccagtgtgtcctagaacctagataacgaagtgcacttacacttataaaataacttgcatctaggctgggcgtggtggtgggcgcctgtaatcccagttactcgggaggctgaggcaggagaatcacttgaacccgggaggcagaggttgcggtgagccaagagcgcaccattgcactccagcctgggcgacaaaaacgaaactccatctcaaaacaaaacaaaacaaaacaaacaaacaaacaaaacttgcatctaaccaaaaagtcttggttttatcttaatccattaaaaagttgttctttgtttccagcttgcattgattgctacaacatcactaatttggctttcacatttaaatggttctgtgctaatcaaaactttcgttgttattattcgttatggtagaatcatttttaattcacgtgctttgtgttcagttttgtggtctgagagatgtaccaattgtcaaattaccgtgtaccacctaatgtttataggagaaagcaaaatacatcagcttggtagttaacacatcaaatatttcttgctgcttctaggagaacttttttggtgtgtgttggaatggctgagcaaatattaaaattgttaatatgcagccatatatggaaggttcctgtggggttgttttttcgtgttttttttttttgtggtgggattatgtgcctcccattcactagaaaatgagaaaattgtctgggttccaaaatattgacattgaatggatcaatacacacacacagacatatatatatatatgcacacatatataggcagttgcatgctagcatgggtatttttataacaatataactgagttatattggaattataaatattttccgtcacttaaatttgttctttgtttagcctgaaaacctttatggctcaagatcagattcctgactaacccctctcttagagctacagcgagctgcattaccagcttaaaacacttcttagggattaaatatagatgtaatttttcaaaatcgtttttaatttaaactgtgttttagtgtaaaattgttaaccttgtaagatggataatgtgtataagaatgtaggccttaactatttcacatgagtcaaaacaaagcagctttaaaaaaataattggaagcacaagtgcatggcactgactgaatgctgttaatatttctaaaagtttctacattcagattatatgcctgattcatagtaaaatacctctaataaacactgttttatagaaaacctgacttcagtgaatatttttgtattttacatgggccagtttatatactgctatttacactattatttcctatagctacatgttctttgtaccttttgtagttttatttgtattactagattcataccttgatggtaacgctctatctggttttgggtgtttttcatgttttagcatttgtataaagaaactggtccatgtaaatactttccatgttttttcttcaaatgtttaaaccactagttgatgtatggtatctttagatatttgcctgtctgtttgctcaaaattgcttctaaaacaataaagattcttttatttcttaaggcaa

SEQ ID NO: 414629 - DNA, 4198 bp, Homo sapiens
cccctagtcttagtgactcgcactgaagcgccgattcctggcttttgcaaggctgtggtcggtggtcatcagtgctcttgacccaggtccagcgagccttttccctggtgttgcagctgttgttgtaccgccgccgtcgccgccgtcgccgcctgctctgcggggtcatggtgtgcttccgcctcttcccggttccgggctcagggctcgttctggtctgcctagtcctgggagctgtgcggtcttatgcattggaacttaatttgacagattcagaaaatgccacttgcctttatgcaaaatggcagatgaatttcacagtacgctatgaaactacaaataaaacttataaaactgtaaccatttcagaccatggcactgtgacatataatggaagcatttgtggggatgatcagaatggtcccaaaatagcagtgcagttcggacctggcttttcctggattgcgaattttaccaaggcagcatctacttattcaattgacagcgtctcattttcctacaacactggtgataacacaacatttcctgatgctgaagataaaggaattcttactgttgatgaacttttggccatcagaattccattgaatgacctttttagatgcaatagtttatcaactttggaaaagaatgatgttgtccaacactactgggatgttcttgtacaagcttttgtccaaaatggcacagtgagcacaaatgagttcctgtgtgataaagacaaaacttcaacagtggcacccaccatacacaccactgtgccatctcctactacaacacctactccaaaggaaaaaccagaagctggaacctattcagttaataatggcaatgatacttgtctgctggctaccatggggctgcagctgaacatcactcaggataaggttgcttcagttattaacatcaaccccaatacaactcactccacaggcagctgccgttctcacactgctctacttagactcaatagcagcaccattaagtatctagactttgtctttgctgtgaaaaatgaaaaccgattttatctgaaggaagtgaacatcagcatgtatttggttaatggctccgttttcagcattgcaaataacaatctcagctactgggatgcccccctgggaagttcttatatgtgcaacaaagagcagactgtttcagtgtctggagcatttcagataaatacctttgatctaagggttcagcctttcaatgtgacacaaggaaagtattctacagcccaagagtgttcgctggatgatgacaccattctaatcccaattatagttggtgctggtctttcaggcttgattatcgttatagtgattgcttacgtaattggcagaagaaaaagttatgctggatatcagactctgtaacactaatcaatacgtgatctctgttacaaaagaaaaaagcaagtacaagttccaacatgcaatactggtcaacttaaggtatatttagttgcagtccagctctttagaatgggtggtatgggggatttcaaacttaaacaaaaaactatcaactacaaattagttgcctgactttggtttttccaaccaaggaatttaaaactgttatttttacagcaaaagatgtgcaaaatcactggattataagttctattttactgtcttgaattagtatttcagtgttttcattttagacattcagactaaaaatacaccgtttagaaaaaacaatttttgaaaaagagattttttttccctgcaggtagttgagttggaacaacatgttctaccgtggatttgtacttgctccttttgctctttttttttgtgtgtgtgtgtgtgtgtgtgtgtgtgtgtgtgtgtgtgtgatttttgtttgcaggttaacttagctactttggcattgctgcatatttgacctttgagagatataatagtagatttgaacaggggctggtattattatgttcttagcaataaatgcttttctaatgccttttgaatacatttgtatttatgtggctgtaatgacaaaagatacaaaagctttttaaaatttagagtaggtattaatcttattgtttaatcttttttttaaaaaaactggatatttcaatcttttaaattgcaatatataagactattccaactgggcatttcaatccattttttaggtgctttagagataattgcttgccagtgccaattgagggcattagtactttgtgctcataaattggcctctgtatgcagtactaaaattaatgcagatttctctttagccttccaacatttcttgttgatagtgatgtattttattattttctttttcttaagaaatgccagtgtgtcctagaacctagataacgaagtgcacttacacttataaaataacttgcatctaggctgggcgtggcggctcacgcctgtaatcccagcactttgggaggccgaagtgggtggatcacttgaggccaggagtttgagaccagcctggccaacatggtgaaaccccatctctatcagaaatacaaaaaattagctgggcgtggtggtgggcgcctgtaatcccagttactcgggaggctgaggcaggagaatcacttgaacccgggaggcagaggttgcggtgagccaagagcgcaccattgcactccagcctgggcgacaaaaacgaaactccatctcaaaacaaaacaaaacaaaacaaacaaacaaacaaaacttgcatctaaccaaaaagtcttggttttatcttaatccattaaaaagttgttctttgtttccagcttgcattgattgctacaacatcactaatttggctttcacatttaaatggttctgtgctaatcaaaactttcgttgttattattcgttatggtagaatcatttttaattcacgtgctttgtgttcagttttgtggtctgagagatgtaccaattgtcaaattaccgtgtaccacctaatgtttataggagaaagcaaaatacatcagcttggtagttaacacatcaaatatttcttgctgcttctaggagaacttttttggtgtgtgttggaatggctgagcaaatattaaaattgttaatatgcagccatatatggaaggttcctgtggggttgttttttcgtgttttttttttttgtggtgggattatgtgcctcccattcactagaaaatgagaaaattgtctgggttccaaaatattgacattgaatggatcaatacacacacacagacatatatatatatatgcacacatatataggcagttgcatgctagcatgggtatttttataacaatataactgagttatattggaattataaatattttccgtcacttaaatttgttctttgtttagcctgaaaacctttatggctcaagatcagattcctgactaacccctctcttagagctacagcgagctgcattaccagcttaaaacacttcttagggattaaatatagatgtaatttttcaaaatcgtttttaatttaaactgtgttttagtgtaaaattgttaaccttgtaagatggataatgtgtataagaatgtaggccttaactatttcacatgagtcaaaacaaagcagctttaaaaaaataattggaagcacaagtgcatggcactgactgaatgctgttaatatttctaaaagtttctacattcagattatatgcctgattcatagtaaaatacctctaataaacactgttttatagaaaacctgacttcagtgaatatttttgtattttacatgggccagtttatatactgctatttacactattatttcctatagctacatgttctttgtaccttttgtagttttatttgtattactagattcataccttgatggtaacgctctatctggttttgggtgtttttcatgttttagcatttgtataaagaaactggtccatgtaaatactttccatgttttttcttcaaatgtttaaaccactagttgatgtatggtatctttagatatttgcctgtctgtttgctcaaaattgcttctaaaacaataaagattcttttatttcttaaggcaataaaacaaacacactcatcaaaaacaaacactttgtcggggcgcccgggccccaaaaaagtttaaacacctcggggggggggggcccaaggtaggaactgggcacacgggttcacgagaacccgcggacgaaag

SEQ ID NO: 414630 - DNA, 2284 bp, Homo sapiens
cccctagtcttagtgactcgcactgaagcgccgattcctggcttttgcaaggctgtggtcggtggtcatcagtgctcttgacccaggtccagcgagccttttccctggtgttgcagctgttgttgtaccgccgccgtcgccgccgtcgccgcctgctctgcggggtcatggtgtgcttccgcctcttcccggttccgggctcagggctcgttctggtctgcctagtcctgggagctgtgcggtcttatgcattggaacttaatttgacagattcagaaaatgccacttgcctttatgcaaaatggcagatgaatttcacagtacgctatgaaactacaaataaaacttataaaactgtaaccatttcagaccatggcactgtgacatataatggaagcatttgtggggatgatcagaatggtcccaaaatagcagtgcagttcggacctggcttttcctggattgcgaattttaccaaggcagcatctacttattcaattgacagcgtctcattttcctacaacactggtgataacacaacatttcctgatgctgaagataaaggaattcttactgttgatgaacttttggccatcagaattccattgaatgacctttttagatgcaatagtttatcaactttggaaaagaatgatgttgtccaacactactgggatgttcttgtacaagcttttgtccaaaatggcacagtgagcacaaatgagttcctgtgtgataaagacaaaacttcaacagtggcacccaccatacacaccactgtgccatctcctactacaacacctactccaaaggaaaaaccagaagctggaacctattcagttaataatggcaatgatacttgtctgctggctaccatggggctgcagctgaacatcactcaggataaggttgcttcagttattaacatcaaccccaatacaactcactccacaggcagctgccgttctcacactgctctacttagactcaatagcagcaccattaagtatctagactttgtctttgctgtgaaaaatgaaaaccgattttatctgaaggaagtgaacatcagcatgtatttggttaatggctccgttttcagcattgcaaataacaatctcagctactgggatgcccccctgggaagttcttatatgtgcaacaaagagcagactgtttcagtgtctggagcatttcagataaatacctttgatctaagggttcagcctttcaatgtgacacaaggaaagtattctacagctcaagactgcagtgcagatgacgacaacttccttgtgcccatagcggtgggagctgccttggcaggagtacttattctagtgttgctggcttattttattggtctcaagcaccatcatgctggatatgagcaattttagaatctgcaacctgattgattatataaaaatacatgcaaataacaagattttcttacctctcagttgttgaaacactttgcttcttaaaattgatatgttgaaactttaattcttttatcaatcccagcattttgagatcagtctttattaataaaacctgttctctttaatcagcttaaaatccaaagtgtcatatttactggtcctggagacaaacttgttcaaaagaacatcaacgtgcaatgttttaaggtctatcttaagaagccctggccaaattttgatcctaaccttgaagtatgccttgaacttattaacatggccattataagaataaaatatgtagttgtgtcttaatggaattaataaatgtcatttcactactggtgttctgtttcaatgtataaggactatagtgatttaaactcatcaatgtgcctttgcataaagttgattaaataaatattgatgtggtataaatgcccatcagatatgcttaaacttggttttcagttgaatgaagtagagaatgtcctcaggaccatcagcattttaaaggttatgtgacttttgctgatttctctgagttcaagttaagcatgaagttagtacctcaagcctgtgatttttccctagggatgatacagacccaagaggctacaacagaacttaaactggcttcgtaattagagtttttaagataattgtttgtttttcagcaatatagactgaaaagatccaagcatatttagccactttgcatccagaggacactttgcatccagaggacactttgcatccagagacactttgcatccagagacacttggcatccagagacactttgcatccagagacactttgcatccagagacactttgcat

SEQ ID NO: 414631 - DNA, 3847 bp, Homo sapiens
cccctagtcttagtgactcgcactgaagcgccgattcctggcttttgcaaggctgtggtcggtggtcatcagtgctcttgacccaggtccagcgagccttttccctggtgttgcagctgttgttgtaccgccgccgtcgccgccgtcgccgcctgctctgcggggtcatggtgtgcttccgcctcttcccggttccgggctcagggctcgttctggtctgcctagtcctgggagctgtgcggtcttatgcattggaacttaatttgacagattcagaaaatgccacttgcctttatgcaaaatggcagatgaatttcacagtacgctatgaaactacaaataaaacttataaaactgtaaccatttcagaccatggcactgtgacatataatggaagcatttgtggggatgatcagaatggtcccaaaatagcagtgcagttcggacctggcttttcctggattgcgaattttaccaaggcagcatctacttattcaattgacagcgtctcattttcctacaacactggtgataacacaacatttcctgatgctgaagataaaggaattcttactgttgatgaacttttggccatcagaattccattgaatgacctttttagatgcaatagtttatcaactttggaaaagaatgatgttgtccaacactactgggatgttcttgtacaagcttttgtccaaaatggcacagtgagcacaaatgagttcctgtgtgataaagacaaaacttcaacagtggcacccaccatacacaccactgtgccatctcctactacaacacctactccaaaggaaaaaccagaagctggaacctattcagttaataatggcaatgatacttgtctgctggctaccatggggctgcagctgaacatcactcaggataaggttgcttcagttattaacatcaaccccaatacaactcactccacaggcagctgccgttctcacactgctctacttagactcaatagcagcaccattaagtatctagactttgtctttgctgtgaaaaatgaaaaccgattttatctgaaggaagtgaacatcagcatgtatttggttaatggctccgttttcagcattgcaaataacaatctcagctactgggatgcccccctgggaagttcttatatgtgcaacaaagagcagactgtttcagtgtctggagcatttcagataaatacctttgatctaagggttcagcctttcaatgtgacacaaggaaagtattctacagcccaagagtgttcgctggatgatgacaccattctaatcccaattatagttggtgctggtctttcaggcttgattatcgttatagtgattgcttacgtaattggcagaagaaaaagttatgctggatatcagactctgtaacactaatcaatacgtgatctctgttacaaaagaaaaaagcaagtacaagttccaacatgcaatactggtcaacttaaggtatatttagttgcagtccagctctttagaatgggtggtatgggggatttcaaacttaaacaaaaaactatcaactacaaattagttgcctgactttggtttttccaaccaaggaatttaaaactgttatttttacagcaaaagatgtgcaaaatcactggattataagttctattttactgtcttgaattagtatttcagtgttttcattttagacattcagactaaaaatacaccgtttagaaaaaacaatttttgaaaaagagattttttttccctgcaggtagttgagttggaacaacatgttctaccgtggatttgtacttgctccttttgctctttttttttgtgtgtgtgtgtgtgtgtgtgtgtgtgtgtgtgtgtgtgtgatttttgtttgcaggttaacttagctactttggcattgctgcatatttgacctttgagagatataatagtagatttgaacaggggctggtattattatgttcttagcaataaatgcttttctaatgccttttgaatacatttgtatttatgtggctgtaatgacaaaagatacaaaagctttttaaaatttagagtaggtattaatcttattgtttaatcttttttttaaaaaaactggatatttcaatcttttaaattgcaatatataagactattccaactgggcatttcaatccattttttaggtgctttagagataattgcttgccagtgccaattgagggcattagtactttgtgctcataaattggcctctgtatgcagtactaaaattaatgcagatttctctttagccttccaacatttcttgttgatagtgatgtattttattattttctttttcttaagaaatgccagtgtgtcctagaacctagataacgaagtgcacttacacttataaaataacttgcatctaggctgggcgtggcggctcacgcctgtaatcccagcactttgggaggccgaagtgggtggatcacttgaggccaggagtttgagaccagcctggccaacatggtgaaaccccatctctatcagaaatacaaaaaattagctgggcgtggtggtgggcgcctgtaatcccagttactcgggaggctgaggcaggagaatcacttgaacccgggaggcagaggttgcggtgagccaagagcgcaccattgcactccagcctgggcgacaaaaacgaaactccatctcaaaacaaaacaaaacaaaacaaacaaacaaacaaaacttgcatctaaccaaaaagtcttggttttatcttaatccattaaaaagttgttctttgtttccagcttgcattgattgctacaacatcactaatttggctttcacatttaaatggttctgtgctaatcaaaactttcgttgttattattcgttatggtagaatcatttttaattcacgtgctttgtgttcagttttgtggtctgagagatgtaccaattgtcaaattaccgtgtaccacctaatgtttataggagaaagcaaaatacatcagcttggtagttaacacatcaaatatttcttgctgcttctaggagaacttttttggtgtgtgttggaatggctgagcaaatattaaaattgttaatatgcagccatatatggaaggttcctgtggggttgttttttcgtgttttttttttttgtggtgggattatgtgcctcccattcactagaaaatgagaaaattgtctgggttccaaaatattgacattgaatggatcaatacacacacacagacatatatatatatatgcacacatatataggcagttgcatgctagcatgggtatttttataacaatataactgagttatattggaattataaatattttccgtcacttaaatttgttctttgtttagcctgaaaacctttatggctcaagatcagattcctgactaacccctctcttagagctacagcgagctgcattaccagcttaaaacacttcttagggattaaatatagatgtaatttttcaaaatcgtttttaatttaaactgtgttttagtgtaaaattgttaaccttgtaagatggataatgtgtataagaatgtaggccttaactatttcacatgagtcaaaacaaagcagctttaaaaaaataattggaagcacaagtgcatggcactgactgaatgctgttaatatttctaaaagtttctacattcagattatatgcctgattcatagtaaaatacctctaataaacactgttttatagaaaacctgacttcagtgaatatttttgtattttacatgggccagtttatatactgctatttacactattatttcctatagctacatgttctttgtacctgcccgggcggccgctcgaaa

SEQ ID NO: 414632 - DNA, 1891 bp, Homo sapiens
cccctagtcttagtgactcgcactgaagcgccgattcctggcttttgcaaggctgtggtcggtggtcatcagtgctcttgacccaggtccagcgagccttttccctggtgttgcagctgttgttgtaccgccgccgtcgccgccgtcgccgcctgctctgcggggtcatggtgtgcttccgcctcttcccggttccgggctcagggctcgttctggtctgcctagtcctgggagctgtgcggtcttatgcattggaacttaatttgacagattcagaaaatgccacttgcctttatgcaaaatggcagatgaatttcacagtacgctatgaaactacaaataaaacttataaaactgtaaccatttcagaccatggcactgtgacatataatggaagcatttgtggggatgatcagaatggtcccaaaatagcagtgcagttcggacctggcttttcctggattgcgaattttaccaaggcagcatctacttattcaattgacagcgtctcattttcctacaacactggtgataacacaacatttcctgatgctgaagataaaggaattcttactgttgatgaacttttggccatcagaattccattgaatgacctttttagatgcaatagtttatcaactttggaaaagaatgatgttgtccaacactactgggatgttcttgtacaagcttttgtccaaaatggcacagtgagcacaaatgagttcctgtgtgataaagacaaaacttcaacagtggcacccaccatacacaccactgtgccatctcctactacaacacctactccaaaggaaaaaccagaagctggaacctattcagttaataatggcaatgatacttgtctgctggctaccatggggctgcagctgaacatcactcaggataaggttgcttcagttattaacatcaaccccaatacaactcactccacaggcagctgccgttctcacactgctctacttagactcaatagcagcaccattaagtatctagactttgtctttgctgtgaaaaatgaaaaccgattttatctgaaggaagtgaacatcagcatgtatttggttaatggctccgttttcagcattgcaaataacaatctcagctactgggatgcccccctgggaagttcttatatgtgcaacaaagagcagactgtttcagtgtctggagcatttcagataaatacctttgatctaagggttcagcctttcaatgtgacacaaggaaagtattctacagctcaagactgcagtgcagatgacgacaacttccttgtgcccatagcggtgggagctgccttggcaggagtacttattctagtgttgctggcttattttattggtctcaagcaccatcatgctggatatgagcaattttagaatctgcaacctgattgattatataaaaatacatgcaaataacaagattttcttacctctcagttgttgaaacactttgcttcttaaaattgatatgttgaaactttaattcttttatcaatcccagcattttgagatcagtctttattaataaaacctgttctctttaatcagcttaaaatccaaagtgtcatatttactggtcctggagacaaacttgttcaaaagaacatcaacgtgcaatgttttaaggtctatcttaagaagccctggccaaattttgatcctaaccttgaagtatgccttgaacttattaacatggccattataagaataaaatatgtagttgtgtcttaatggaattaataaatgtcatttcactaaaaagaaaaagaacctaaacagtattttatagacatatgttagaaaagtcctagaaatgcgcccaatttccttccattgtactttcctacatggcatgaagttagccc

SEQ ID NO: 414633 - DNA, 1847 bp, Homo sapiens
cccctagtcttagtgactcgcactgaagcgccgattcctggcttttgcaaggctgtggtcggtggtcatcagtgctcttgacccaggtccagcgagccttttccctggtgttgcagctgttgttgtaccgccgccgtcgccgccgtcgccgcctgctctgcggggtcatggtgtgcttccgcctcttcccggttccgggctcagggctcgttctggtctgcctagtcctgggagctgtgcggtcttatgcattggaacttaatttgacagattcagaaaatgccacttgcctttatgcaaaatggcagatgaatttcacagtacgctatgaaactacaaataaaacttataaaactgtaaccatttcagaccatggcactgtgacatataatggaagcatttgtggggatgatcagaatggtcccaaaatagcagtgcagttcggacctggcttttcctggattgcgaattttaccaaggcagcatctacttattcaattgacagcgtctcattttcctacaacactggtgataacacaacatttcctgatgctgaagataaaggaattcttactgttgatgaacttttggccatcagaattccattgaatgacctttttagatgcaatagtttatcaactttggaaaagaatgatgttgtccaacactactgggatgttcttgtacaagcttttgtccaaaatggcacagtgagcacaaatgagttcctgtgtgataaagacaaaacttcaacagtggcacccaccatacacaccactgtgccatctcctactacaacacctactccaaaggaaaaaccagaagctggaacctattcagttaataatggcaatgatacttgtctgctggctaccatggggctgcagctgaacatcactcaggataaggttgcttcagttattaacatcaaccccaatacaactcactccacaggcagctgccgttctcacactgctctacttagactcaatagcagcaccattaagtatctagactttgtctttgctgtgaaaaatgaaaaccgattttatctgaaggaagtgaacatcagcatgtatttggttaatggctccgttttcagcattgcaaataacaatctcagctactgggatgcccccctgggaagttcttatatgtgcaacaaagagcagactgtttcagtgtctggagcatttcagataaatacctttgatctaagggttcagcctttcaatgtgacacaaggaaagtattctacagctcaagactgcagtgcagatgacgacaacttccttgtgcccatagcggtgggagctgccttggcaggagtacttattctagtgttgctggcttattttattggtctcaagcaccatcatgctggatatgagcaattttagaatctgcaacctgattgattatataaaaatacatgcaaataacaagattttcttacctctcagttgttgaaacactttgcttcttaaaattgatatgttgaaactttaattcttttatcaatcccagcattttgagatcagtctttattaataaaacctgttctctttaatcagcttaaaatccaaagtgtcatatttactggtcctggagacaaacttgttcaaaagaacatcaacgtgcaatgttttaaggtctatcttaagaagccctggccaaattttgatcctaaccttgaagtatgccttgaacttattaacatggccattataagaataaaatatgtagttgtgtcttaatggaattaataaatgtcatttcactaaacacaacacacacaccaaacacacacacaacacacaaaccacaacagcaacaaccaaacaaaa

SEQ ID NO: 414634 - DNA, 2786 bp, Homo sapiens
cccctagtcttagtgactcgcactgaagcgccgattcctggcttttgcaaggctgtggtcggtggtcatcagtgctcttgacccaggtccagcgagccttttccctggtgttgcagctgttgttgtaccgccgccgtcgccgccgtcgccgcctgctctgcggggtcatggtgtgcttccgcctcttcccggttccgggctcagggctcgttctggtctgcctagtcctgggagctgtgcggtcttatgcattggaacttaatttgacagattcagaaaatgccacttgcctttatgcaaaatggcagatgaatttcacagtacgctatgaaactacaaataaaacttataaaactgtaaccatttcagaccatggcactgtgacatataatggaagcatttgtggggatgatcagaatggtcccaaaatagcagtgcagttcggacctggcttttcctggattgcgaattttaccaaggcagcatctacttattcaattgacagcgtctcattttcctacaacactggtgataacacaacatttcctgatgctgaagataaaggaattcttactgttgatgaacttttggccatcagaattccattgaatgacctttttagatgcaatagtttatcaactttggaaaagaatgatgttgtccaacactactgggatgttcttgtacaagcttttgtccaaaatggcacagtgagcacaaatgagttcctgtgtgataaagacaaaacttcaacagtggcacccaccatacacaccactgtgccatctcctactacaacacctactccaaaggaaaaaccagaagctggaacctattcagttaataatggcaatgatacttgtctgctggctaccatggggctgcagctgaacatcactcaggataaggttgcttcagttattaacatcaaccccaatacaactcactccacaggcagctgccgttctcacactgctctacttagactcaatagcagcaccattaagtatctagactttgtctttgctgtgaaaaatgaaaaccgattttatctgaaggaagtgaacatcagcatgtatttggttaatggctccgttttcagcattgcaaataacaatctcagctactgggatgcccccctgggaagttcttatatgtgcaacaaagagcagactgtttcagtgtctggagcatttcagataaatacctttgatctaagggttcagcctttcaatgtgacacaaggaaagtattctacagcccaagagtgttcgctggatgatgacaccattctaatcccaattatagttggtgctggtctttcaggcttgattatcgttatagtgattgcttacgtaattggcagaagaaaaagttatgctggatatcagactctgtaacactaatcaatacgtgatctctgttacaaaagaaaaaagcaagtacaagttccaacatgcaatactggtcaacttaaggtatatttagttgcagtccagctctttagaatgggtggtatgggggatttcaaacttaaacaaaaaactatcaactacaaattagttgcctgactttggtttttccaaccaaggaatttaaaactgttatttttacagcaaaagatgtgcaaaatcactggattataagttctattttactgtcttgaattagtatttcagtgttttcattttagacattcagactaaaaatacaccgtttagaaaaaacaatttttgaaaaagagattttttttccctgcaggtagttgagttggaacaacatgttctaccgtggatttgtacttgctccttttgctctttttttttgtgtgtgtgtgtgtgtgtgtgtgtgtgtgtgtgtgtgtgtgatttttgtttgcaggttaacttagctactttggcattgctgcatatttgacctttgagagatataatagtagatttgaacaggggctggtattattatgttcttagcaataaatgcttttctaatgccttttgaatacatttgtatttatgtggctgtaatgacaaaagatacaaaagctttttaaaatttagagtaggtattaatcttattgtttaatcttttttttaaaaaaactggatatttcaatcttttaaattgcaatatataagactattccaactgggcatttcaatccattttttaggtgctttagagataattgcttgccagtgccaattgagggcattagtactttgtgctcataaattggcctctgtatgcagtactaaaattaatgcagatttctctttagccttccaacatttcttgttgatagtgatgtattttattattttctttttcttaagaaatgccagtgtgtcctagaacctagataacgaagtgcacttacacttataaaataacttgcatctaggctgggattgcaggcgtgagccactgctcctggtctatctatttatttctcttttcccatgtactcttcctggaaaggtttgtagcactcgggatccctcggatccaggatgctcaacctatgcgtacattttcactgatagtggaaacagtttctaaagtggcatttgttaccttgccccaagcttaatgtagtgttccatctcactcgcagcataccagtccagtccctcccagttcccgcggggaacccacgcactgacttgcgctctcgatcgcaccacccgacgctcctgggccatcagcggtctctgggagacgccaacggggggccgcccggacatccccggtccgagtgacaactgaggacttccgaccagata

SEQ ID NO: 414635 - DNA, 1775 bp, Homo sapiens
  misc_feature (1772)..(1772): n is a, c, g, or t
cccctagtcttagtgactcgcactgaagcgccgattcctggcttttgcaaggctgtggtcggtggtcatcagtgctcttgacccaggtccagcgagccttttccctggtgttgcagctgttgttgtaccgccgccgtcgccgccgtcgccgcctgctctgcggggtcatggtgtgcttccgcctcttcccggttccgggctcagggctcgttctggtctgcctagtcctgggagctgtgcggtcttatgcattggaacttaatttgacagattcagaaaatgccacttgcctttatgcaaaatggcagatgaatttcacagtacgctatgaaactacaaataaaacttataaaactgtaaccatttcagaccatggcactgtgacatataatggaagcatttgtggggatgatcagaatggtcccaaaatagcagtgcagttcggacctggcttttcctggattgcgaattttaccaaggcagcatctacttattcaattgacagcgtctcattttcctacaacactggtgataacacaacatttcctgatgctgaagataaaggaattcttactgttgatgaacttttggccatcagaattccattgaatgacctttttagatgcaatagtttatcaactttggaaaagaatgatgttgtccaacactactgggatgttcttgtacaagcttttgtccaaaatggcacagtgagcacaaatgagttcctgtgtgataaagacaaaacttcaacagtggcacccaccatacacaccactgtgccatctcctactacaacacctactccaaaggaaaaaccagaagctggaacctattcagttaataatggcaatgatacttgtctgctggctaccatggggctgcagctgaacatcactcaggataaggttgcttcagttattaacatcaaccccaatacaactcactccacaggcagctgccgttctcacactgctctacttagactcaatagcagcaccattaagtatctagactttgtctttgctgtgaaaaatgaaaaccgattttatctgaaggaagtgaacatcagcatgtatttggttaatggctccgttttcagcattgcaaataacaatctcagctactgggatgcccccctgggaagttcttatatgtgcaacaaagagcagactgtttcagtgtctggagcatttcagataaatacctttgatctaagggttcagcctttcaatgtgacacaaggaaagtattctacagcccaagagtgttcgctggatgatgacaccattctaatcccaattatagttggtgctggtctttcaggcttgattatcgttatagtgattgcttacgtaattggcagaagaaaaagttatgctggatatcagactctgtaacactaatcaatacgtgatctctgttacaaaagaaaaaagcaagtacaagttccaacatgcaatactggtcaacttaaggtatatttagttgcagtccagctctttagaatgggtggtatgggggatttcaaacttaaacaaaaaactatcaactacaaattagttgcctgactttggtttttccaaccaaggaatttaaaactgttatttttacagcaaaagatgtgcaaaatcactggattataagttctattttactgtcttgaattagtatttcagtgttttcattttagacattcagactaaaaatacaccgtttagaactttttgacggatttgtcctgctccttttgctctttttttgtgtgtggnggg

SEQ ID NO: 414636 - DNA, 3439 bp, Homo sapiens
attcatgagaccgttgagcatattatcacgggaaagaagatgtggcacactctgggagttcttgtacagctttgtccaaatggcacaggggcacaaatagttcctgtgtgataaagacaaaacttcaacagtggcacccaccatacacaccactgtgccatctcctactacaacacctactccaaaggaaaaaccagaagctggaacctattcagttaataatggcaatgatacttgtctgctggctaccatggggctgcagctgaacatcactcaggataaggttgcttcagttattaacatcaaccccaatacaactcactccacaggcagctgccgttctcacactgctctacttagactcaatagcagcaccattaagtatctagactttgtctttgctgtgaaaaatgaaaaccgattttatctgaaggaagtgaacatcagcatgtatttggttaatggctccgttttcagcattgcaaataacaatctcagctactgggatgcccccctgggaagttcttatatgtgcaacaaagagcagactgtttcagtgtctggagcatttcagataaatacctttgatctaagggttcagcctttcaatgtgacacaaggaaagtattctacagcccaagagtgttcgctggatgatgacaccattctaatcccaattatagttggtgctggtctttcaggcttgattatcgttatagtgattgcttacgtaattggcagaagaaaaagttatgctggatatcagactctgtaacactaatcaatacgtgatctctgttacaaaagaaaaaagcaagtacaagttccaacatgcaatactggtcaacttaaggtatatttagttgcagtccagctctttagaatgggtggtatgggggatttcaaacttaaacaaaaaactatcaactacaaattagttgcctgactttggtttttccaaccaaggaatttaaaactgttatttttacagcaaaagatgtgcaaaatcactggattataagttctattttactgtcttgaattagtatttcagtgttttcattttagacattcagactaaaaatacaccgtttagaaaaaacaatttttgaaaaagagattttttttccctgcaggtagttgagttggaacaacatgttctaccgtggatttgtacttgctccttttgctctttttttttgtgtgtgtgtgtgtgtgtgtgtgtgtgtgtgtgtgtgtgtgatttttgtttgcaggttaacttagctactttggcattgctgcatatttgacctttgagagatataatagtagatttgaacaggggctggtattattatgttcttagcaataaatgcttttctaatgccttttgaatacatttgtatttatgtggctgtaatgacaaaagatacaaaagctttttaaaatttagagtaggtattaatcttattgtttaatcttttttttaaaaaaactggatatttcaatcttttaaattgcaatatataagactattccaactgggcatttcaatccattttttaggtgctttagagataattgcttgccagtgccaattgagggcattagtactttgtgctcataaattggcctctgtatgcagtactaaaattaatgcagatttctctttagccttccaacatttcttgttgatagtgatgtattttattattttctttttcttaagaaatgccagtgtgtcctagaacctagataacgaagtgcacttacacttataaaataacttgcatctaggctgggcgtggcggctcacgcctgtaatcccagcactttgggaggccgaagtgggtggatcacttgaggccaggagtttgagaccagcctggccaacatggtgaaaccccatctctatcagaaatacaaaaaattagctgggcgtggtggtgggcgcctgtaatcccagttactcgggaggctgaggcaggagaatcacttgaacccgggaggcagaggttgcggtgagccaagagcgcaccattgcactccagcctgggcgacaaaaacgaaactccatctcaaaacaaaacaaaacaaaacaaacaaacaaacaaaacttgcatctaaccaaaaagtcttggttttatcttaatccattaaaaagttgttctttgtttccagcttgcattgattgctacaacatcactaatttggctttcacatttaaatggttctgtgctaatcaaaactttcgttgttattattcgttatggtagaatcatttttaattcacgtgctttgtgttcagttttgtggtctgagagatgtaccaattgtcaaattaccgtgtaccacctaatgtttataggagaaagcaaaatacatcagcttggtagttaacacatcaaatatttcttgctgcttctaggagaacttttttggtgtgtgttggaatggctgagcaaatattaaaattgttaatatgcagccatatatggaaggttcctgtggggttgttttttcgtgttttttttttttgtggtgggattatgtgcctcccattcactagaaaatgagaaaattgtctgggttccaaaatattgacattgaatggatcaatacacacacacagacatatatatatatatgcacacatatataggcagttgcatgctagcatgggtatttttataacaatataactgagttatattggaattataaatattttccgtcacttaaatttgttctttgtttagcctgaaaacctttatggctcaagatcagattcctgactaacccctctcttagagctacagcgagctgcattaccagcttaaaacacttcttagggattaaatatagatgtaatttttcaaaatcgtttttaatttaaactgtgttttagtgtaaaattgttaaccttgtaagatggataatgtgtataagaatgtaggccttaactatttcacatgagtcaaaacaaagcagctttaaaaaaataattggaagcacaagtgcatggcactgactgaatgctgttaatatttctaaaagtttctacattcagattatatgcctgattcatagtaaaatacctctaataaacactgttttatagaaaacctgacttcagtgaatatttttgtattttacatgggccagtttatatactgctatttacactattatttcctatagctacatgttctttgtaccttttgtagttttatttgtattactagattcataccttgatggtaacgctctatctggttttgggtgtttttcatgttttagcatttgtataaagaaactggtccatgtaaatactttccatgttttttcttcaaatgtttaaaccactagttgatgtatggtatctttagatatttgcctgtctgtttgctcaaaattgcttctaaaacaataaagattcttttatttcttaaggcaa

SEQ ID NO: 414637 - DNA, 2865 bp, Homo sapiens
catggctgactctatgaggaaccccgcccttcgctgggtaatgtgacacagggaaagtattcccaagagtgttcgctggatgatgacaccattctaatcccaattatagttggtgctggtctttcaggcttgattatcgttatagtgattgcttacgtaattggcagaagaaaaagttatgctggatatcagactctgtaacactaatcaatacgtgatctctgttacaaaagaaaaaagcaagtacaagttccaacatgcaatactggtcaacttaaggtatatttagttgcagtccagctctttagaatgggtggtatgggggatttcaaacttaaacaaaaaactatcaactacaaattagttgcctgactttggtttttccaaccaaggaatttaaaactgttatttttacagcaaaagatgtgcaaaatcactggattataagttctattttactgtcttgaattagtatttcagtgttttcattttagacattcagactaaaaatacaccgtttagaaaaaacaatttttgaaaaagagattttttttccctgcaggtagttgagttggaacaacatgttctaccgtggatttgtacttgctccttttgctctttttttttgtgtgtgtgtgtgtgtgtgtgtgtgtgtgtgtgtgtgtgtgatttttgtttgcaggttaacttagctactttggcattgctgcatatttgacctttgagagatataatagtagatttgaacaggggctggtattattatgttcttagcaataaatgcttttctaatgccttttgaatacatttgtatttatgtggctgtaatgacaaaagatacaaaagctttttaaaatttagagtaggtattaatcttattgtttaatcttttttttaaaaaaactggatatttcaatcttttaaattgcaatatataagactattccaactgggcatttcaatccattttttaggtgctttagagataattgcttgccagtgccaattgagggcattagtactttgtgctcataaattggcctctgtatgcagtactaaaattaatgcagatttctctttagccttccaacatttcttgttgatagtgatgtattttattattttctttttcttaagaaatgccagtgtgtcctagaacctagataacgaagtgcacttacacttataaaataacttgcatctaggctgggcgtggcggctcacgcctgtaatcccagcactttgggaggccgaagtgggtggatcacttgaggccaggagtttgagaccagcctggccaacatggtgaaaccccatctctatcagaaatacaaaaaattagctgggcgtggtggtgggcgcctgtaatcccagttactcgggaggctgaggcaggagaatcacttgaacccgggaggcagaggttgcggtgagccaagagcgcaccattgcactccagcctgggcgacaaaaacgaaactccatctcaaaacaaaacaaaacaaaacaaacaaacaaacaaaacttgcatctaaccaaaaagtcttggttttatcttaatccattaaaaagttgttctttgtttccagcttgcattgattgctacaacatcactaatttggctttcacatttaaatggttctgtgctaatcaaaactttcgttgttattattcgttatggtagaatcatttttaattcacgtgctttgtgttcagttttgtggtctgagagatgtaccaattgtcaaattaccgtgtaccacctaatgtttataggagaaagcaaaatacatcagcttggtagttaacacatcaaatatttcttgctgcttctaggagaacttttttggtgtgtgttggaatggctgagcaaatattaaaattgttaatatgcagccatatatggaaggttcctgtggggttgttttttcgtgttttttttttttgtggtgggattatgtgcctcccattcactagaaaatgagaaaattgtctgggttccaaaatattgacattgaatggatcaatacacacacacagacatatatatatatatgcacacatatataggcagttgcatgctagcatgggtatttttataacaatataactgagttatattggaattataaatattttccgtcacttaaatttgttctttgtttagcctgaaaacctttatggctcaagatcagattcctgactaacccctctcttagagctacagcgagctgcattaccagcttaaaacacttcttagggattaaatatagatgtaatttttcaaaatcgtttttaatttaaactgtgttttagtgtaaaattgttaaccttgtaagatggataatgtgtataagaatgtaggccttaactatttcacatgagtcaaaacaaagcagctttaaaaaaataattggaagcacaagtgcatggcactgactgaatgctgttaatatttctaaaagtttctacattcagattatatgcctgattcatagtaaaatacctctaataaacactgttttatagaaaacctgacttcagtgaatatttttgtattttacatgggccagtttatatactgctatttacactattatttcctatagctacatgttctttgtaccttttgtagttttatttgtattactagattcataccttgatggtaacgctctatctggttttgggtgtttttcatgttttagcatttgtataaagaaactggtccatgtaaatactttccatgttttttcttcaaatgtttaaaccactagttgatgtatggtatctttagatatttgcctgtctgtttgctcaaaattgcttctaaaacaataaagattcttttatttcttaaggcaa

SEQ ID NO: 414638 - DNA, 2386 bp, Homo sapiens
attctagaaaagacacatttacctacagtgaaaactactcagtgtttgcctagggattctgggggaaggcgagcactgagagaaaggttaagggcctcaggttaactttgggggtaacagatatgtccaataccactgatagggtgatagtttcatgtgtgtgtgtgtgtgtgtgtgtgtgtgtgtgtgatttttgtttgcaggttaacttagctactttggcattgctgcatatttgacctttgagagatataatagtagatttgaacaggggctggtattattatgttcttagcaataaatgcttttctaatgccttttgaatacatttgtatttatgtggctgtaatgacaaaagatacaaaagctttttaaaatttagagtaggtattaatcttattgtttaatcttttttttaaaaaaactggatatttcaatcttttaaattgcaatatataagactattccaactgggcatttcaatccattttttaggtgctttagagataattgcttgccagtgccaattgagggcattagtactttgtgctcataaattggcctctgtatgcagtactaaaattaatgcagatttctctttagccttccaacatttcttgttgatagtgatgtattttattattttctttttcttaagaaatgccagtgtgtcctagaacctagataacgaagtgcacttacacttataaaataacttgcatctaggctgggcgtggcggctcacgcctgtaatcccagcactttgggaggccgaagtgggtggatcacttgaggccaggagtttgagaccagcctggccaacatggtgaaaccccatctctatcagaaatacaaaaaattagctgggcgtggtggtgggcgcctgtaatcccagttactcgggaggctgaggcaggagaatcacttgaacccgggaggcagaggttgcggtgagccaagagcgcaccattgcactccagcctgggcgacaaaaacgaaactccatctcaaaacaaaacaaaacaaaacaaacaaacaaacaaaacttgcatctaaccaaaaagtcttggttttatcttaatccattaaaaagttgttctttgtttccagcttgcattgattgctacaacatcactaatttggctttcacatttaaatggttctgtgctaatcaaaactttcgttgttattattcgttatggtagaatcatttttaattcacgtgctttgtgttcagttttgtggtctgagagatgtaccaattgtcaaattaccgtgtaccacctaatgtttataggagaaagcaaaatacatcagcttggtagttaacacatcaaatatttcttgctgcttctaggagaacttttttggtgtgtgttggaatggctgagcaaatattaaaattgttaatatgcagccatatatggaaggttcctgtggggttgttttttcgtgttttttttttttgtggtgggattatgtgcctcccattcactagaaaatgagaaaattgtctgggttccaaaatattgacattgaatggatcaatacacacacacagacatatatatatatatgcacacatatataggcagttgcatgctagcatgggtatttttataacaatataactgagttatattggaattataaatattttccgtcacttaaatttgttctttgtttagcctgaaaacctttatggctcaagatcagattcctgactaacccctctcttagagctacagcgagctgcattaccagcttaaaacacttcttagggattaaatatagatgtaatttttcaaaatcgtttttaatttaaactgtgttttagtgtaaaattgttaaccttgtaagatggataatgtgtataagaatgtaggccttaactatttcacatgagtcaaaacaaagcagctttaaaaaaataattggaagcacaagtgcatggcactgactgaatgctgttaatatttctaaaagtttctacattcagattatatgcctgattcatagtaaaatacctctaataaacactgttttatagaaaacctgacttcagtgaatatttttgtattttacatgggccagtttatatactgctatttacactattatttcctatagctacatgttctttgtaccttttgtagttttatttgtattactagattcataccttgatggtaacgctctatctggttttgggtgtttttcatgttttagcatttgtataaagaaactggtccatgtaaatactttccatgttttttcttcaaatgtttaaaccactagttgatgtatggtatctttagatatttgcctgtctgtttgctcaaaattgcttctaaaacaataaagattcttttatttcttaaggcaa

SEQ ID NO: 414639 - DNA, 2295 bp, Homo sapiens
caatatgattaattagtaacttactagaaaccaggtcatcaagcggaatctggtcccagaaagatgtgtgtgtgtgtgtgtgtgtgtgtgtgtgtgtgatttttgtttgcaggttaacttagctactttggcattgctgcatatttgacctttgagagatataatagtagatttgaacaggggctggtattattatgttcttagcaataaatgcttttctaatgccttttgaatacatttgtatttatgtggctgtaatgacaaaagatacaaaagctttttaaaatttagagtaggtattaatcttattgtttaatcttttttttaaaaaaactggatatttcaatcttttaaattgcaatatataagactattccaactgggcatttcaatccattttttaggtgctttagagataattgcttgccagtgccaattgagggcattagtactttgtgctcataaattggcctctgtatgcagtactaaaattaatgcagatttctctttagccttccaacatttcttgttgatagtgatgtattttattattttctttttcttaagaaatgccagtgtgtcctagaacctagataacgaagtgcacttacacttataaaataacttgcatctaggctgggcgtggcggctcacgcctgtaatcccagcactttgggaggccgaagtgggtggatcacttgaggccaggagtttgagaccagcctggccaacatggtgaaaccccatctctatcagaaatacaaaaaattagctgggcgtggtggtgggcgcctgtaatcccagttactcgggaggctgaggcaggagaatcacttgaacccgggaggcagaggttgcggtgagccaagagcgcaccattgcactccagcctgggcgacaaaaacgaaactccatctcaaaacaaaacaaaacaaaacaaacaaacaaacaaaacttgcatctaaccaaaaagtcttggttttatcttaatccattaaaaagttgttctttgtttccagcttgcattgattgctacaacatcactaatttggctttcacatttaaatggttctgtgctaatcaaaactttcgttgttattattcgttatggtagaatcatttttaattcacgtgctttgtgttcagttttgtggtctgagagatgtaccaattgtcaaattaccgtgtaccacctaatgtttataggagaaagcaaaatacatcagcttggtagttaacacatcaaatatttcttgctgcttctaggagaacttttttggtgtgtgttggaatggctgagcaaatattaaaattgttaatatgcagccatatatggaaggttcctgtggggttgttttttcgtgttttttttttttgtggtgggattatgtgcctcccattcactagaaaatgagaaaattgtctgggttccaaaatattgacattgaatggatcaatacacacacacagacatatatatatatatgcacacatatataggcagttgcatgctagcatgggtatttttataacaatataactgagttatattggaattataaatattttccgtcacttaaatttgttctttgtttagcctgaaaacctttatggctcaagatcagattcctgactaacccctctcttagagctacagcgagctgcattaccagcttaaaacacttcttagggattaaatatagatgtaatttttcaaaatcgtttttaatttaaactgtgttttagtgtaaaattgttaaccttgtaagatggataatgtgtataagaatgtaggccttaactatttcacatgagtcaaaacaaagcagctttaaaaaaataattggaagcacaagtgcatggcactgactgaatgctgttaatatttctaaaagtttctacattcagattatatgcctgattcatagtaaaatacctctaataaacactgttttatagaaaacctgacttcagtgaatatttttgtattttacatgggccagtttatatactgctatttacactattatttcctatagctacatgttctttgtaccttttgtagttttatttgtattactagattcataccttgatggtaacgctctatctggttttgggtgtttttcatgttttagcatttgtataaagaaactggtccatgtaaatactttccatgttttttcttcaaatgtttaaaccactagttgatgtatggtatctttagatatttgcctgtctgtttgctcaaaattgcttctaaaacaataaagattcttttatttcttaaggcaa

SEQ ID NO: 414640 - DNA, 2293 bp, Homo sapiens
tcccgttacctgggcatttttgatagcagaggtcaccggggatagtggtgtgtgtgtgtgtgtgtgtgtgtgtgtgtgtgtgtgtgtgtgtgtgtgatttttgtttgcaggttaacttagctactttggcattgctgcatatttgacctttgagagatataatagtagatttgaacaggggctggtattattatgttcttagcaataaatgcttttctaatgccttttgaatacatttgtatttatgtggctgtaatgacaaaagatacaaaagctttttaaaatttagagtaggtattaatcttattgtttaatcttttttttaaaaaaactggatatttcaatcttttaaattgcaatatataagactattccaactgggcatttcaatccattttttaggtgctttagagataattgcttgccagtgccaattgagggcattagtactttgtgctcataaattggcctctgtatgcagtactaaaattaatgcagatttctctttagccttccaacatttcttgttgatagtgatgtattttattattttctttttcttaagaaatgccagtgtgtcctagaacctagataacgaagtgcacttacacttataaaataacttgcatctaggctgggcgtggcggctcacgcctgtaatcccagcactttgggaggccgaagtgggtggatcacttgaggccaggagtttgagaccagcctggccaacatggtgaaaccccatctctatcagaaatacaaaaaattagctgggcgtggtggtgggcgcctgtaatcccagttactcgggaggctgaggcaggagaatcacttgaacccgggaggcagaggttgcggtgagccaagagcgcaccattgcactccagcctgggcgacaaaaacgaaactccatctcaaaacaaaacaaaacaaaacaaacaaacaaacaaaacttgcatctaaccaaaaagtcttggttttatcttaatccattaaaaagttgttctttgtttccagcttgcattgattgctacaacatcactaatttggctttcacatttaaatggttctgtgctaatcaaaactttcgttgttattattcgttatggtagaatcatttttaattcacgtgctttgtgttcagttttgtggtctgagagatgtaccaattgtcaaattaccgtgtaccacctaatgtttataggagaaagcaaaatacatcagcttggtagttaacacatcaaatatttcttgctgcttctaggagaacttttttggtgtgtgttggaatggctgagcaaatattaaaattgttaatatgcagccatatatggaaggttcctgtggggttgttttttcgtgttttttttttttgtggtgggattatgtgcctcccattcactagaaaatgagaaaattgtctgggttccaaaatattgacattgaatggatcaatacacacacacagacatatatatatatatgcacacatatataggcagttgcatgctagcatgggtatttttataacaatataactgagttatattggaattataaatattttccgtcacttaaatttgttctttgtttagcctgaaaacctttatggctcaagatcagattcctgactaacccctctcttagagctacagcgagctgcattaccagcttaaaacacttcttagggattaaatatagatgtaatttttcaaaatcgtttttaatttaaactgtgttttagtgtaaaattgttaaccttgtaagatggataatgtgtataagaatgtaggccttaactatttcacatgagtcaaaacaaagcagctttaaaaaaataattggaagcacaagtgcatggcactgactgaatgctgttaatatttctaaaagtttctacattcagattatatgcctgattcatagtaaaatacctctaataaacactgttttatagaaaacctgacttcagtgaatatttttgtattttacatgggccagtttatatactgctatttacactattatttcctatagctacatgttctttgtaccttttgtagttttatttgtattactagattcataccttgatggtaacgctctatctggttttgggtgtttttcatgttttagcatttgtataaagaaactggtccatgtaaatactttccatgttttttcttcaaatgtttaaaccactagttgatgtatggtatctttagatatttgcctgtctgtttgctcaaaattgcttctaaaacaataaagattcttttatttcttaaggcaa

SEQ ID NO: 414641 - DNA, 1724 bp, Homo sapiens
agtggaggtcattctgtgaatgaggcagtttctacagaagggggactctgtgactagtgagtcatacccaaagatgaatgcaatgatggaatgatctcattttaaaaagagcaactgtccaaagctattagctaagtattagacagttattagaaaactcaaactggaatcagtctctgagccttgattaaacttctggtggctgggccgggtggctcacacctgtaatcggagcactcgggaggctgaggcaggagaatcacttgaacccgggaggcagaggttgcggtgagccaagagcgcaccattgcactccagcctgggcgacaaaaacgaaactccatctcaaaacaaaacaaaacaaaacaaacaaacaaacaaaacttgcatctaaccaaaaagtcttggttttatcttaatccattaaaaagttgttctttgtttccagcttgcattgattgctacaacatcactaatttggctttcacatttaaatggttctgtgctaatcaaaactttcgttgttattattcgttatggtagaatcatttttaattcacgtgctttgtgttcagttttgtggtctgagagatgtaccaattgtcaaattaccgtgtaccacctaatgtttataggagaaagcaaaatacatcagcttggtagttaacacatcaaatatttcttgctgcttctaggagaacttttttggtgtgtgttggaatggctgagcaaatattaaaattgttaatatgcagccatatatggaaggttcctgtggggttgttttttcgtgttttttttttttgtggtgggattatgtgcctcccattcactagaaaatgagaaaattgtctgggttccaaaatattgacattgaatggatcaatacacacacacagacatatatatatatatgcacacatatataggcagttgcatgctagcatgggtatttttataacaatataactgagttatattggaattataaatattttccgtcacttaaatttgttctttgtttagcctgaaaacctttatggctcaagatcagattcctgactaacccctctcttagagctacagcgagctgcattaccagcttaaaacacttcttagggattaaatatagatgtaatttttcaaaatcgtttttaatttaaactgtgttttagtgtaaaattgttaaccttgtaagatggataatgtgtataagaatgtaggccttaactatttcacatgagtcaaaacaaagcagctttaaaaaaataattggaagcacaagtgcatggcactgactgaatgctgttaatatttctaaaagtttctacattcagattatatgcctgattcatagtaaaatacctctaataaacactgttttatagaaaacctgacttcagtgaatatttttgtattttacatgggccagtttatatactgctatttacactattatttcctatagctacatgttctttgtaccttttgtagttttatttgtattactagattcataccttgatggtaacgctctatctggttttgggtgtttttcatgttttagcatttgtataaagaaactggtccatgtaaatactttccatgttttttcttcaaatgtttaaaccactagttgatgtatggtatctttagatatttgcctgtctgtttgctcaaaattgcttctaaaacaataaagattcttttatttcttaaggcaa

SEQ ID NO: 414642 - DNA, 1467 bp, Homo sapiens
gctcggattacaggcatgagccaccgctcctgctgaaacttttcttttttttcagacagagcctgggcgacaaaaacgaaactccatctcaaaacaaaacaaaacaaaacaaacaaacaaacaaaacttgcatctaaccaaaaagtcttggttttatcttaatccattaaaaagttgttctttgtttccagcttgcattgattgctacaacatcactaatttggctttcacatttaaatggttctgtgctaatcaaaactttcgttgttattattcgttatggtagaatcatttttaattcacgtgctttgtgttcagttttgtggtctgagagatgtaccaattgtcaaattaccgtgtaccacctaatgtttataggagaaagcaaaatacatcagcttggtagttaacacatcaaatatttcttgctgcttctaggagaacttttttggtgtgtgttggaatggctgagcaaatattaaaattgttaatatgcagccatatatggaaggttcctgtggggttgttttttcgtgttttttttttttgtggtgggattatgtgcctcccattcactagaaaatgagaaaattgtctgggttccaaaatattgacattgaatggatcaatacacacacacagacatatatatatatatgcacacatatataggcagttgcatgctagcatgggtatttttataacaatataactgagttatattggaattataaatattttccgtcacttaaatttgttctttgtttagcctgaaaacctttatggctcaagatcagattcctgactaacccctctcttagagctacagcgagctgcattaccagcttaaaacacttcttagggattaaatatagatgtaatttttcaaaatcgtttttaatttaaactgtgttttagtgtaaaattgttaaccttgtaagatggataatgtgtataagaatgtaggccttaactatttcacatgagtcaaaacaaagcagctttaaaaaaataattggaagcacaagtgcatggcactgactgaatgctgttaatatttctaaaagtttctacattcagattatatgcctgattcatagtaaaatacctctaataaacactgttttatagaaaacctgacttcagtgaatatttttgtattttacatgggccagtttatatactgctatttacactattatttcctatagctacatgttctttgtaccttttgtagttttatttgtattactagattcataccttgatggtaacgctctatctggttttgggtgtttttcatgttttagcatttgtataaagaaactggtccatgtaaatactttccatgttttttcttcaaatgtttaaaccactagttgatgtatggtatctttagatatttgcctgtctgtttgctcaaaattgcttctaaaacaataaagattcttttatttcttaaggcaa

SEQ ID NO: 414643 - DNA, 899 bp, Homo sapiens
  misc_feature (817)..(817): n is a, c, g, or t
  misc_feature (878)..(878): n is a, c, g, or t
  misc_feature (882)..(882): n is a, c, g, or t
cccctagtcttagtgactcgcactgaagcgccgattcctggcttttgcaaggctgtggtcggtggtcatcagtgctcttgacccaggtccagcgagccttttccctggtgttgcagctgttgttgtaccgccgccgtcgccgccgtcgccgcctgctctgcggggtcatggtgtgcttccgcctcttcccggttccgggctcagggctcgttctggtctgcctagtcctgggagctgtgcggtcttatgcattggaacttaatttgacagattcagaaaatgccacttgcctttatgcaaaatggcagatgaatttcacagtacgctatgaaactacaaataaaacttataaaactgtaaccatttcagaccatggcactgtgacatataatggaagcatttgtggggatgatcagaatggtcccaaaatagcagtgcagttcggacctggcttttcctggattgcgaattttaccaaggcagcatctacttattcaattgacagcgtctcattttcctacaacactggtgataacacaacatttcctgatgctgaagataaaggaattcttactgttgatgaacttttggccatcagaattccattgaatgacctttttagatgcaatagtttatcaactttggaaaagaatgatgttgtccaacactactgggatgttcttgtacaagcttttgtccaaaatggcacagtgagcacaaatgagttcctgtgtgataaagacaaaacttcaacagtggcacccaccatacacaccactgtgccatctcctactacaaacaaccctaactcccaaangggaaaaaaacccaagaaagcctggggaaaccctaattcaaagtttaaataaaatgggggnaaantggataaacctttgtcc

SEQ ID NO: 414644 - DNA, 2788 bp, Homo sapiens
acacaggaaatgggaaatagaaatagcagttaacttctttcctgcaagtgtatccatctgtagcattccttcctcctctccagtctcagagtaggttttcttttcctggttaaactgaggcaaacagttatgtcatcaaggcccatttatatctcttttcccattactaagtgaccccagattgttatgtattgagttcttaatgtcttacgcttttggaattcaatctcttaacttgtaggagaacttgtaccattcagcatcttctgtcaattgctaatggctgtttccctcatcctatttaagttcttctaaccttaagctatcctttcttgtccctatgtcccccttctaattacctcccttttgtcctgccttaatcattctaaacttctcaaaatgagtattgtatttgttaccctgcccaagttcttgatgtcctaaccaatcacttcccattccctcttaaacctgcagcaattttactcatatctcccacccttcatattgctagaggcaatggacatgtttcaaagctttctactattatttgctgtctttccaccttaattgaaacgttccatccttagcttctctggcgccattttctatctgcccttttacatctttttcctactccattgtctatcccacaggtattggtgttcccaagggtttttgtctctgatcctctttttattctacttccccttactgagaaatgttcttgcccatgttttaactaccacttaggttcatatagccacttggttaggacatagtgattttttttttttttgagatgggttctcgatatgctgcccaggctggtcttgaactcctgggctcaaacagttctcccatctcagcttcccaagtagctaggactacaggcgtaagctaccatgctcaactaaggacacagatatcttaaactcacatatctaaaactgagcatctctctcttccacgtatcctttttaccacctgttccatataactacaaaaaactgaaatgcatatattcttcctcttttatagaatggcaccagcatctacataatcagtcaagtgtggaattggaaaccattctattatctcctcctcgtacaccccctacatccgtttggtcaattttgccttctaatttgatctccagtctgtgccttctgcttttcttctgcacttcattaatccagctcaggacaatattattggttacctggactctagtgataaagatatgtcctaccttactacctccatctgccataacttctgaaatgaaatcctgcttaatatcctgctgctgaatttttttttcatcaggataaggccagactacctaagagcatatagtacctttgtgacctgggtccctgcacactttttctgccttctatccagccaaaaataccttttgatccattgttctagctctgccaacctgcttgcgtttcccttgaagtgctatgtctttttactctccatatttttgtctgtgctatttcttatacctggaatgcccttcccccattacttgcatcattaattcctattcattcttaaaatctcagctcaagtgtcaccttttcaaagtgtgtcttatgtaataaggctgaacttgagtgtgcctctgaaatttttccatggcactttgtgttgcctactcctaccacaacacattttgaaattataaccactgatttttcttgtctgactctaacactagactgagcatcttgaggcaaacagttatgtcatcagggcccacttatatctcttatatctcttttcccattagtaaatgatcccagattgtaatgtattgagttcttatgtctgctttgtatagttgttcattcagtgagttaatacttaacagcaatatttgaagcattgtgcttcttcgacatcataacagtttgcctctgaaagctcacggcctgatcatcaaggcaaggctaattagatttgttcattatgttctgtttaagaaatctgggaactatgtgaccatgttatacatttttcatccaaaatgactgcatttttacttggtacttaaaagtgtattatttggttatttggaaaatcacttttgtggaacatctcatttgctgataatgaaatgccaatgacttgttaccttggtataaaaaaccaaaatatgcgtgttaggaagtgctgtcattttactcaaaatacacagatttgaaagtttgtcactgtttctgttctcaattgtcctttctccacatctagctcaagactgcagtgcagatgacgacaacttccttgtgcccatagcggtgggagctgccttggcaggagtacttattctagtgttgctggcttattttattggtctcaagcaccatcatgctggatatgagcaattttagaatctgcaacctgattgattatataaaaatacatgcaaataacaagattttcttacctctcagttgttgaaacactttgcttcttaaaattgatatgttgaaactttaattcttttatcaatcccagcattttgagatcagtctttattaataaaacctgttctctttaatcagcttaaaatccaaagtgtcatatttactggtcctggagacaaacttgttcaaaagaacatcaacgtgcaatgttttaaggtctatcttaagaagccctggccaaattttgatcctaaccttgaagtatgccttgaacttattaacatggccattataagaataaaatatgtagttgtgtcttaatggaattaataaatgtcatttcacta

SEQ ID NO: 414645 - DNA, 2583 bp, Homo sapiens
acacaggaaatgggaaatagaaatagcagttaacttctttcctgcaagtgtatccatctgtagcattccttcctcctctccagtctcagagtaggttttcttttcctggttaaactgaggcaaacagttatgtcatcaaggcccatttatatctcttttcccattactaagtgaccccagattgttatgtattgagttcttaatgtcttacgcttttggaattcaatctcttaacttgtaggagaacttgtaccattcagcatcttctgtcaattgctaatggctgtttccctcatcctatttaagttcttctaaccttaagctatcctttcttgtccctatgtcccccttctaattacctcccttttgtcctgccttaatcattctaaacttctcaaaatgagtattgtatttgttaccctgcccaagttcttgatgtcctaaccaatcacttcccattccctcttaaacctgcagcaattttactcatatctcccacccttcatattgctagaggcaatggacatgtttcaaagctttctactattatttgctgtctttccaccttaattgaaacgttccatccttagcttctctggcgccattttctatctgcccttttacatctttttcctactccattgtctatcccacaggtattggtgttcccaagggtttttgtctctgatcctctttttattctacttccccttactgagaaatgttcttgcccatgttttaactaccacttaggttcatatagccacttggttaggacatagtgattttttttttttttgagatgggttctcgatatgctgcccaggctggtcttgaactcctgggctcaaacagttctcccatctcagcttcccaagtagctaggactacaggcgtaagctaccatgctcaactaaggacacagatatcttaaactcacatatctaaaactgagcatctctctcttccacgtatcctttttaccacctgttccatataactacaaaaaactgaaatgcatatattcttcctcttttatagaatggcaccagcatctacataatcagtcaagtgtggaattggaaaccattctattatctcctcctcgtacaccccctacatccgtttggtcaattttgccttctaatttgatctccagtctgtgccttctgcttttcttctgcacttcattaatccagctcaggacaatattattggttacctggactctagtgataaagatatgtcctaccttactacctccatctgccataacttctgaaatgaaatcctgcttaatatcctgctgctgaatttttttttcatcaggataaggccagactacctaagagcatatagtacctttgtgacctgggtccctgcacactttttctgccttctatccagccaaaaataccttttgatccattgttctagctctgccaacctgcttgcgtttcccttgaagtgctatgtctttttactctccatatttttgtctgtgctatttcttatacctggaatgcccttcccccattacttgcatcattaattcctattcattcttaaaatctcagctcaagtgtcaccttttcaaagtgtgtcttatgtaataaggctgaacttgagtgtgcctctgaaatttttccatggcactttgtgttgcctactcctaccacaacacattttgaaattataaccactgatttttcttgtctgactctaacactagactgagcatcttgaggcaaacagttatgtcatcagggcccacttatatctcttatatctcttttcccattagtaaatgatcccagattgtaatgtattgagttcttatgtctgctttgtatagttgttcattcagtgagttaatacttaacagcaatatttgaagcattgtgcttcttcgacatcataacagtttgcctctgaaagctcacggcctgatcatcaaggcaaggctaattagatttgttcattatgttctgtttaagaaatctgggaactatgtgaccatgttatacatttttcatccaaaatgactgcatttttacttggtacttaaaagtgtattatttggttatttggaaaatcacttttgtggaacatctcatttgctgataatgaaatgccaatgacttgttaccttggtataaaaaaccaaaatatgcgtgttaggaagtgctgtcattttactcaaaatacacagatttgaaagtttgtcactgtttctgttctcaattgtcctttctccacatctagctcaagactgcagtgcagatgacgacaacttccttgtgcccatagcggtgggagctgccttggcaggagtacttattctagtgttgctggcttattttattggtctcaagcaccatcatgctggatatgagcaattttagaatctgcaacctgattgattatataaaaatacatgcaaataacaagattttcttacctctcagttgttgaaacactttgcttcttaaaattgatatgttgaaactttaattcttttatcaatcccagcattttgagatcagtctttattaataaaacctgttctctttaatcagctta

SEQ ID NO: 414646 - DNA, 441 bp, Homo sapiens
ggcacaaactgcaattacttttgcaccaacctaacactaaaatctccccctttttgacatctcctcttaattcctttgccttcttattttctttttgttaaggtcctcactacttacaacctaattttttaaaaaatcagtttaagaacagcagctcaagccagttttccttttctttttagacatacacgaatttatccagaggagtggtatgtagcagaagaatcagggactggtttacacagcaaaccaggcaaagggcaacctggccatggagaatgtatgatttaggctgaagtggcatgccctacataaatgcttggtgttccttgctgcctgtttgtttctcacccccaaatttctatttcttttagaaaactgtaaccatttcagaccatggcactgtgacatataatggaagcatttgtggggatgatcaga

SEQ ID NO: 414647 - DNA, 497 bp, Homo sapiens
gattttttgttctacgctgaagttgattttgtttggtagagtgtaaggctttgctggccacttttatagctaacctgtaccttttccctttcttcttctcctgaaggttgcttcagttattaacatcaaccccaatacaactcactccacaggcagctgccgttctcacactgctctacttagactcaatagcagcaccattaagtatctagactttgtctttgctgtggtgagtaacagattttttaaagttaggttcattctcttagaaacacatctgaaagtctaaatagttgcatggggggaggggggtatttagctttattttccagttctacagtactcaattataaagtgtagtccattcatccctgttcatccctcagagtctgtgcaatggtctgtggactggactcttgcattaatgttcaccaagagtggccattttaccattagagagactctagggtagaagcaagaattaactcacatcaaaa

SEQ ID NO: 414648 - DNA, 487 bp, Homo sapiens
cacactttttctcacctaccccaagagtgttcgctggatgatgacaccattctaatcccaattatagttggtgctggtctttcaggcttgattatcgttatagtgattgcttacgtaattggcagaagaaaaagttatgctggatatcagactctgtaacactaatcaatacgtgatctctgttacaaaagaaaaaagcaagtacaagttccaacatgcaatactggtcaacttaaggtatatttagttgcagtccagctctttagaatgggtggtatgggggatttcaaacttaaacaaaaaactatcaactacaaattagttgcctgactttggtttttccaaccaaggaatttaaaactgttatttttacagcaaaagatgtgcaaaatcactggattataagttctattttactgtcttgaattagtatttcagtgttttcattttagacattcagactaaaaatacaccgtttagaaaaaac

SEQ ID NO: 414649 - DNA, 916 bp, Homo sapiens
cccctagtcttagtgactcgcactgaagcgccgattcctggcttttgcaaggctgtggtcggtggtcatcagtgctcttgacccaggtccagcgagccttttccctggtgttgcagctgttgttgtaccgccgccgtcgccgccgtcgccgcctgctctgcggggtcatggtgtgcttccgcctcttcccggttccgggctcagggctcgttctggtctgcctagtcctgggagctgtgcggtcttatgcattggaacttaatttgacagattcagaaaatgccacttgcctttatgcaaaatggcagatgaatttcacagtacgctatgaaactacaaataaaacttataaaactgtaaccatttcagaccatggcactgtgacatataatggaagcatttgtggggatgatcagaatggtcccaaaatagcagtgcagttcggacctggcttttcctggattgcgaattttaccaaggcagcatctacttattcaattgacagcgtctcattttcctacaacactggtgataacacaacatttcctgatgctgaagataaaggaattcttactgttgatgaacttttggccatcagaattccattgaatgacctttttagatgcaatagtttatcaactttggaaaagaatgatgttgtccaacactactgggatgttcttgtacaagcttttgtccaaaatggcacagtgagcacaaatgagttcctgtgtgataaagacaaaacttcaacagtggcacccaccatacacatgtggcatttctaattaaaaaactatccagggaaaccgaaggtgaactattagctatatggaagaaactgtccgggccccagggggccaggaaaacccgaaagggggcgttttaataaccccaaaatcccccagcaaggcgc

SEQ ID NO: 414650 - DNA, 4224 bp, Homo sapiens
cccctagtcttagtgactcgcactgaagcgccgattcctggcttttgcaaggctgtggtcggtggtcatcagtgctcttgacccaggtccagcgagccttttccctggtgttgcagctgttgttgtaccgccgccgtcgccgccgtcgccgcctgctctgcggggtcatggtgtgcttccgcctcttcccggttccgggctcagggctcgttctggtctgcctagtcctgggagctgtgcggtcttatgcattggaacttaatttgacagattcagaaaatgccacttgcctttatgcaaaatggcagatgaatttcacagtacgctatgaaactacaaataaaacttataaaactgtaaccatttcagaccatggcactgtgacatataatggaagcatttgtggggatgatcagaatggtcccaaaatagcagtgcagttcggacctggcttttcctggattgcgaattttaccaaggcagcatctacttattcaattgacagcgtctcattttcctacaacactggtgataacacaacatttcctgatgctgaagataaaggaattcttactgttgatgaacttttggccatcagaattccattgaatgacctttttagatgcaatagtttatcaactttggaaaagaatgatgttgtccaacactactgggatgttcttgtacaagcttttgtccaaaatggcacagtgagcacaaatgagttcctgtgtgataaagacaaaacttcaacagtggcacccaccatacacaccactgtgccatctcctactacaacacctactccaaaggaaaaaccagaagctggaacctattcagttaataatggcaatgatacttgtctgctggctaccatggggctgcagctgaacatcactcaggataaggttgcttcagttattaacatcaaccccaatacaactcactccacaggcagctgccgttctcacactgctctacttagactcaatagcagcaccattaagtatctagactttgtctttgctgtgaaaaatgaaaaccgattttatctgaaggaagtgaacatcagcatgtatttggttaatggctccgttttcagcattgcaaataacaatctcagctactgggatgcccccctgggaagttcttatatgtgcaacaaagagcagactgtttcagtgtctggagcatttcagataaatacctttgatctaagggttcagcctttcaatgtgacacaaggaaagtattctacagcccaagagtgttcgctggatgatgacaccattctaatcccaattatagttggtgctggtctttcaggcttgattatcgttatagtgattgcttacgtaattggcagaagaaaaagttatgctggatatcagactctgtaacactaatcaatacgtgatctctgttacaaaagaaaaaagcaagtacaagttccaacatgcaatactggtcaacttaaggtatatttagttgcagtccagctctttagaatgggtggtatgggggatttcaaacttaaacaaaaaactatcaactacaaattagttgcctgactttggtttttccaaccaaggaatttaaaactgttatttttacagcaaaagatgtgcaaaatcactggattataagttctattttactgtcttgaattagtatttcagtgttttcattttagacattcagactaaaaatacaccgtttagaaaaaacaatttttgaaaaagagattttttttccctgcaggtagttgagttggaacaacatgttctaccgtggatttgtacttgctccttttgctctttttttttgtgtgtgtgtgtgtgtgtgtgtgtgtgtgtgtgtgtgtgtgatttttgtttgcaggttaacttagctactttggcattgctgcatatttgacctttgagagatataatagtagatttgaacaggggctggtattattatgttcttagcaataaatgcttttctaatgccttttgaatacatttgtatttatgtggctgtaatgacaaaagatacaaaagctttttaaaatttagagtaggtattaatcttattgtttaatcttttttttaaaaaaactggatatttcaatcttttaaattgcaatatataagactattccaactgggcatttcaatccattttttaggtgctttagagataattgcttgccagtgccaattgagggcattagtactttgtgctcataaattggcctctgtatgcagtactaaaattaatgcagatttctctttagccttccaacatttcttgttgatagtgatgtattttattattttctttttcttaagaaatgccagtgtgtcctagaacctagataacgaagtgcacttacacttataaaataacttgcatctaggctgggcgtggcggctcacgcctgtaatcccagcactttgggaggccgaagtgggtggatcacttgaggccaggagtttgagaccagcctggccaacatggtgaaaccccatctctatcagaaatacaaaaaattagctgggcgtggtggtgggcgcctgtaatcccagttactcgggaggctgaggcaggagaatcacttgaacccgggaggcagaggttgcggtgagccaagagcgcaccattgcactccagcctgggcgacaaaaacgaaactccatctcaaaacaaaacaaaacaaaacaaacaaacaaacaaaacttgcatctaaccaaaaagtcttggttttatcttaatccattaaaaagttgttctttgtttccagcttgcattgattgctacaacatcactaatttggctttcacatttaaatggttctgtgctaatcaaaactttcgttgttattattcgttatggtagaatcatttttaattcacgtgctttgtgttcagttttgtggtctgagagatgtaccaattgtcaaattaccgtgtaccacctaatgtttataggagaaagcaaaatacatcagcttggtagttaacacatcaaatatttcttgctgcttctaggagaacttttttggtgtgtgttggaatggctgagcaaatattaaaattgttaatatgcagccatatatggaaggttcctgtggggttgttttttcgtgttttttttttttgtggtgggattatgtgcctcccattcactagaaaatgagaaaattgtctgggttccaaaatattgacattgaatggatcaatacacacacacagacatatatatatatatgcacacatatataggcagttgcatgctagcatgggtatttttataacaatataactgagttatattggaattataaatattttccgtcacttaaatttgttctttgtttagcctgaaaacctttatggctcaagatcagattcctgactaacccctctcttagagctacagcgagctgcattaccagcttaaaacacttcttagggattaaatatagatgtaatttttcaaaatcgtttttaatttaaactgtgttttagtgtaaaattgttaaccttgtaagatggataatgtgtataagaatgtaggccttaactatttcacatgagtcaaaacaaagcagctttaaaaaaataattggaagcacaagtgcatggcactgactgaatgctgttaatatttctaaaagtttctacattcagattatatgcctgattcatagtaaaatacctctaataaacactgttttatagaaaacctgacttcagtgaatatttttgtattttacatgggccagtttatatactgctatttacactattatttcctatagctacatgttctttgtaccttttgtagttttatttgtattactagattcataccttgatggtaacgctctatctggttttgggtgtttttcatgttttagcatttgtataaagaaactggtccatgtaaatactttccatgttttttcttcaaatgtttaaaccactagttgatgtatggtatctttagatatttgcctgtctgtttgctcaaaattgcttctaaaacaataaagattcttttatttcttaaggcaaaagaaaaaacaaaaaaaaggaacccccagaaaccacaacccaaacagggggcgcaccccaaggaggacccccacggggcccccacaaggggacacccgcccggggtcaagggggcccaagggggccacacaggggggcggggggggcccacggcggaccg

SEQ ID NO: 414651 - DNA, 3430 bp, Homo sapiens
cccctagtcttagtgactcgcactgaagcgccgattcctggcttttgcaaggctgtggtcggtggtcatcagtgctcttgacccaggtccagcgagccttttccctggtgttgcagctgttgttgtaccgccgccgtcgccgccgtcgccgcctgctctgcggggtcatggtgtgcttccgcctcttcccggttccgggctcagggctcgttctggtctgcctagtcctgggagctgtgcggtcttatgcattggaacttaatttgacagattcagaaaatgccacttgcctttatgcaaaatggcagatgaatttcacagtacgctatgaaactacaaataaaacttataaaactgtaaccatttcagaccatggcactgtgacatataatggaagcatttgtggggatgatcagaatggtcccaaaatagcagtgcagttcggacctggcttttcctggattgcgaattttaccaaggcagcatctacttattcaattgacagcgtctcattttcctacaacactggtgataacacaacatttcctgatgctgaagataaaggaattcttactgttgatgaacttttggccatcagaattccattgaatgacctttttagatgcaatagtttatcaactttggaaaagaatgatgttgtccaacactactgggatgttcttgtacaagcttttgtccaaaatggcacagtgagcacaaatgagttcctgtgtgataaagacaaaacttcaacagtggcacccaccatacacaccactgtgccatctcctactacaacacctactccaaaggaaaaaccagaagctggaacctattcagttaataatggcaatgatacttgtctgctggctaccatggggctgcagctgaacatcactcaggataaggttgcttcagttattaacatcaaccccaatacaactcactccacaggcagctgccgttctcacactgctctacttagactcaatagcagcaccattaagtatctagactttgtctttgctgtgaaaaatgaaaaccgattttatctgaaggaagtgaacatcagcatgtatttggttaatggctccgttttcagcattgcaaataacaatctcagctactgggatgcccccctgggaagttcttatatgtgcaacaaagagcagactgtttcagtgtctggagcatttcagataaatacctttgatctaagggttcagcctttcaatgtgacacaaggaaagtattctacagctcaagactgcagtgcagatgacgacaacttccttgtgcccatagcggtgggagctgccttggcaggagtacttattctagtgttgctggcttattttattggtctcaagcaccatcatgctggatatgagcaattttagaatctgcaacctgattgattatataaaaatacatgcaaataacaagattttcttacctctcagttgttgaaacactttgcttcttaaaattgatatgttgaaactttaattcttttatcaatcccagcattttgagatcagtctttattaataaaacctgttctctttaatcagcttaaaatccaaagtgtcatatttactggtcctggagacaaacttgttcaaaagaacatcaacgtgcaatgttttaaggtctatcttaagaagccctggccaaattttgatcctaaccttgaagtatgccttgaacttattaacatggccattataagaataaaatatgtagttgtgtcttaatggaattaataaatgtcatttcactactggtgttctgtttcaatgtataaggactatagtgatttaaactcatcaatgtgcctttgcataaagttgattaaataaatattgatgtggtataaatgcccatcagatatgcttaaacttggttttcagttgaatgaagtagagaatgtcctcaggaccatcagcattttaaaggttatgtgacttttgctgatttctctgagttcaagttaagcatgaagttagtacctcaagcctgtgatttttccctagggatgatacagacccaagaggctacaacagaacttaaactggcttcgtaattagagtttttaagataattgtttgtttttcagcaatatagactgaaaagatccaagcatatttagccacttgcttttttgtttcttgttttgttcttctttggatgcctgattagtattgaaagatagaaatattctatgaactaattaggacagattgtgttgtgtttctctacctcatcttgttgatctctggagcattaaaatctatttagtgttgtcatcagtgtggtacttatgaaatgtaagctaacagcaatctcagaagggaggcagtgaagcatagcaactaggctcttgtttcttcaagatggcccctgtggggcagtgcatagatgggggtgtaaagagaagctgttggcattaaaatgagctagataatcagcccttgttgaagcatattccatggtataagagtagcacagacatgaaacatagataaagaaggaaggcttaatagactagaagacttccacattgaagtattattaacccattgtatgtatataggggcatgatcagagtctctataacttcctgattaacaatacagtgtatcttgttacccagctgtcagtctttgagagctttcagtaaaatatagtaaattctttcagcataggctaatgtgtggttactgagatgagtgttgtgtactcagaaccgtagcaacatttttatgaatggtaaaagtacaagaggaggaaaagttaaaattagaagaaaagtacaagttattgcttaatcataaatcacaccagataacacattttgttaatttcattagctattactggaaaggaccttaacgattatttacagaaaggggagtgaaattcattgaggttccatatcaagtgggcaacaaaactattactagcattttgataaaaattgcccctaatgaaatctagtcactcaacagtaaaacaacagctggtttacacttgaaattatgagatcagaattgggcactttgggcttccgtactatgttttgcttaagttttttttttaatactaatatgggctttttcagtagtaatataccaaaacacttctattttaatctctgtttgctacttcaaaacctaatcctcctcagatgggatcatgagcataagaggaaaagagaagagaatgaatacttgttgacctcttgatgtgtatcagatgctttagaaatgtaattgtatttaatcctcaaataccttataggtattattatccccttcttacagatgaggaaagtgaggcccagtttaaataacttgcccaaggtcctttggctagtactggaaggagtcaagatttaaacacagttctgtctgaatccagaactcaa

SEQ ID NO: 414652 - DNA, 1783 bp, Homo sapiens
cccctagtcttagtgactcgcactgaagcgccgattcctggcttttgcaaggctgtggtcggtggtcatcagtgctcttgacccaggtccagcgagccttttccctggtgttgcagctgttgttgtaccgccgccgtcgccgccgtcgccgcctgctctgcggggtcatggtgtgcttccgcctcttcccggttccgggctcagggctcgttctggtctgcctagtcctgggagctgtgcggtcttatgcattggaacttaatttgacagattcagaaaatgccacttgcctttatgcaaaatggcagatgaatttcacagtacgctatgaaactacaaataaaacttataaaactgtaaccatttcagaccatggcactgtgacatataatggaagcatttgtggggatgatcagaatggtcccaaaatagcagtgcagttcggacctggcttttcctggattgcgaattttaccaaggcagcatctacttattcaattgacagcgtctcattttcctacaacactggtgataacacaacatttcctgatgctgaagataaaggaattcttactgttgatgaacttttggccatcagaattccattgaatgacctttttagatgcaatagtttatcaactttggaaaagaatgatgttgtccaacactactgggatgttcttgtacaagcttttgtccaaaatggcacagtgagcacaaatgagttcctgtgtgataaagacaaaacttcaacagtggcacccaccatacacaccactgtgccatctcctactacaacacctactccaaaggaaaaaccagaagctggaacctattcagttaataatggcaatgatacttgtctgctggctaccatggggctgcagctgaacatcactcaggataaggttgcttcagttattaacatcaaccccaatacaactcactccacaggcagctgccgttctcacactgctctacttagactcaatagcagcaccattaagtatctagactttgtctttgctgtgaaaaatgaaaaccgattttatctgaaggaagtgaacatcagcatgtatttggttaatggctccgttttcagcattgcaaataacaatctcagctactgggatgcccccctgggaagttcttatatgtgcaacaaagagcagactgtttcagtgtctggagcatttcagataaatacctttgatctaagggttcagcctttcaatgtgacacaaggaaagtattctacagctcaagactgcagtgcagatgacgacaacttccttgtgcccatagcggtgggagctgccttggcaggagtacttattctagtgttgctggcttattttattggtctcaagcaccatcatgctggatatgagcaattttagaatctgcaacctgattgattatataaaaatacatgcaaataacaagattttcttacctctcagttgttgaaacactttgcttcttaaaattgatatgttgaaactttaattcttttatcaatcccagcattttgagatcagtctttattaataaaacctgttctctttaatcagcttaaaatccaaagtgtcatatttactggtcctggagacaaacttgttcaaaagaacatcaacgtgcaatgttttaaggtctatcttaagaagccctggccaaattttgatcctaaccttgaagtatgccttgaacttattaacatggccattataagaataaaatatgtagttgtgtcttaatggaattaataaatgtcatttcacta

SEQ ID NO: 414653 - DNA, 1578 bp, Homo sapiens
cccctagtcttagtgactcgcactgaagcgccgattcctggcttttgcaaggctgtggtcggtggtcatcagtgctcttgacccaggtccagcgagccttttccctggtgttgcagctgttgttgtaccgccgccgtcgccgccgtcgccgcctgctctgcggggtcatggtgtgcttccgcctcttcccggttccgggctcagggctcgttctggtctgcctagtcctgggagctgtgcggtcttatgcattggaacttaatttgacagattcagaaaatgccacttgcctttatgcaaaatggcagatgaatttcacagtacgctatgaaactacaaataaaacttataaaactgtaaccatttcagaccatggcactgtgacatataatggaagcatttgtggggatgatcagaatggtcccaaaatagcagtgcagttcggacctggcttttcctggattgcgaattttaccaaggcagcatctacttattcaattgacagcgtctcattttcctacaacactggtgataacacaacatttcctgatgctgaagataaaggaattcttactgttgatgaacttttggccatcagaattccattgaatgacctttttagatgcaatagtttatcaactttggaaaagaatgatgttgtccaacactactgggatgttcttgtacaagcttttgtccaaaatggcacagtgagcacaaatgagttcctgtgtgataaagacaaaacttcaacagtggcacccaccatacacaccactgtgccatctcctactacaacacctactccaaaggaaaaaccagaagctggaacctattcagttaataatggcaatgatacttgtctgctggctaccatggggctgcagctgaacatcactcaggataaggttgcttcagttattaacatcaaccccaatacaactcactccacaggcagctgccgttctcacactgctctacttagactcaatagcagcaccattaagtatctagactttgtctttgctgtgaaaaatgaaaaccgattttatctgaaggaagtgaacatcagcatgtatttggttaatggctccgttttcagcattgcaaataacaatctcagctactgggatgcccccctgggaagttcttatatgtgcaacaaagagcagactgtttcagtgtctggagcatttcagataaatacctttgatctaagggttcagcctttcaatgtgacacaaggaaagtattctacagctcaagactgcagtgcagatgacgacaacttccttgtgcccatagcggtgggagctgccttggcaggagtacttattctagtgttgctggcttattttattggtctcaagcaccatcatgctggatatgagcaattttagaatctgcaacctgattgattatataaaaatacatgcaaataacaagattttcttacctctcagttgttgaaacactttgcttcttaaaattgatatgttgaaactttaattcttttatcaatcccagcattttgagatcagtctttattaataaaacctgttctctttaatcagctta

SEQ ID NO: 414654 - DNA, 1728 bp, Homo sapiens
cccctagtcttagtgactcgcactgaagcgccgattcctggcttttgcaaggctgtggtcggtggtcatcagtgctcttgacccaggtccagcgagccttttccctggtgttgcagctgttgttgtaccgccgccgtcgccgccgtcgccgcctgctctgcggggtcatggtgtgcttccgcctcttcccggttccgggctcagggctcgttctggtctgcctagtcctgggagctgtgcggtcttatgcattggaacttaatttgacagattcagaaaatgccacttgcctttatgcaaaatggcagatgaatttcacagtacgctatgaaactacaaataaaacttataaaactgtaaccatttcagaccatggcactgtgacatataatggaagcatttgtggggatgatcagaatggtcccaaaatagcagtgcagttcggacctggcttttcctggattgcgaattttaccaaggcagcatctacttattcaattgacagcgtctcattttcctacaacactggtgataacacaacatttcctgatgctgaagataaaggaattcttactgttgatgaacttttggccatcagaattccattgaatgacctttttagatgcaatagtttatcaactttggaaaagaatgatgttgtccaacactactgggatgttcttgtacaagcttttgtccaaaatggcacagtgagcacaaatgagttcctgtgtgataaagacaaaacttcaacagtggcacccaccatacacaccactgtgccatctcctactacaacacctactccaaaggaaaaaccagaagctggaacctattcagttaataatggcaatgatacttgtctgctggctaccatggggctgcagctgaacatcactcaggataaggttgcttcagttattaacatcaaccccaatacaactcactccacaggcagctgccgttctcacactgctctacttagactcaatagcagcaccattaagtatctagactttgtctttgctgtgctgaaaacctttatggctcaagatcagattcctgactaacccctctcttagagctacagcgagctgcattaccagcttaaaacacttcttagggattaaatatagatgtaatttttcaaaatcgtttttaatttaaactgtgttttagtgtaaaattgttaaccttgtaagatggataatgtgtataagaatgtaggccttaactatttcacatgagtcaaaacaaagcagctttaaaaaaataattggaagcacaagtgcatggcactgactgaatgctgttaatatttctaaaagtttctacattcagattatatgcctgattcatagtaaaatacctctaataaacactgttttatagaaaacctgacttcagtgaatatttttgtattttacatgggccagtttatatactgctatttacactattatttcctatagctacatgttctttgtaccttttgtagttttatttgtattactagattcataccttgatggtaacgctctatctggttttgggtgtttttcatgttttagcatttgtataaagaaactggtccatgtaaatactttccatgttttttcttcaaatgtttaaaccactagttgatgtatggtatctttagatatttgcctgtctgtttgctcaaaattgcttctaaaacaataaagattcttttatttcttaaggcaa

SEQ ID NO: 414655 - DNA, 1457 bp, Homo sapiens
cccctagtcttagtgactcgcactgaagcgccgattcctggcttttgcaaggctgtggtcggtggtcatcagtgctcttgacccaggtccagcgagccttttccctggtgttgcagctgttgttgtaccgccgccgtcgccgccgtcgccgcctgctctgcggggtcatggtgtgcttccgcctcttcccggttccgggctcagggctcgttctggtctgcctagtcctgggagctgtgcggtcttatgcattggaacttaatttgacagattcagaaaatgccacttgcctttatgcaaaatggcagatgaatttcacagtacgctatgaaactacaaataaaacttataaaactgtaaccatttcagaccatggcactgtgacatataatggaagcatttgtggggatgatcagaatggtcccaaaatagcagtgcagttcggacctggcttttcctggattgcgaattttaccaaggcagcatctacttattcaattgacagcgtctcattttcctacaacactggtgataacacaacatttcctgatgctgaagataaaggaattcttactgttgatgaacttttggccatcagaattccattgaatgacctttttagatgcaatagtttatcaactttggaaaagaatgatgttgtccaacactactgggatgttcttgtacaagcttttgtccaaaatggcacagtgagcacaaatgagttcctgtgtgataaagacaaaacttcaacagtggcacccaccatacacaccactgtgccatctcctactacaacacctactccaaaggaaaaaccagaagctggaacctattcagttaataatggcaatgatacttgtctgctggctaccatggggctgcagctgaacatcactcaggataaggttgcttcagttattaacatcaaccccaatacaactcactccacaggcagctgccgttctcacactgctctacttagactcaatagcagcaccattaagtatctagactttgtctttgctgtgaaaaatgaaaaccgattttatctgaaggaagtgaacatcagcatgtatttggttaatggctccgttttcagcattgcaaataacaatctcagctactgggatgcccccctgggaagttcttatatgtgcaacaaagagcagactgtttcagtgtctggagcatttcagataaatacctttgatctaagggttcagcctttcaatgtgacacaaggaaagtattctacagctcaagactgcagtgcagatgacgacaacttccttgtgcccatagcggtgggagctgccttggcaggagtacttattctagtgttgctggcttattttattggtctcaagcaccatcatgctggataattcttttatcaatcccagcattttgagatcagtctttattaataaaacctgttctctttaatcagctta

SEQ ID NO: 414656 - DNA, 1117 bp, Homo sapiens
cccctagtcttagtgactcgcactgaagcgccgattcctggcttttgcaaggctgtggtcggtggtcatcagtgctcttgacccaggtccagcgagccttttccctggtgttgcagctgttgttgtaccgccgccgtcgccgccgtcgccgcctgctctgcggggtcatggtgtgcttccgcctcttcccggttccgggctcagggctcgttctggtctgcctagtcctgggagctgtgcggtcttatgcattggaacttaatttgacagattcagaaaatgccacttgcctttatgcaaaatggcagatgaatttcacagtacgctatgaaactacaaataaaacttataaaactgtaaccatttcagaccatggcactgtgacatataatggaagcatttgtggggatgatcagaatggtcccaaaatagcagtgcagttcggacctggcttttcctggattgcgaattttaccaaggcagcatctacttattcaattgacagcgtctcattttcctacaacactggtgataacacaacatttcctgatgctgaagataaaggaattcttactgttgatgaacttttggccatcagaattccattgaatgacctttttagatgcaatagtttatcaactttggaaaagaatgatgttgtccaacactactgggatgttcttgtacaagcttttgtccaaaatggcacagtgagcacaaatgagttcctgtgtgataaagacaaaacttcaacagtggcacccaccatacacaccactgtgccatctcctactacaacacctactccaaaggaaaaaccagaagctggaacctattcagttaataatggcaatgatacttgtctgctggctaccatggggctgcagctgaacatcactcaggataaggtataggtgtctatctttatcaatacatcctttttgcatttcatttcaaatattgcgtatcctaccttcagcccaaaggtagtgttactagaatgattccgttttctttttgtttgtttgtttgtttttttgagatggagtcacgctctgtcccccaggctggagtgcagtggtgcgatctcagctcactgcaaactccgcctcccggg

SEQ ID NO: 414657 - DNA, 797 bp, Homo sapiens
cccctagtcttagtgactcgcactgaagcgccgattcctggcttttgcaaggctgtggtcggtggtcatcagtgctcttgacccaggtccagcgagccttttccctggtgttgcagctgttgttgtaccgccgccgtcgccgccgtcgccgcctgctctgcggggtcatggtgtgcttccgcctcttcccggttccgggctcagggctcgttctggtctgcctagtcctgggagctgtgcggtcttatgcattggaacttaatttgacagattcagaaaatgccacttgcctttatgcaaaatggcagatgaatttcacagtacgctatgaaactacaaataaaacttataaaactgtaaccatttcagaccatggcactgtgacatataatggaagcatttgtggggatgatcagaatggtcccaaaatagcagtgcagttcggacctggcttttcctggattgcgaattttaccaaggcagcatctacttattcaattgacagcgtctcattttcctacaacactggtgataacacaacatttcctgatgctgaagataaaggaattcttactgttgatgaacttttggccatcagaattccattgaatgacctttttagatgcaatagtttatcaactttggaaaagaatgatgttgtccaacactactgggatgttcttgtacaagcttttgtccaaaatggcacagtgagcacaaatggagtcccgtgtgctaagacaaactcacaggggccacaataaaccagtgccttcctaaaaccactccagaaacca

SEQ ID NO: 414658 - DNA, 468 bp, Homo sapiens
ccccatcaaatgacttggccaaggtcatttgatgggggctgtcatacggcactaacaggtagcgaggtgtggaccaagagactgcccccatcaaatgaccttggccaagtcacggtttctctgtggtcaaggttggttggctgattggtggaaagtagggtggaccaaaggaggccacgtgagcagtcagcaccagttctgcaccagcagcgcctccgtcctagtgggtgttcctgtttctcctggccctgggtgggctagggcctgattcgggaagatgcctttgcagggaggggaggataagtgggatctaccaattgattctggcaaaacaatttctaagatttttttgctttatgtgggaaacagatctaaatctcattttatgctgtattttatatcttagttgtgtttgaaaacgttttgatttttggaaacacatcaaaataaataatggcgtttgttgta

SEQ ID NO: 414659 - DNA, 441 bp, Homo sapiens
  misc_feature (161)..(161): n is a, c, g, or t
  misc_feature (221)..(221): n is a, c, g, or t
accccagtgcccatggaaacagagctcctgcttttccccccaggaaggcgttgatacatttataggctagcattcaacatcagcgttgtgctctggcagtctcagcagtaagacataaacctaccaaggtctgggggaagcactgggtgttaccaccctgntcacgcgggagacgcatgctcctccgtgactgtttgtggccagtgagccaccagttgacnccagcaatccagccttctgcccctctcacttcacagatgagggaggggaggataagtgggatctaccaattgattctggcaaaacaatttctaagatttttttgctttatgtgggaaacagatctaaatctcattttatgctgtattttatatcttagttgtgtttgaaaacgttttgatttttggaaacacatcaaaataaataatggcgtttgttgta

SEQ ID NO: 414660 - DNA, 490 bp, Homo sapiens
gggctcccttctctttgctctggtggagcagagcttctgaaaagacatccttgagggttcagtgtcactcccccttcagccccctgcatgtctctgactgcctggagctcctttctcttctggggaagtcgtgagcccaagcagggctgtagaggcaggtcattcggtactgggccatcttttgtcccatttctatgattaccgtgacaagggaagtctcgagcttggctgcagccaggatgctgtcttgttatcacgttgcttcataaagaagaatacttggttattcagaatgaaatgctgggaacagaatatctgaatccacatcagtggtctcagaatcactttgttctctggaacatcatagcacatttcttgagaaatacagaaccacatttttgagcttagatctgtcctcggtctcctacaatggttttgtgtgttttagactccagctgacattggagagacggcctaatgtattatgaag

SEQ ID NO: 414661 - DNA, 3044 bp, Homo sapiens
cagtgtgccctgtttgcccactctcagaccccggagttcatcaatctcggagccgctggccaatatgtactcatgtgggaaccagccgacgcggagcgaggccggccgccgggcacttcctgtggaggccgcagcgggtgcgggcgccgacgggcgagagccagcgagcgagcgagcgagccgagccgagcctcccgccgtcgccatgggccagaacgacctgatgggcacggccgaggacttcgccgaccagttcctccgtgtcacaaagcagtacctgccccacgtggcgcgcctctgtctgatcagcaccttcctggaggacggcatccgtatgtggttccagtggagcgagcagcgcgactacatcgacaccacctggaactgcggctacctgctggcctcgtccttcgtcttcctcaacttgctgggacagctgactggctgcgtcctggtgttgagcaggaacttcgtgcagtacgcctgcttcgggctctttggaatcatagctctgcagacgattgcctacagcattttatgggacttgaagtttttgatgaggaacctggccctgggaggaggcctgttgctgctcctagcagaatcccgttctgaagggaagagcatgtttgcgggcgtccccaccatgcgtgagagctcccccaaacagtacatgcagctcggaggcagggtcttgctggttctgatgttcatgaccctccttcactttgacgccagcttcttttctattgtccagaacatcgtgggcacagctctgatgattttagtggccattggttttaaaaccaagctggctgctttgactcttgttgtgtggctctttgccatcaacgtatatttcaacgccttctggaccattccagtctacaagcccatgcatgacttcctgaaatacgacttcttccagaccatgtcggtgattgggggcttgctcctggtggtggccctgggccctgggggtgtctccatggatgagaagaagaaggagtggtaacagtcacagatccctacctgcctggctaagacccgtggccgtcaaggactggttcggggtggattcaacaaaactgccagcttttatgtatcctcttcccttcccctcccttggtaaaggcacagatgttttgagaactttatttgcagagacacctgagaatcgatggctcagtctgctctggagccacagtctggcgtctgacccttcagtgcaggccagcctggcagctggaagcctcccccacgccgaggctttggagtgaacagcccgcttggctgtggcatctcagtcctatttttgagtttttttgtgggggtacaggagggggccttcaagctgtactgtgagcagacgcattggtattatcattcaaagcagtctccctcttatttgtaagtttacatttttagcggaaactactaaattattttgggtggttcagccaaacctcaaaacagttaatctccctggtttaaaatcacaccagtggctttgatgttgtttctgccccgcattgtattttataggaatagtgaaaacatttagggacacccaaagaatgatgcagtattaaaggggtggtagaagctgctgtttatgataaaagtcatcggtcagaaaatcagcttggattggtgccaagtgttttattgggtaacaccctgggagttttagtagcttgaggcaaggtggaggggcaagaagtccttggggaagctgctggtctgggtgctgctggcctccaagctggcagtgggaagggctagtgagaccacacaggggtagccccagcagcagcaccctgcaagccagcctggccagctgctcagaccagcttgcagagccgcagccgctgtgggcagggggtgtggcaggagctcccagcactggagacccacggactcaacccagttacctcacatggggccttttctgagcaaggtctcgaaagcgcaggccgccctggctgagcagcaccgccctttcccagctgcactcgccctgtggacagccccgacacaccactttcctgaggctgtcgctcactcagattgtccgtttgctatgccgaatgcagccaaaattcctttttacaatttgtgatgccttaccgatttgatcttaatcctgtatttaaagttttctaacactgccttatactgtgtttctctttttgggggagcttaactgcttgttgctccctgtcgtctgcaccatagtaaatgccacaagggtagtcgaacacctctctggcccctagacctatctggggacaggctggctcagcctgtctccagggctgctgcggcccagccccgagcctgcctccctcttggcctctcatccattggctctgcagggcaggggtgaggcaggtttctgctcataagtgcttttggaagtcacctacctttttaacacagccgaactagtcccaacgcgtttgcaaatattcccctggtagcctacttccttacccccgaatattggtaagatcgagcaatggcttcaggacatgggttctcttctcctgtgatcattcaagtgctcactgcatgaagactggcttgtctcagtgtttcaacctcaccagggctgtctcttggtccacacctcgctccctgttagtgccgtatgacagcccccatcaaatgaccttggccaagtcacggtttctctgtggtcaaggttggttggctgattggtggaaagtagggtggaccaaaggaggccacgtgagcagtcagcaccagttctgcaccagcagcgcctccgtcctagtgggtgttcctgtttctcctggccctgggtgggctagggcctgattcgggaagatgcctttgcagggaggggaggataagtgggatctaccaattgattctggcaaaacaatttctaagatttttttgctttatgtgggaaacagatctaaatctcattttatgctgtattttatatcttagttgtgtttgaaaacgttttgatttttggaaacacatcaaaataaataatggcgtttgttgta

SEQ ID NO: 414662 - DNA, 3142 bp, Homo sapiens
cagtgtgccctgtttgcccactctcagaccccggagttcatcaatctcggagccgctggccaatatgtactcatgtgggaaccagccgacgcggagcgaggccggccgccgggcacttcctgtggaggccgcagcgggtgcgggcgccgacgggcgagagccagcgagcgagcgagcgagccgagccgagcctcccgccgtcgccatgggccagaacgacctgatgggcacggccgaggacttcgccgaccagcgtctgttcctcacacaccccgcccaaggacgtgcctggcagcggcctggtgctccccgccgcagccacctcacccttgggtttctgtggccctgcagttcctccgtgtcacaaagcagtacctgccccacgtggcgcgcctctgtctgatcagcaccttcctggaggacggcatccgtatgtggttccagtggagcgagcagcgcgactacatcgacaccacctggaactgcggctacctgctggcctcgtccttcgtcttcctcaacttgctgggacagctgactggctgcgtcctggtgttgagcaggaacttcgtgcagtacgcctgcttcgggctctttggaatcatagctctgcagacgattgcctacagcattttatgggacttgaagtttttgatgaggaacctggccctgggaggaggcctgttgctgctcctagcagaatcccgttctgaagggaagagcatgtttgcgggcgtccccaccatgcgtgagagctcccccaaacagtacatgcagctcggaggcagggtcttgctggttctgatgttcatgaccctccttcactttgacgccagcttcttttctattgtccagaacatcgtgggcacagctctgatgattttagtggccattggttttaaaaccaagctggctgctttgactcttgttgtgtggctctttgccatcaacgtatatttcaacgccttctggaccattccagtctacaagcccatgcatgacttcctgaaatacgacttcttccagaccatgtcggtgattgggggcttgctcctggtggtggccctgggccctgggggtgtctccatggatgagaagaagaaggagtggtaacagtcacagatccctacctgcctggctaagacccgtggccgtcaaggactggttcggggtggattcaacaaaactgccagcttttatgtatcctcttcccttcccctcccttggtaaaggcacagatgttttgagaactttatttgcagagacacctgagaatcgatggctcagtctgctctggagccacagtctggcgtctgacccttcagtgcaggccagcctggcagctggaagcctcccccacgccgaggctttggagtgaacagcccgcttggctgtggcatctcagtcctatttttgagtttttttgtgggggtacaggagggggccttcaagctgtactgtgagcagacgcattggtattatcattcaaagcagtctccctcttatttgtaagtttacatttttagcggaaactactaaattattttgggtggttcagccaaacctcaaaacagttaatctccctggtttaaaatcacaccagtggctttgatgttgtttctgccccgcattgtattttataggaatagtgaaaacatttagggacacccaaagaatgatgcagtattaaaggggtggtagaagctgctgtttatgataaaagtcatcggtcagaaaatcagcttggattggtgccaagtgttttattgggtaacaccctgggagttttagtagcttgaggcaaggtggaggggcaagaagtccttggggaagctgctggtctgggtgctgctggcctccaagctggcagtgggaagggctagtgagaccacacaggggtagccccagcagcagcaccctgcaagccagcctggccagctgctcagaccagcttgcagagccgcagccgctgtgggcagggggtgtggcaggagctcccagcactggagacccacggactcaacccagttacctcacatggggccttttctgagcaaggtctcgaaagcgcaggccgccctggctgagcagcaccgccctttcccagctgcactcgccctgtggacagccccgacacaccactttcctgaggctgtcgctcactcagattgtccgtttgctatgccgaatgcagccaaaattcctttttacaatttgtgatgccttaccgatttgatcttaatcctgtatttaaagttttctaacactgccttatactgtgtttctctttttgggggagcttaactgcttgttgctccctgtcgtctgcaccatagtaaatgccacaagggtagtcgaacacctctctggcccctagacctatctggggacaggctggctcagcctgtctccagggctgctgcggcccagccccgagcctgcctccctcttggcctctcatccattggctctgcagggcaggggtgaggcaggtttctgctcataagtgcttttggaagtcacctacctttttaacacagccgaactagtcccaacgcgtttgcaaatattcccctggtagcctacttccttacccccgaatattggtaagatcgagcaatggcttcaggacatgggttctcttctcctgtgatcattcaagtgctcactgcatgaagactggcttgtctcagtgtttcaacctcaccagggctgtctcttggtccacacctcgctccctgttagtgccgtatgacagcccccatcaaatgaccttggccaagtcacggtttctctgtggtcaaggttggttggctgattggtggaaagtagggtggaccaaaggaggccacgtgagcagtcagcaccagttctgcaccagcagcgcctccgtcctagtgggtgttcctgtttctcctggccctgggtgggctagggcctgattcgggaagatgcctttgcagggaggggaggataagtgggatctaccaattgattctggcaaaacaatttctaagatttttttgctttatgtgggaaacagatctaaatctcattttatgctgtattttatatcttagttgtgtttgaaaacgttttgatttttggaaacacatcaaaataaataatggcgtttgttgta

SEQ ID NO: 414663 - DNA, 3003 bp, Homo sapiens
cagtgtgccctgtttgcccactctcagaccccggagttcatcaatctcggagccgctggccaatatgtactcatgtgggaaccagccgacgcggagcgaggccggccgccgggcacttcctgtggaggccgcagcgggtgcgggcgccgacgggcgagagccagcgagcgagcgagcgagccgagccgagcctcccgccgtcgccatgggccagaacgacctgatgggcacggccgaggacttcgccgaccagttcctccgtgtcacaaagcagtacctgccccacgtggcgcgcctctgtctgatcagcaccttcctggaggacggcatccgtatgtggttccagtggagcgagcagcgcgactacatcgacaccacctggaactgcggctacctgctggcctcgtccttcgtcttcctcaacttgctgggacagctgactggctgcgtcctggtgttgagcaggaacttcgtgcagtacgcctgcttcgggctctttggaatcatagctctgcagacgattgcctacagcattttatgggacttgaagtttttgatgaggaacctggccctgggaggaggcctgttgctgctcctagcagaatcccgttctgaagggaagagcatgtttgcgggcgtccccaccatgcgtgagagctcccccaaacagtacatgcagctcggaggcagggtcttgctggttctgatgttcatgaccctccttcactttgacgccagcttcttttctattgtccagaacatcgtgggcacagctctgatgattttagtggccattggttttaaaaccaagctggctgctttgactcttgttgtgtggctctttgccatcaacgtatatttcaacgccttctggaccattccagtctacaagcccatgcatgacttcctgaaatacgacttcttccagaccatgtcggtgattgggggcttgctcctggtggtggccctgggccctgggggtgtctccatggatgagaagaagaaggagtggtaacagtcacagatccctacctgcctggctaagacccgtggccgtcaaggactggttcggggtggattcaacaaaactgccagcttttatgtatcctcttcccttcccctcccttggtaaaggcacagatgttttgagaactttatttgcagagacacctgagaatcgatggctcagtctgctctggagccacagtctggcgtctgacccttcagtgcaggccagcctggcagctggaagcctcccccacgccgaggctttggagtgaacagcccgcttggctgtggcatctcagtcctatttttgagtttttttgtgggggtacaggagggggccttcaagctgtactgtgagcagacgcattggtattatcattcaaagcagtctccctcttatttgtaagtttacatttttagcggaaactactaaattattttgggtggttcagccaaacctcaaaacagttaatctccctggtttaaaatcacaccagtggctttgatgttgtttctgccccgcattgtattttataggaatagtgaaaacatttagggacacccaaagaatgatgcagtattaaaggggtggtagaagctgctgtttatgataaaagtcatcggtcagaaaatcagcttggattggtgccaagtgttttattgggtaacaccctgggagttttagtagcttgaggcaaggtggaggggcaagaagtctggcagtgggaagggctagtgagaccacacaggggtagccccagcagcagcaccctgcaagccagcctggccagctgctcagaccagcttgcagagccgcagccgctgtgggcagggggtgtggcaggagctcccagcactggagacccacggactcaacccagttacctcacatggggccttttctgagcaaggtctcgaaagcgcaggccgccctggctgagcagcaccgccctttcccagctgcactcgccctgtggacagccccgacacaccactttcctgaggctgtcgctcactcagattgtccgtttgctatgccgaatgcagccaaaattcctttttacaatttgtgatgccttaccgatttgatcttaatcctgtatttaaagttttctaacactgccttatactgtgtttctctttttgggggagcttaactgcttgttgctccctgtcgtctgcaccatagtaaatgccacaagggtagtcgaacacctctctggcccctagacctatctggggacaggctggctcagcctgtctccagggctgctgcggcccagccccgagcctgcctccctcttggcctctcatccattggctctgcagggcaggggtgaggcaggtttctgctcataagtgcttttggaagtcacctacctttttaacacagccgaactagtcccaacgcgtttgcaaatattcccctggtagcctacttccttacccccgaatattggtaagatcgagcaatggcttcaggacatgggttctcttctcctgtgatcattcaagtgctcactgcatgaagactggcttgtctcagtgtttcaacctcaccagggctgtctcttggtccacacctcgctccctgttagtgccgtatgacagcccccatcaaatgaccttggccaagtcacggtttctctgtggtcaaggttggttggctgattggtggaaagtagggtggaccaaaggaggccacgtgagcagtcagcaccagttctgcaccagcagcgcctccgtcctagtgggtgttcctgtttctcctggccctgggtgggctagggcctgattcgggaagatgcctttgcagggaggggaggataagtgggatctaccaattgattctggcaaaacaatttctaagatttttttgctttatgtgggaaacagatctaaatctcattttatgctgtattttatatcttagttgtgtttgaaaacgttttgatttttggaaacacatcaaaataaataatggcgtttgttgta

SEQ ID NO: 414664 - DNA, 3065 bp, Homo sapiens
cagtgtgccctgtttgcccactctcagaccccggagttcatcaatctcggagccgctggccaatatgtactcatgtgggaaccagccgacgcggagcgaggccggccgccgggcacttcctgtggaggccgcagcgggtgcgggcgccgacgggcgagagccagcgagcgagcgagcgagccgagccgagcctcccgccgtcgccatgggccagaacgacctgatgggcacggccgaggacttcgccgaccagttcctccgtgtcacaaagcagtacctgccccacgtggcgcgcctctgtctgatcagcaccttcctggaggacggcatccgtatgtggttccagtggagcgagcagcgcgactacatcgacaccacctggaactgcggctacctgctggcctcgtccttcgtcttcctcaacttgctgggacagctgactggctgcgtcctggtgttgagcaggaacttcgtgcagtacgcctgcttcgggctctttggaatcatagctctgcagacgattgcctacagcattttatgggacttgaagtttttgatgaggaacctggccctgggaggaggcctgttgctgctcctagcagaatcccgttctgaagggaagagcatgtttgcgggcgtccccaccatgcgtgagagctcccccaaacagtacatgcagctcggaggcagggtcttgctggttctgatgttcatgaccctccttcactttgacgccagcttcttttctattgtccagaacatcgtgggcacagctctgatgattttagtggccattggttttaaaaccaagctggctgctttgactcttgttgtgtggctctttgccatcaacgtatatttcaacgccttctggaccattccagtctacaagcccatgcatgacttcctgaaatacgacttcttccagaccatgtcggtgattgggggcttgctcctggtggtggccctgggccctgggggtgtctccatggatgagaagaagaaggagtggtaacagtcacagatccctacctgcctggctaagacccgtggccgtcaaggactggttcggggtggattcaacaaaactgccagcttttatgtatcctcttcccttcccctcccttggtaaaggcacagatgttttgagaactttatttgcagagacacctgagaatcgatggctcagtctgctctggagccacagtctggcgtctgacccttcagtgcaggccagcctggcagctggaagcctcccccacgccgaggctttggagtgaacagcccgcttggctgtggcatctcagtcctatttttgagtttttttgtgggggtacaggagggggccttcaagctgtactgtgagcagacgcattggtattatcattcaaagcagtctccctcttatttgtaagtttacatttttagcggaaactactaaattattttgggtggttcagccaaacctcaaaacagttaatctccctggtttaaaatcacaccagtggctttgatgttgtttctgccccgcattgtattttataggaatagtgaaaacatttagggacacccaaagaatgatgcagtattaaaggggtggtagaagctgctgtttatgataaaagtcatcggtcagaaaatcagcttggattggtgccaagtgttttattgggtaacaccctgggagttttagtagcttgaggcaaggtggaggggcaagaagtccttggggaagctgctggtctgggtgctgctggcctccaagctggcagtgggaagggctagtgagaccacacaggggtagccccagcagcagcaccctgcaagccagcctggccagctgctcagaccagcttgcagagccgcagccgctgtgggcagggggtgtggcaggagctcccagcactggagacccacggactcaacccagttacctcacatggggccttttctgagcaaggtctcgaaagcgcaggccgccctggctgagcagcaccgccctttcccagctgcactcgccctgtggacagccccgacacaccactttcctgaggctgtcgctcactcagattgtccgtttgctatgccgaatgcagccaaaattcctttttacaatttgtgatgccttaccgatttgatcttaatcctgtatttaaagttttctaacactgccttatactgtgtttctctttttgggggagcttaactgcttgttgctccctgtcgtctgcaccatagtaaatgccacaagggtagtcgaacacctctctggcccctagacctatctggggacaggctggctcagcctgtctccagggctgctgcggcccagccccgagcctgcctccctcttggcctctcatccattggctctgcagggcaggggtgaggcaggtttctgctcataagtgcttttggaagtcacctacctttttaacacagccgaactagtcccaacgcgtttgcaaatattcccctggtagcctacttccttacccccgaatattggtaagatcgagcaatggcttcaggacatgggttctcttctcctgtgatcattcaagtgctcactgcatgaagactggcttgtctcagtgtttcaacctcaccagggctgtctcttggtccacacctcgctccctgttagtgccgtatgacagcccccatcaaatgaccttggccaagtcacggtttctctgtggtcaaggttggttggctgattggtggaaagtagggtggaccaaaggaggccacgtgagcagtcagcaccagttctgcaccagcagcgcctccgtcctagtgggtgttcctgtttctcctggccctgggtgggctagggcctgattcgggaagatgcctttgcagggaggggaggataagtgggatctaccaattgattctggcaaaacaatttctaagatttttttgctttatgtgggaaacagatctaaatctcattttatgctgtattttatatcttagttgtgtttgaaaacgttttgatttttggaaacacatcaaaataaataatggcgtttgttgtatgcagtgtgatcctaaaaaaa

SEQ ID NO: 414665 - DNA, 3195 bp, Homo sapiens
cagtgtgccctgtttgcccactctcagaccccggagttcatcaatctcggagccgctggccaatatgtactcatgtgggaaccagccgacgcggagcgaggccggccgccgggcacttcctgtggaggccgcagcgggtgcgggcgccgacgggcgagagccagcgagcgagcgagcgagccgagccgagcctcccgccgtcgccatgggccagaacgacctgatgggcacggccgaggacttcgccgaccagttcctccgtgtcacaaagcagtacctgccccacgtggcgcgcctctgtctgatcagcaccttcctggaggacggcatccgtatgtggttccagtggagcgagcagcgcgactacatcgacaccacctggaactgcggctacctgctggcctcgtccttcgtcttcctcaacttgctgggacagctgactggctgcgtcctggtgttgagcaggaacttcgtgcagtacgcctgcttcgggctctttggaatcatagctctgcagacgattgcctacagcattttatgggacttgaagtttttgatgaggaacctggccctgggaggaggcctgttgctgctcctagcagaatcccgttctgaagggaagagcatgtttgcgggcgtccccaccatgcgtgagagctcccccaaacagtacatgcagctcggaggcagggtcttgctggttctgatgttcatgaccctccttcactttgacgccagcttcttttctattgtccagaacatcgtgggcacagctctgatgattttagtggccattggttttaaaaccaagctggctgctttgactcttgttgtgtggctctttgccatcaacgtatatttcaacgccttctggaccattccagtctacaagcccatgcatgacttcctgaaatacgacttcttccagaccatgtcggtgattgggggcttgctcctggtggtggccctgggccctgggggtgtctccatggatgagaagaagaaggagtggtaacagtcacagatccctacctgcctggctaagacccgtggccgtcaaggactggttcggggtggattcaacaaaactgccagcttttatgtatcctcttcccttcccctcccttggtaaaggcacagatgttttgagaactttatttgcagagacacctgagaatcgatggctcagtctgctctggagccacagtctggcgtctgacccttcagtgcaggccagcctggcagctggaagcctcccccacgccgaggctttggagtgaacagcccgcttggctgtggcatctcagtcctatttttgagtttttttgtgggggtacaggagggggccttcaagctgtactgtgagcagacgcattggtattatcattcaaagcagtctccctcttatttgtaagtttacatttttagcggaaactactaaattattttgggtggttcagccaaacctcaaaacagttaatctccctggtttaaaatcacaccagtggctttgatgttgtttctgccccgcattgtattttataggaatagtgaaaacatttagggacacccaaagaatgatgcagtattaaaggggtggtagaagctgctgtttatgataaaagtcatcggtcagaaaatcagcttggattggtgccaagtgttttattgggtaacaccctgggagttttagtagcttgaggcaaggtggaggggcaagaagtccttggggaagctgctggtctgggtgctgctggcctccaagctggcagtgggaagggctagtgagaccacacaggggtagccccagcagcagcaccctgcaagccagcctggccagctgctcagaccagcttgcagagccgcagccgctgtgggcagggggtgtggcaggagctcccagcactggagacccacggactcaacccagttacctcacatggggccttttctgagcaaggtctcgaaagcgcaggccgccctggctgagcagcaccgccctttcccagctgcactcgccctgtggacagccccgacacaccactttcctgaggctgtcgctcactcagattgtccgtttgctatgccgaatgcagccaaaattcctttttacaatttgtgatgccttaccgatttgatcttaatcctgtatttaaagttttctaacactgccttatactgtgtttctctttttgggggagcttaactgcttgttgctccctgtcgtctgcaccatagtaaatgccacaagggtagtcgaacacctctctggcccctagacctatctggggacaggctggctcagcctgtctccagggctgctgcggcccagccccgagcctgcctccctcttggcctctcatccattggctctgcagggcaggggtgaggcaggtttctgctcataagtgcttttggaagtcacctacctttttaacacagccgaactagtcccaacgcgtttgcaaatattcccctggtagcctacttccttacccccgaatattggtaagatcgagcaatggcttcaggacatgggttctcttctcctgtgatcattcaagtgctcactgcatgaagactggcttgtctcagtgtttcaacctcaccagggctgtctcttggtccacacctcgctccctgttagtgccgtatgacagcccccatcaaatgaccttggccaagtcacggtttctctgtggtcaaggttggttggctgattggtggaaagtagggtggaccaaaggaggccacgtgagcagtcagcaccagttctgcaccagcagcgcctccgtcctagtgggtgttcctgtttctcctggccctgggtgggctagggcctgattcgggaagatgcctttgcagggaggggaggataagtgggatctaccaattgattctggcaaaacaatttctaagatttttttgctttatgtgggaaacagatctaaatctcattttatgctgtattttatatcttagttgtgtttgaaaacgttttgatttttggaaacacatcaaaataaataatggcgtttgttgtaaaaaaaaaaaacacaaaacaaaacaaacaaaaaaacaagaaacaaaaacaacaagggggggcccccccaacaatacccccctgggggcccccacataagccgccccccgcttttggggcacaggggggccccaaagggggccccataacag

SEQ ID NO: 414666 - DNA, 2935 bp, Homo sapiens
cagtgtgccctgtttgcccactctcagaccccggagttcatcaatctcggagccgctggccaatatgtactcatgtgggaaccagccgacgcggagcgaggccggccgccgggcacttcctgtggaggccgcagcgggtgcgggcgccgacgggcgagagccagcgagcgagcgagcgagccgagccgagcctcccgccgtcgccatgggccagaacgacctgatgggcacggccgaggacttcgccgaccagttcctccgtgtcacaaagcagtacctgccccacgtggcgcgcctctgtctgatcagcaccttcctggaggacggcatccgtatgtggttccagtggagcgagcagcgcgactacatcgacaccacctggaactgcggctacctgctggcctcgtccttcgtcttcctcaacttgctgggacagctgactggctgcgtcctggtgttgagcaggaacttcgtgcagtacgcctgcttcgggctctttggaatcatagctctgcagacgattgcctacagcattttatgggacttgaagtttttgatgaggaacctggccctgggaggaggcctgttgctgctcctagcagaatcccgttctgaagggaagagcatgtttgcgggcgtccccaccatgcgtgagagctcccccaaacagtacatgcagctcggaggcagggtcttgctggttctgatgttcatgaccctccttcactttgacgccagcttcttttctattgtccagaacatcgtgggcacagctctgatgattttagtggccattggttttaaaaccaagctggctgctttgactcttgttgtgtggctctttgccatcaacgtatatttcaacgccttctggaccattccagtctacaagcccatgcatgacttcctgaaatacgacttcttccagaccctaagacccgtggccgtcaaggactggttcggggtggattcaacaaaactgccagcttttatgtatcctcttcccttcccctcccttggtaaaggcacagatgttttgagaactttatttgcagagacacctgagaatcgatggctcagtctgctctggagccacagtctggcgtctgacccttcagtgcaggccagcctggcagctggaagcctcccccacgccgaggctttggagtgaacagcccgcttggctgtggcatctcagtcctatttttgagtttttttgtgggggtacaggagggggccttcaagctgtactgtgagcagacgcattggtattatcattcaaagcagtctccctcttatttgtaagtttacatttttagcggaaactactaaattattttgggtggttcagccaaacctcaaaacagttaatctccctggtttaaaatcacaccagtggctttgatgttgtttctgccccgcattgtattttataggaatagtgaaaacatttagggacacccaaagaatgatgcagtattaaaggggtggtagaagctgctgtttatgataaaagtcatcggtcagaaaatcagcttggattggtgccaagtgttttattgggtaacaccctgggagttttagtagcttgaggcaaggtggaggggcaagaagtccttggggaagctgctggtctgggtgctgctggcctccaagctggcagtgggaagggctagtgagaccacacaggggtagccccagcagcagcaccctgcaagccagcctggccagctgctcagaccagcttgcagagccgcagccgctgtgggcagggggtgtggcaggagctcccagcactggagacccacggactcaacccagttacctcacatggggccttttctgagcaaggtctcgaaagcgcaggccgccctggctgagcagcaccgccctttcccagctgcactcgccctgtggacagccccgacacaccactttcctgaggctgtcgctcactcagattgtccgtttgctatgccgaatgcagccaaaattcctttttacaatttgtgatgccttaccgatttgatcttaatcctgtatttaaagttttctaacactgccttatactgtgtttctctttttgggggagcttaactgcttgttgctccctgtcgtctgcaccatagtaaatgccacaagggtagtcgaacacctctctggcccctagacctatctggggacaggctggctcagcctgtctccagggctgctgcggcccagccccgagcctgcctccctcttggcctctcatccattggctctgcagggcaggggtgaggcaggtttctgctcataagtgcttttggaagtcacctacctttttaacacagccgaactagtcccaacgcgtttgcaaatattcccctggtagcctacttccttacccccgaatattggtaagatcgagcaatggcttcaggacatgggttctcttctcctgtgatcattcaagtgctcactgcatgaagactggcttgtctcagtgtttcaacctcaccagggctgtctcttggtccacacctcgctccctgttagtgccgtatgacagcccccatcaaatgaccttggccaagtcacggtttctctgtggtcaaggttggttggctgattggtggaaagtagggtggaccaaaggaggccacgtgagcagtcagcaccagttctgcaccagcagcgcctccgtcctagtgggtgttcctgtttctcctggccctgggtgggctagggcctgattcgggaagatgcctttgcagggaggggaggataagtgggatctaccaattgattctggcaaaacaatttctaagatttttttgctttatgtgggaaacagatctaaatctcattttatgctgtattttatatcttagttgtgtttgaaaacgttttgatttttggaaacacatcaaaataaataatggcgtttgttgta

SEQ ID NO: 414667 - DNA, 3177 bp, Homo sapiens
cagtgtgccctgtttgcccactctcagaccccggagttcatcaatctcggagccgctggccaatatgtactcatgtgggaaccagccgacgcggagcgaggccggccgccgggcacttcctgtggaggccgcagcgggtgcgggcgccgacgggcgagagccagcgagcgagcgagcgagccgagccgagcctcccgccgtcgccatgggccagaacgacctgatgggcacggccgaggacttcgccgaccagttcctccgtgtcacaaagcagtacctgccccacgtggcgcgcctctgtctgatcagcaccttcctggaggacggcatccgtatgtggttccagtggagcgagcagcgcgactacatcgacaccacctggaactgcggctacctgctggcctcgtccttcgtcttcctcaacttgctgggacagctgactggctgcgtcctggtgttgagcaggaacttcgtgcagtacgcctgcttcgggctctttggaatcatagctctgcagacgattgcctacagcattttatgggacttgaagtttttgatgaggaacctggccctgggaggaggcctgttgctgctcctagcagaatcccgttctgaagggaagagcatgtttgcgggcgtccccaccatgcgtgagagctcccccaaacagtacatgcagctcggaggcagggtcttgctggttctgatgttcatgaccctccttcactttgacgccagcttcttttctcagccgtctcagcagtagctacatcagcctgatggatagagacttcatgacgtgcagcagctggaacttttgtttataaagcatctcttttcctcacatttattttgaatttcttacgtttcaacctatgcagattgtccagaacatcgtgggcacagctctgatgattttagtggccattggttttaaaaccaagctggctgctttgactcttgttgtgtggctctttgccatcaacgtatatttcaacgccttctggaccattccagtctacaagcccatgcatgacttcctgaaatacgacttcttccagaccatgtcggtgattgggggcttgctcctggtggtggccctgggccctgggggtgtctccatggatgagaagaagaaggagtggtaacagtcacagatccctacctgcctggctaagacccgtggccgtcaaggactggttcggggtggattcaacaaaactgccagcttttatgtatcctcttcccttcccctcccttggtaaaggcacagatgttttgagaactttatttgcagagacacctgagaatcgatggctcagtctgctctggagccacagtctggcgtctgacccttcagtgcaggccagcctggcagctggaagcctcccccacgccgaggctttggagtgaacagcccgcttggctgtggcatctcagtcctatttttgagtttttttgtgggggtacaggagggggccttcaagctgtactgtgagcagacgcattggtattatcattcaaagcagtctccctcttatttgtaagtttacatttttagcggaaactactaaattattttgggtggttcagccaaacctcaaaacagttaatctccctggtttaaaatcacaccagtggctttgatgttgtttctgccccgcattgtattttataggaatagtgaaaacatttagggacacccaaagaatgatgcagtattaaaggggtggtagaagctgctgtttatgataaaagtcatcggtcagaaaatcagcttggattggtgccaagtgttttattgggtaacaccctgggagttttagtagcttgaggcaaggtggaggggcaagaagtccttggggaagctgctggtctgggtgctgctggcctccaagctggcagtgggaagggctagtgagaccacacaggggtagccccagcagcagcaccctgcaagccagcctggccagctgctcagaccagcttgcagagccgcagccgctgtgggcagggggtgtggcaggagctcccagcactggagacccacggactcaacccagttacctcacatggggccttttctgagcaaggtctcgaaagcgcaggccgccctggctgagcagcaccgccctttcccagctgcactcgccctgtggacagccccgacacaccactttcctgaggctgtcgctcactcagattgtccgtttgctatgccgaatgcagccaaaattcctttttacaatttgtgatgccttaccgatttgatcttaatcctgtatttaaagttttctaacactgccttatactgtgtttctctttttgggggagcttaactgcttgttgctccctgtcgtctgcaccatagtaaatgccacaagggtagtcgaacacctctctggcccctagacctatctggggacaggctggctcagcctgtctccagggctgctgcggcccagccccgagcctgcctccctcttggcctctcatccattggctctgcagggcaggggtgaggcaggtttctgctcataagtgcttttggaagtcacctacctttttaacacagccgaactagtcccaacgcgtttgcaaatattcccctggtagcctacttccttacccccgaatattggtaagatcgagcaatggcttcaggacatgggttctcttctcctgtgatcattcaagtgctcactgcatgaagactggcttgtctcagtgtttcaacctcaccagggctgtctcttggtccacacctcgctccctgttagtgccgtatgacagcccccatcaaatgaccttggccaagtcacggtttctctgtggtcaaggttggttggctgattggtggaaagtagggtggaccaaaggaggccacgtgagcagtcagcaccagttctgcaccagcagcgcctccgtcctagtgggtgttcctgtttctcctggccctgggtgggctagggcctgattcgggaagatgcctttgcagggaggggaggataagtgggatctaccaattgattctggcaaaacaatttctaagatttttttgctttatgtgggaaacagatctaaatctcattttatgctgtattttatatcttagttgtgtttgaaaacgttttgatttttggaaacacatcaaaataaataatggcgtttgttgta

SEQ ID NO: 414668 - DNA, 3146 bp, Homo sapiens
cgccattctcctgcctcagcctcccgagcagctgggactacaggcgcctgccaacacgcctggctaattttttgtatttttagtagagacagggtttcaccgtgttagccaggatggtctcgatctcctgacccctcgtgatctgcctgtctcagcctcccaaattgctgggattacaggcgtgagccaccgtgctcggcggagcaaactttttgatcccattaaaacagaccaaaacatcgtcaatctcttgtgtgtcaagccttctttccagcaaatgaaggccagaacctctgaccttggtggagtgtgcttggcccttggttggccaaggctctccacccgggctccccttactcttctttctttcctcactgttcgtatctttctcaagtaattcctgtgtgtcaggtgtcaggggcaggcctccaggagcttccagagcacacctccggagctgactgagagccctggccgggtagtgtccaggaagagctcctggcgccatggagagaggagagaggatgtttctggcctggatggctgggtgggccaagaagcacttgggaatttagttatggattagagattcatcttggtaaatcacagcctgttactagttgggaacttcagtcttccccaaaccttccacatttcaaagctggtgctttattgcctcctgcctccctttggcttttatctccctacttgcaccagcagccgtctcagcagtagctacatcagcctgatggatagagacttcatgacgtgcagcagctggaacttttgtttataaagcatctcttttcctcacatttattttgaatttcttacgtttcaacctatgcagattgtccagaacatcgtgggcacagctctgatgattttagtggccattggttttaaaaccaagctggctgctttgactcttgttgtgtggctctttgccatcaacgtatatttcaacgccttctggaccattccagtctacaagcccatgcatgacttcctgaaatacgacttcttccagaccatgtcggtgattgggggcttgctcctggtggtggccctgggccctgggggtgtctccatggatgagaagaagaaggagtggtaacagtcacagatccctacctgcctggctaagacccgtggccgtcaaggactggttcggggtggattcaacaaaactgccagcttttatgtatcctcttcccttcccctcccttggtaaaggcacagatgttttgagaactttatttgcagagacacctgagaatcgatggctcagtctgctctggagccacagtctggcgtctgacccttcagtgcaggccagcctggcagctggaagcctcccccacgccgaggctttggagtgaacagcccgcttggctgtggcatctcagtcctatttttgagtttttttgtgggggtacaggagggggccttcaagctgtactgtgagcagacgcattggtattatcattcaaagcagtctccctcttatttgtaagtttacatttttagcggaaactactaaattattttgggtggttcagccaaacctcaaaacagttaatctccctggtttaaaatcacaccagtggctttgatgttgtttctgccccgcattgtattttataggaatagtgaaaacatttagggacacccaaagaatgatgcagtattaaaggggtggtagaagctgctgtttatgataaaagtcatcggtcagaaaatcagcttggattggtgccaagtgttttattgggtaacaccctgggagttttagtagcttgaggcaaggtggaggggcaagaagtccttggggaagctgctggtctgggtgctgctggcctccaagctggcagtgggaagggctagtgagaccacacaggggtagccccagcagcagcaccctgcaagccagcctggccagctgctcagaccagcttgcagagccgcagccgctgtgggcagggggtgtggcaggagctcccagcactggagacccacggactcaacccagttacctcacatggggccttttctgagcaaggtctcgaaagcgcaggccgccctggctgagcagcaccgccctttcccagctgcactcgccctgtggacagccccgacacaccactttcctgaggctgtcgctcactcagattgtccgtttgctatgccgaatgcagccaaaattcctttttacaatttgtgatgccttaccgatttgatcttaatcctgtatttaaagttttctaacactgccttatactgtgtttctctttttgggggagcttaactgcttgttgctccctgtcgtctgcaccatagtaaatgccacaagggtagtcgaacacctctctggcccctagacctatctggggacaggctggctcagcctgtctccagggctgctgcggcccagccccgagcctgcctccctcttggcctctcatccattggctctgcagggcaggggtgaggcaggtttctgctcataagtgcttttggaagtcacctacctttttaacacagccgaactagtcccaacgcgtttgcaaatattcccctggtagcctacttccttacccccgaatattggtaagatcgagcaatggcttcaggacatgggttctcttctcctgtgatcattcaagtgctcactgcatgaagactggcttgtctcagtgtttcaacctcaccagggctgtctcttggtccacacctcgctccctgttagtgccgtatgacagcccccatcaaatgaccttggccaagtcacggtttctctgtggtcaaggttggttggctgattggtggaaagtagggtggaccaaaggaggccacgtgagcagtcagcaccagttctgcaccagcagcgcctccgtcctagtgggtgttcctgtttctcctggccctgggtgggctagggcctgattcgggaagatgcctttgcagggaggggaggataagtgggatctaccaattgattctggcaaaacaatttctaagatttttttgctttatgtgggaaacagatctaaatctcattttatgctgtattttatatcttagttgtgtttgaaaacgttttgatttttggaaacacatcaaaataaataatggcgtttgttgta

SEQ ID NO: 414669 - DNA, 2677 bp, Homo sapiens
cagtgtgccctgtttgcccactctcagaccccggagttcatcaatctcggagccgctggccaatatgtactcatgtgggaaccagccgacgcggagcgaggccggccgccgggcacttcctgtggaggccgcagcgggtgcgggcgccgacgggcgagagccagcgagcgagcgagcgagccgagccgagcctcccgccgtcgccatgggccagaacgacctgatgggcacggccgaggacttcgccgaccagttcctccgtgtcacaaagcagtacctgccccacgtggcgcgcctctgtctgatcagcaccttcctggaggacggcatccgtatgtggttccagtggagcgagcagcgcgactacatcgacaccacctggaactgcggctacctgctggcctcgtccttcgtcttcctcaacttgctgggacagctgactggctgcgtcctggtgttgagcaggaacttcgtgcagtacgcctgcttcgggctctttggaatcatagctctgcagacgattgcctacagcattttatgggacttgaagtttttgatgaggaacctggccctgggaggaggcctgttgctgctcctagcagaatcccgttctgaagggaagagcatgtttgcgggcgtccccaccatgcgtgagagctcccccaaacagtacctaagacccgtggccgtcaaggactggttcggggtggattcaacaaaactgccagcttttatgtatcctcttcccttcccctcccttggtaaaggcacagatgttttgagaactttatttgcagagacacctgagaatcgatggctcagtctgctctggagccacagtctggcgtctgacccttcagtgcaggccagcctggcagctggaagcctcccccacgccgaggctttggagtgaacagcccgcttggctgtggcatctcagtcctatttttgagtttttttgtgggggtacaggagggggccttcaagctgtactgtgagcagacgcattggtattatcattcaaagcagtctccctcttatttgtaagtttacatttttagcggaaactactaaattattttgggtggttcagccaaacctcaaaacagttaatctccctggtttaaaatcacaccagtggctttgatgttgtttctgccccgcattgtattttataggaatagtgaaaacatttagggacacccaaagaatgatgcagtattaaaggggtggtagaagctgctgtttatgataaaagtcatcggtcagaaaatcagcttggattggtgccaagtgttttattgggtaacaccctgggagttttagtagcttgaggcaaggtggaggggcaagaagtccttggggaagctgctggtctgggtgctgctggcctccaagctggcagtgggaagggctagtgagaccacacaggggtagccccagcagcagcaccctgcaagccagcctggccagctgctcagaccagcttgcagagccgcagccgctgtgggcagggggtgtggcaggagctcccagcactggagacccacggactcaacccagttacctcacatggggccttttctgagcaaggtctcgaaagcgcaggccgccctggctgagcagcaccgccctttcccagctgcactcgccctgtggacagccccgacacaccactttcctgaggctgtcgctcactcagattgtccgtttgctatgccgaatgcagccaaaattcctttttacaatttgtgatgccttaccgatttgatcttaatcctgtatttaaagttttctaacactgccttatactgtgtttctctttttgggggagcttaactgcttgttgctccctgtcgtctgcaccatagtaaatgccacaagggtagtcgaacacctctctggcccctagacctatctggggacaggctggctcagcctgtctccagggctgctgcggcccagccccgagcctgcctccctcttggcctctcatccattggctctgcagggcaggggtgaggcaggtttctgctcataagtgcttttggaagtcacctacctttttaacacagccgaactagtcccaacgcgtttgcaaatattcccctggtagcctacttccttacccccgaatattggtaagatcgagcaatggcttcaggacatgggttctcttctcctgtgatcattcaagtgctcactgcatgaagactggcttgtctcagtgtttcaacctcaccagggctgtctcttggtccacacctcgctccctgttagtgccgtatgacagcccccatcaaatgaccttggccaagtcacggtttctctgtggtcaaggttggttggctgattggtggaaagtagggtggaccaaaggaggccacgtgagcagtcagcaccagttctgcaccagcagcgcctccgtcctagtgggtgttcctgtttctcctggccctgggtgggctagggcctgattcgggaagatgcctttgcagggaggggaggataagtgggatctaccaattgattctggcaaaacaatttctaagatttttttgctttatgtgggaaacagatctaaatctcattttatgctgtattttatatcttagttgtgtttgaaaacgttttgatttttggaaacacatcaaaataaataatggcgtttgttgta

SEQ ID NO: 414670 - DNA, 2035 bp, Homo sapiens
agctcggtacccggtgtttatcgatgccaccctaagacccgtggccgtcaaggactggttcggggtggattcaacaaaactgccagcttttatgtatcctcttcccttcccctcccttggtaaaggcacagatgttttgagaactttatttgcagagacacctgagaatcgatggctcagtctgctctggagccacagtctggcgtctgacccttcagtgcaggccagcctggcagctggaagcctcccccacgccgaggctttggagtgaacagcccgcttggctgtggcatctcagtcctatttttgagtttttttgtgggggtacaggagggggccttcaagctgtactgtgagcagacgcattggtattatcattcaaagcagtctccctcttatttgtaagtttacatttttagcggaaactactaaattattttgggtggttcagccaaacctcaaaacagttaatctccctggtttaaaatcacaccagtggctttgatgttgtttctgccccgcattgtattttataggaatagtgaaaacatttagggacacccaaagaatgatgcagtattaaaggggtggtagaagctgctgtttatgataaaagtcatcggtcagaaaatcagcttggattggtgccaagtgttttattgggtaacaccctgggagttttagtagcttgaggcaaggtggaggggcaagaagtccttggggaagctgctggtctgggtgctgctggcctccaagctggcagtgggaagggctagtgagaccacacaggggtagccccagcagcagcaccctgcaagccagcctggccagctgctcagaccagcttgcagagccgcagccgctgtgggcagggggtgtggcaggagctcccagcactggagacccacggactcaacccagttacctcacatggggccttttctgagcaaggtctcgaaagcgcaggccgccctggctgagcagcaccgccctttcccagctgcactcgccctgtggacagccccgacacaccactttcctgaggctgtcgctcactcagattgtccgtttgctatgccgaatgcagccaaaattcctttttacaatttgtgatgccttaccgatttgatcttaatcctgtatttaaagttttctaacactgccttatactgtgtttctctttttgggggagcttaactgcttgttgctccctgtcgtctgcaccatagtaaatgccacaagggtagtcgaacacctctctggcccctagacctatctggggacaggctggctcagcctgtctccagggctgctgcggcccagccccgagcctgcctccctcttggcctctcatccattggctctgcagggcaggggtgaggcaggtttctgctcataagtgcttttggaagtcacctacctttttaacacagccgaactagtcccaacgcgtttgcaaatattcccctggtagcctacttccttacccccgaatattggtaagatcgagcaatggcttcaggacatgggttctcttctcctgtgatcattcaagtgctcactgcatgaagactggcttgtctcagtgtttcaacctcaccagggctgtctcttggtccacacctcgctccctgttagtgccgtatgacagcccccatcaaatgaccttggccaagtcacggtttctctgtggtcaaggttggttggctgattggtggaaagtagggtggaccaaaggaggccacgtgagcagtcagcaccagttctgcaccagcagcgcctccgtcctagtgggtgttcctgtttctcctggccctgggtgggctagggcctgattcgggaagatgcctttgcagggaggggaggataagtgggatctaccaattgattctggcaaaacaatttctaagatttttttgctttatgtgggaaacagatctaaatctcattttatgctgtattttatatcttagttgtgtttgaaaacgttttgatttttggaaacacatcaaaataaataatggcgtttgttgta

SEQ ID NO: 414671 - DNA, 2784 bp, Homo sapiens
cagtgtgccctgtttgcccactctcagaccccggagttcatcaatctcggagccgctggccaatatgtactcatgtgggaaccagccgacgcggagcgaggccggccgccgggcacttcctgtggaggccgcagcgggtgcgggcgccgacgggcgagagccagcgagcgagcgagcgagccgagccgagcctcccgccgtcgccatgggccagaacgacctgatgggcacggccgaggacttcgccgaccagttcctccgtgtcacaaagcagtacctgccccacgtggcgcgcctctgtctgatcagcaccttcctggaggacggcatccgtatgtggttccagtggagcgagcagcgcgactacatcgacaccacctggaactgcggctacctgctggcctcgtccttcgtcttcctcaacttgctgggacagctgactggctgcgtcctggtgttgagcaggaacttcgtgcagtacgcctgcttcgggctctttggaatcatagctctgcagacgattgcctacagcattttatgggacttgaagtttttgatgaggaacctggccctgggaggaggcctgttgctgctcctagcagaatcccgttctgaagggaagagcatgtttgcgggcgtccccaccatgcgtgagagctcccccaaacagtacatgcagctcggaggcagggtcttgctggttctgatgttcatgaccctccttcactttgacgccagcttcttttctattgtccagaacatcgtgggcacagctctgatgattttagtggccattggttttaaaaccaagctggctgctttgactcttgttgtgtggctctttgccatcaacgtatatttcaacgccttctggaccattccagtctacaagcccatgcatgacttcctgaaatacgacttcttccagaccatgtcggtgattgggggcttgctcctggtggtggccctgggccctgggggtgtctccatggatgagaagaagaaggagtggtaacagtcacagatccctacctgcctggctaagacccgtggccgtcaaggactggttcggggtggattcaacaaaactgccagcttttatgtatcctcttcccttcccctcccttggtaaaggcacagatgttttgagaactttatttgcagagacacctgagaatcgatggctcagtctgctctggagccacagtctggcgtctgacccttcagtgcaggccagcctggcagctggaagcctcccccacgccgaggctttggagtgaacagcccgcttggctgtggcatctcagtcctatttttgagtttttttgtgggggtacaggagggggccttcaagctgtactgtgagcagacgcattggtattatcattcaaagcagtctccctcttatttgtaagtttacatttttagcggaaactactaaattattttgggtggttcagccaaacctcaaaacagttaatctccctggtttaaaatcacaccagtggctttgatgttgtttctgccccgcattgtattttataggaatagtgaaaacatttagggacacccaaagaatgatgcagtattaaaggggtggtagaagctgctgtttatgataaaagtcatcggtcagaaaatcagcttggattggtgccaagtgttttattgggtaacaccctgggagttttagtagcttgaggcaaggtggaggggcaagaagtccttggggaagctgctggtctgggtgctgctggcctccaagctggcagtgggaagggctagtgagaccacacaggggtagccccagcagcagcaccctgcaagccagcctggccagctgctcagaccagcttgcagagccgcagccgctgtgggcagggggtgtggcaggagctcccagcactggagacccacggactcaacccagttacctcacatggggccttttctgagcaaggtctcgaaagcgcaggccgccctggctgagcagcaccgccctttcccagctgcactcgccctgtggacagccccgacacaccactttcctgaggctgtcgctcactcagattgtccgtttgctatgccgaatgcagccaaaattcctttttacaatttgtgatgccttaccgatttgatcttaatcctgtatttaaagttttctaacactgccttatactgtgtttctctttttgggggagcttaactgcttgttgctccctgtcgtctgcaccatagtaaatgccacaagggtagtcgaacacctctctggcccctagacctatctggggacaggctggctcagcctgtctccagggctgctgcggcccagccccgagcctgcctccctcttggcctctcatccattggctctgcagggcaggggtgaggcaggtttctgctcataagtgcttttggaagtcacctacctttttaacacagccgaactagtcccaacgcgtttgcaaatattcccctggtagcctacttccttacccccgaatattggtaagatcgagcaatggcttcaggacatgggttctcttttcctgtttctcctggccctgggtgggctagggcctgattcgggaagatgcctttgcagggaggggaggataagtgggatctaccaattgattctggcaaaacaatttctaagatttttttgctttatgtgggaaacagatctaaatctcattttatgctgtattttatatcttagttgtgtttgaaaacgttttgatttttggaaacacatcaaaataaataatggcgtttgttgta

SEQ ID NO: 414672 - DNA, 1525 bp, Homo sapiens
tgtctaaatgttttcactatagccaagatatgaaatcaacctaagcgtccaccaaagaatgatgcagtattaaaggggtggtagaagctgctgtttatgataaaagtcatcggtcagaaaatcagcttggattggtgccaagtgttttattgggtaacaccctgggagttttagtagcttgaggcaaggtggaggggcaagaagtccttggggaagctgctggtctgggtgctgctggcctccaagctggcagtgggaagggctagtgagaccacacaggggtagccccagcagcagcaccctgcaagccagcctggccagctgctcagaccagcttgcagagccgcagccgctgtgggcagggggtgtggcaggagctcccagcactggagacccacggactcaacccagttacctcacatggggccttttctgagcaaggtctcgaaagcgcaggccgccctggctgagcagcaccgccctttcccagctgcactcgccctgtggacagccccgacacaccactttcctgaggctgtcgctcactcagattgtccgtttgctatgccgaatgcagccaaaattcctttttacaatttgtgatgccttaccgatttgatcttaatcctgtatttaaagttttctaacactgccttatactgtgtttctctttttgggggagcttaactgcttgttgctccctgtcgtctgcaccatagtaaatgccacaagggtagtcgaacacctctctggcccctagacctatctggggacaggctggctcagcctgtctccagggctgctgcggcccagccccgagcctgcctccctcttggcctctcatccattggctctgcagggcaggggtgaggcaggtttctgctcataagtgcttttggaagtcacctacctttttaacacagccgaactagtcccaacgcgtttgcaaatattcccctggtagcctacttccttacccccgaatattggtaagatcgagcaatggcttcaggacatgggttctcttctcctgtgatcattcaagtgctcactgcatgaagactggcttgtctcagtgtttcaacctcaccagggctgtctcttggtccacacctcgctccctgttagtgccgtatgacagcccccatcaaatgaccttggccaagtcacggtttctctgtggtcaaggttggttggctgattggtggaaagtagggtggaccaaaggaggccacgtgagcagtcagcaccagttctgcaccagcagcgcctccgtcctagtgggtgttcctgtttctcctggccctgggtgggctagggcctgattcgggaagatgcctttgcagggaggggaggataagtgggatctaccaattgattctggcaaaacaatttctaagatttttttgctttatgtgggaaacagatctaaatctcattttatgctgtattttatatcttagttgtgtttgaaaacgttttgatttttggaaacacatcaaaataaataatggcgtttgttgta

SEQ ID NO: 414673 - DNA, 1416 bp, Homo sapiens
gctgacttcgtgattctaggtggcatgctggctgtagcacagtgagtcaggtagtgagctcatcgagacttgaggcaaggtggaggggcaagaagtccttggggaagctgctggtctgggtgctgctggcctccaagctggcagtgggaagggctagtgagaccacacaggggtagccccagcagcagcaccctgcaagccagcctggccagctgctcagaccagcttgcagagccgcagccgctgtgggcagggggtgtggcaggagctcccagcactggagacccacggactcaacccagttacctcacatggggccttttctgagcaaggtctcgaaagcgcaggccgccctggctgagcagcaccgccctttcccagctgcactcgccctgtggacagccccgacacaccactttcctgaggctgtcgctcactcagattgtccgtttgctatgccgaatgcagccaaaattcctttttacaatttgtgatgccttaccgatttgatcttaatcctgtatttaaagttttctaacactgccttatactgtgtttctctttttgggggagcttaactgcttgttgctccctgtcgtctgcaccatagtaaatgccacaagggtagtcgaacacctctctggcccctagacctatctggggacaggctggctcagcctgtctccagggctgctgcggcccagccccgagcctgcctccctcttggcctctcatccattggctctgcagggcaggggtgaggcaggtttctgctcataagtgcttttggaagtcacctacctttttaacacagccgaactagtcccaacgcgtttgcaaatattcccctggtagcctacttccttacccccgaatattggtaagatcgagcaatggcttcaggacatgggttctcttctcctgtgatcattcaagtgctcactgcatgaagactggcttgtctcagtgtttcaacctcaccagggctgtctcttggtccacacctcgctccctgttagtgccgtatgacagcccccatcaaatgaccttggccaagtcacggtttctctgtggtcaaggttggttggctgattggtggaaagtagggtggaccaaaggaggccacgtgagcagtcagcaccagttctgcaccagcagcgcctccgtcctagtgggtgttcctgtttctcctggccctgggtgggctagggcctgattcgggaagatgcctttgcagggaggggaggataagtgggatctaccaattgattctggcaaaacaatttctaagatttttttgctttatgtgggaaacagatctaaatctcattttatgctgtattttatatcttagttgtgtttgaaaacgttttgatttttggaaacacatcaaaataaataatggcgtttgttgta

SEQ ID NO: 414674 - DNA, 1643 bp, Homo sapiens
cagtgtgccctgtttgcccactctcagaccccggagttcatcaatctcggagccgctggccaatatgtactcatgtgggaaccagccgacgcggagcgaggccggccgccgggcacttcctgtggaggccgcagcgggtgcgggcgccgacgggcgagagccagcgagcgagcgagcgagccgagccgagcctcccgccgtcgccatgggccagaacgacctgatgggcacggccgaggacttcgccgaccagttcctccgtgtcacaaagcagtacctgccccacgtggcgcgcctctgtctgatcagcaccttcctggaggacggcatccgtatgtggttccagtggagcgagcagcgcgactacatcgacaccacctggaactgcggctacctgctggcctcgtccttcgtcttcctcaacttgctgggacagctgactggctgcgtcctggtgttgagcaggaacttcgtgcagtacgcctgcttcgggctctttggaatcatagctctgcagacgattgcctacagcattttatgggacttgaagtttttgatgaggaacctggccctgggaggaggcctgttgctgctcctagcagaatcccgttctgaagggaagagcatgtttgcgggcgtccccaccatgcgtgagagctcccccaaacagtacatgcagctcggaggcagggtcttgctggttctgatgttcatgaccctccttcactttgacgccagcttcttttctattgtccagaacatcgtgggcacagctctgatgattttagtggccattggttttaaaaccaagctggctgctttgactcttgttgtgtggctctttgccatcaacgtatatttcaacgccttctggaccattccagtctacaagcccatgcatgacttcctgaaatacgacttcttccagaccatgtcggtgattgggggcttgctcctggtggtggccctgggccctgggggtgtctccatggatgagaagaagaaggagtggtaacagtcacagatccctacctgcctggctaagacccgtggccgtcaaggactggttcggggtggattcaacaaaactgccagcttttatgtatcctcttcccttcccctcccttggtaaaggcacagatgttttgagaactttatttgcagagacacctgagaatcgatggctcagtctgctctggagccacagtctggcgtctgacccttcagtgcaggccagcctggcagctggaagcctcccccacgccgaggctttggagtgaacagcccgcttggctgtggcatctcagtcctatttttgagtttttttgtgggggtacaggagggggccttcaagctgtactgtgagcagacgcattggtattatcattcaaagcagtctccctcttatttgtaagtttacatttttagcggaaactactaaattattttgggtggttcagccaaacctcaaaacagttaatctccctggtttaaaatcacaccagtggctttgatgttgtttctgccccgcattgtattttataggaatagtgaaaacatttagggacacccaaagaatgatgcagtattaaaggggtggtagaagctgctgtttatgataaaagtcatcggtcagaaaatca

SEQ ID NO: 414675 - DNA, 1656 bp, Homo sapiens
cagtgtgccctgtttgcccactctcagaccccggagttcatcaatctcggagccgctggccaatatgtactcatgtgggaaccagccgacgcggagcgaggccggccgccgggcacttcctgtggaggccgcagcgggtgcgggcgccgacgggcgagagccagcgagcgagcgagcgagccgagccgagcctcccgccgtcgccatgggccagaacgacctgatgggcacggccgaggacttcgccgaccagttcctccgtgtcacaaagcagtacctgccccacgtggcgcgcctctgtctgatcagcaccttcctggaggacggcatccgtatgtggttccagtggagcgagcagcgcgactacatcgacaccacctggaactgcggctacctgctggcctcgtccttcgtcttcctcaacttgctgggacagctgactggctgcgtcctggtgttgagcaggaacttcgtgcagtacgcctgcttcgggctctttggaatcatagctctgcagacgattgcctacagcattttatgggacttgaagtttttgatgaggaacctggccctgggaggaggcctgttgctgctcctagcagaatcccgttctgaagggaagagcatgtttgcgggcgtccccaccatgcgtgagagctcccccaaacagtacatgcagctcggaggcagggtcttgctggttctgatgttcatgaccctccttcactttgacgccagcttcttttctattgtccagaacatcgtgggcacagctctgatgattttagtggccattggttttaaaaccaagctggctgctttgactcttgttgtgtggctctttgccatcaacgtatatttcaacgccttctggaccattccagtctacaagcccatgcatgacttcctgaaatacgacttcttccagaccatgtcggtgattgggggcttgctcctggtggtggccctgggccctgggggtgtctccatggatgagaagaagaaggagtggtaacagtcacagatccctacctgcctggctaagacccgtggccgtcaaggactggttcggggtggattcaacaaaactgccagcttttatgtatcctcttcccttcccctcccttggtaaaggcacagatgttttgagaactttatttgcagagacacctgagaatcgatggctcagtctgctctggagccacagtctggcgtctgacccttcagtgcaggccagcctggcagctggaagcctcccccacgccgaggctttggagtgaacagcccgcttggctgtggcatctcagtcctatttttgagtttttttgtgggggtacaggagggggccttcaagctgtactgtgagcagacgcattggtattatcattcaaagcagtctccctcttatttgtaagtttacatttttagcggaaactactaaattattttgggtggttcagccaaacctcaaaacagttaatctccctggtttaaaatcacaccagtggctttgatgttgtttctgccccgcattgtattttataggaatagtttatgctgtaatagtttatgctgtaatagtttatgctgtaatagtttatgctgtaatagtttatgctgtaatagtttatgctgtaatagtttatgctgtaatag

SEQ ID NO: 414676 - DNA, 809 bp, Homo sapiens
gcgaattcactagtgattctgctccgcccctctctggcccctagacctatctggggacaggctggctcagcctgtctccagggctgctgcggcccagccccgagcctgcctccctcttggcctctcatccattggctctgcagggcaggggtgaggcaggtttctgctcataagtgcttttggaagtcacctacctttttaacacagccgaactagtcccaacgcgtttgcaaatattcccctggtagcctacttccttacccccgaatattggtaagatcgagcaatggcttcaggacatgggttctcttctcctgtgatcattcaagtgctcactgcatgaagactggcttgtctcagtgtttcaacctcaccagggctgtctcttggtccacacctcgctccctgttagtgccgtatgacagcccccatcaaatgaccttggccaagtcacggtttctctgtggtcaaggttggttggctgattggtggaaagtagggtggaccaaaggaggccacgtgagcagtcagcaccagttctgcaccagcagcgcctccgtcctagtgggtgttcctgtttctcctggccctgggtgggctagggcctgattcgggaagatgcctttgcagggaggggaggataagtgggatctaccaattgattctggcaaaacaatttctaagatttttttgctttatgtgggaaacagatctaaatctcattttatgctgtattttatatcttagttgtgtttgaaaacgttttgatttttggaaacacatcaaaataaataatggcgtttgttgta

SEQ ID NO: 414677 - DNA, 1048 bp, Homo sapiens
cagtgtgccctgtttgcccactctcagaccccggagttcatcaatctcggagccgctggccaatatgtactcatgtgggaaccagccgacgcggagcgaggccggccgccgggcacttcctgtggaggccgcagcgggtgcgggcgccgacgggcgagagccagcgagcgagcgagcgagccgagccgagcctcccgccgtcgccatgggccagaacgacctgatgggcacggccgaggacttcgccgaccagttcctccgtgtcacaaagcagtacctgccccacgtggcgcgcctctgtctgatcagcaccttcctggaggacggcatccgtatgtggttccagtggagcgagcagcgcgactacatcgacaccacctggaactgcggctacctgctggcctcgtccttcgtcttcctcaacttgctgggacagctgactggctgcgtcctggtgttgagcaggaacttcgtgcagtacgcctgcttcgggctctttggaatcatagctctgcagacgattgcctacagcattttatgggacttgaagtttttgatgaggaacctggccctgggaggaggcctgttgctgctcctagcagaatcccgttctgaagggaagagcatgtttgcgggcgtccccaccatgcgtgagagctcccccaaacagtacatgcagctcggaggcagggtcttgctggttctgatgttcatgaccctccttcactttgacgccagcttcttttctattgtccagaacatcgtgggcacagctctgatgattttagtggccattggttttaaaaccaagctggctgctttgactcttgttgtgtggctctttgccatcaacgtatatttcaacgccttctggaccattccagtctacaagcccatgcatgacttcctgaaatacgacttcttccagaccacgtgagggaggctctcatgagtgcctggcctgggggttcatgatgaagacagcgtggacgcagccctctgccggtaccggcggaggtgcggggaaacacagccgatagaccactac

SEQ ID NO: 414678 - DNA, 1067 bp, Homo sapiens
cagtgtgccctgtttgcccactctcagaccccggagttcatcaatctcggagccgctggccaatatgtactcatgtgggaaccagccgacgcggagcgaggccggccgccgggcacttcctgtggaggccgcagcgggtgcgggcgccgacgggcgagagccagcgagcgagcgagcgagccgagccgagcctcccgccgtcgccatgggccagaacgacctgatgggcacggccgaggacttcgccgaccagttcctccgtgtcacaaagcagtacctgccccacgtggcgcgcctctgtctgatcagcaccttcctggaggacggcatccgtatgtggttccagtggagcgagcagcgcgactacatcgacaccacctggaactgcggctacctgctggcctcgtccttcgtcttcctcaacttgctgggacagctgactggctgcgtcctggtgttgagcaggaacttcgtgcagtacgcctgcttcgggctctttggaatcatagctctgcagacgattgcctacagcattttatgggacttgaagtttttgatgaggaacctggccctgggaggaggcctgttgctgctcctagcagaatcccgttctgaagggaagagcatgtttgcgggcgtccccaccatgcgtgagagctcccccaaacagtacatgcagctcggaggcagggtcttgctggttctgatgttcatgaccctccttcactttgacgccagcttcttttctattgtccagaacatcgtgggcacagctctgatgattttagtggccattggttttaaaaccaagctggctgctttgactcttgttgtgtggctctttgccatcaacgtatatttcaacgccttctggaccattccagtctacaagcccatgcctccgagctgcatgtactgtttgggggagctctcacgcatgttgggtacgcccgcaaacatgctcttcccttcagaacgggattctgctaggagcagcaacagcctcctacaccagggccaggttcctcatcgaaaacttcaagctactagactcccgggatcacaga

SEQ ID NO: 414679 - DNA, 412 bp, Homo sapiens
tccacagtagagcagttaattgcctacctcaggtgggtggctgacttgggagctgattgtgggaaacagcccattctttatgacggcaagggctccactttctggtgtttgtgataagtctagtcagcttaccatgtgtggtccttgcctatcattaattcttccagaagttgtcttttgcttgggtaggtggtttggctgcctctggacctaagggccaggtgaggtagcagtgtatcaagacagtgctccccgccggcacccaccctcaggccccctaacccttgtccttctctccagctggctgcgtcctggtgttgagcaggaacttcgtgcagtacgcctgcttcgggctctttggaatcatagctctgcaggtacacgggccgcgtggtcggggctcccttctctt

SEQ ID NO: 414680 - DNA, 415 bp, Homo sapiens
agctcggtacccggtgtttatcgatgccacccccccatcaaatgaccttggccaagtcacggtttctctgtggtcaaggttggttggctgattggtggaaagtagggtggaccaaaggaggccacgtgagcagtcagcaccagttctgcaccagcagcgcctccgtcctagtgggtgttcctgtttctcctggccctgggtgggctagggcctgattcgggaagatgcctttgcagggaggggaggataagtgggatctaccaattgattctggcaaaacaatttctaagatttttttgctttatgtgggaaacagatctaaatctcattttatgctgtattttatatcttagttgtgtttgaaaacgttttgatttttggaaacacatcaaaataaataatggcgtttgttgta

SEQ ID NO: 414681 - DNA, 3306 bp, Homo sapiens
cagtgtgccctgtttgcccactctcagaccccggagttcatcaatctcggagccgctggccaatatgtactcatgtgggaaccagccgacgcggagcgaggccggccgccgggcacttcctgtggaggccgcagcgggtgcgggcgccgacgggcgagagccagcgagcgagcgagcgagccgagccgagcctcccgccgtcgccatgggccagaacgacctgatgggcacggccgaggacttcgccgaccagttcctccgtgtcacaaagcagtacctgccccacgtggcgcgcctctgtctgatcagcaccttcctggaggacggcatccgtatgtggttccagtggagcgagcagcgcgactacatcgacaccacctggaactgcggctacctgctggcctcgtccttcgtcttcctcaacttgctgggacagctgactggctgcgtcctggtgttgagcaggaacttcgtgcagtacgcctgcttcgggctctttggaatcatagctctgcagacgattgcctacagcattttatgggacttgaagtttttgatgaggaacctggccctgggaggaggcctgttgctgctcctagcagaatcccgttctgaagggaagagcatgtttgcgggcgtccccaccatgcgtgagagctcccccaaacagtacatgcagctcggaggcagggtcttgctggttctgatgttcatgaccctccttcactttgacgccagcttcttttctattgtccagaacatcgtgggcacagctctgatgattttagtggccattggttttaaaaccaagctggctgctttgactcttgttgtgtggctctttgccatcaacgtatatttcaacgccttctggaccattccagtctacaagcccatgcatgacttcctgaaatacgacttcttccagaccatgtcggtgattgggggcttgctcctggtggtggccctgggccctgggggtgtctccatggatgagaagaagaaggagtggtaacagtcacagatccctacctgcctggctaagacccgtggccgtcaaggactggttcggggtggattcaacaaaactgccagcttttatgtatcctcttcccttcccctcccttggtaaaggcacagatgttttgagaactttatttgcagagacacctgagaatcgatggctcagtctgctctggagccacagtctggcgtctgacccttcagtgcaggccagcctggcagctggaagcctcccccacgccgaggctttggagtgaacagcccgcttggctgtggcatctcagtcctatttttgagtttttttgtgggggtacaggagggggccttcaagctgtactgtgagcagacgcattggtattatcattcaaagcagtctccctcttatttgtaagtttacatttttagcggaaactactaaattattttgggtggttcagccaaacctcaaaacagttaatctccctggtttaaaatcacaccagtggctttgatgttgtttctgccccgcattgtattttataggaatagtgaaaacatttagggacacccaaagaatgatgcagtattaaaggggtggtagaagctgctgtttatgataaaagtcatcggtcagaaaatcagcttggattggtgccaagtgttttattgggtaacaccctgggagttttagtagcttgaggcaaggtggaggggcaagaagtccttggggaagctgctggtctgggtgctgctggcctccaagctggcagtgggaagggctagtgagaccacacaggggtagccccagcagcagcaccctgcaagccagcctggccagctgctcagaccagcttgcagagccgcagccgctgtgggcagggggtgtggcaggagctcccagcactggagacccacggactcaacccagttacctcacatggggccttttctgagcaaggtctcgaaagcgcaggccgccctggctgagcagcaccgccctttcccagctgcactcgccctgtggacagccccgacacaccactttcctgaggctgtcgctcactcagattgtccgtttgctatgccgaatgcagccaaaattcctttttacaatttgtgatgccttaccgatttgatcttaatcctgtatttaaagttttctaacactgccttatactgtgtttctctttttgggggagcttaactgcttgttgctccctgtcgtctgcaccatagtaaatgccacaagggtagtcgaacacctctctggcccctagacctatctggggacaggctggctcagcctgtctccagggctgctgcggcccagccccgagcctgcctccctcttggcctctcatccattggctctgcagggcaggggtgaggcaggtttctgctcataagtgcttttggaagtcacctacctttttaacacagccgaactagtcccaacgcgtttgcaaatattcccctggtagcctacttccttacccccgaatattggtaagatcgagcaatggcttcaggacatgggttctcttctcctgtgatcattcaagtgctcactgcatgaagactggcttgtctcagtgtttcaacctcaccagggctgtctcttggtccacacctcgctccctgttagtgccgtatgacagcccccatcaaatgaccttggccaagtcacggtttctctgtggtcaaggttggttggctgattggtggaaagtagggtggaccaaaggaggccacgtgagcagtcagcaccagttctgcaccagcagcgcctccgtcctagtgggtgttcctgtttctcctggccctgggtgggctagggcctgattcgggaagatgcctttgcagggaggggaggataagtgggatctaccaattgattctggcaaaacaatttctaagatttttttgctttatgtgggaaacagatctaaatctcattttatgctgtattttatatcttagttgtgtttgaaaacgttttgatttttggaaacacatcaaaataaataatggcgtttgttgtaaaaaaaaaaaaaaaaaaaaaaaatttggggggccgcgtccgaccccggaaaaatgtttttcaaacccatccggtgtggggcgccgggccccatgatggtattgcaccttggcaagccgtggcccaaagaaactctgcgccgcgacgtggtggttttcccaccataaaaagcgcggcgacaccgcgtttcggaccatccgaggcgtccgcgctccggtctccgacagggccagagtcgtatacgccgcgccggagggagacag

SEQ ID NO: 414682 - DNA, 2797 bp, Homo sapiens
ttgcttggtggtactcctgcccagtgccaggttcctcatcaaaaacttcaagtcccataaaatgctgtaggcaatcgtctgcagagctattgattccagtggagcgagcagcgcgactacatcgacaccacctggaactgcggctacctgctggcctcgtccttcgtcttcctcaacttgctgggacagctgactggctgcgtcctggtgttgagcaggaacttcgtgcagtacgcctgcttcgggctctttggaatcatagctctgcagacgattgcctacagcattttatgggacttgaagtttttgatgaggaacctggccctgggaggaggcctgttgctgctcctagcagaatcccgttctgaagggaagagcatgtttgcgggcgtccccaccatgcgtgagagctcccccaaacagtacatgcagctcggaggcagggtcttgctggttctgatgttcatgaccctccttcactttgacgccagcttcttttctattgtccagaacatcgtgggcacagctctgatgattttagtggccattggttttaaaaccaagctggctgctttgactcttgttgtgtggctctttgccatcaacgtatatttcaacgccttctggaccattccagtctacaagcccatgcatgacttcctgaaatacgacttcttccagaccatgtcggtgattgggggcttgctcctggtggtggccctgggccctgggggtgtctccatggatgagaagaagaaggagtggtaacagtcacagatccctacctgcctggctaagacccgtggccgtcaaggactggttcggggtggattcaacaaaactgccagcttttatgtatcctcttcccttcccctcccttggtaaaggcacagatgttttgagaactttatttgcagagacacctgagaatcgatggctcagtctgctctggagccacagtctggcgtctgacccttcagtgcaggccagcctggcagctggaagcctcccccacgccgaggctttggagtgaacagcccgcttggctgtggcatctcagtcctatttttgagtttttttgtgggggtacaggagggggccttcaagctgtactgtgagcagacgcattggtattatcattcaaagcagtctccctcttatttgtaagtttacatttttagcggaaactactaaattattttgggtggttcagccaaacctcaaaacagttaatctccctggtttaaaatcacaccagtggctttgatgttgtttctgccccgcattgtattttataggaatagtgaaaacatttagggacacccaaagaatgatgcagtattaaaggggtggtagaagctgctgtttatgataaaagtcatcggtcagaaaatcagcttggattggtgccaagtgttttattgggtaacaccctgggagttttagtagcttgaggcaaggtggaggggcaagaagtccttggggaagctgctggtctgggtgctgctggcctccaagctggcagtgggaagggctagtgagaccacacaggggtagccccagcagcagcaccctgcaagccagcctggccagctgctcagaccagcttgcagagccgcagccgctgtgggcagggggtgtggcaggagctcccagcactggagacccacggactcaacccagttacctcacatggggccttttctgagcaaggtctcgaaagcgcaggccgccctggctgagcagcaccgccctttcccagctgcactcgccctgtggacagccccgacacaccactttcctgaggctgtcgctcactcagattgtccgtttgctatgccgaatgcagccaaaattcctttttacaatttgtgatgccttaccgatttgatcttaatcctgtatttaaagttttctaacactgccttatactgtgtttctctttttgggggagcttaactgcttgttgctccctgtcgtctgcaccatagtaaatgccacaagggtagtcgaacacctctctggcccctagacctatctggggacaggctggctcagcctgtctccagggctgctgcggcccagccccgagcctgcctccctcttggcctctcatccattggctctgcagggcaggggtgaggcaggtttctgctcataagtgcttttggaagtcacctacctttttaacacagccgaactagtcccaacgcgtttgcaaatattcccctggtagcctacttccttacccccgaatattggtaagatcgagcaatggcttcaggacatgggttctcttctcctgtgatcattcaagtgctcactgcatgaagactggcttgtctcagtgtttcaacctcaccagggctgtctcttggtccacacctcgctccctgttagtgccgtatgacagcccccatcaaatgaccttggccaagtcacggtttctctgtggtcaaggttggttggctgattggtggaaagtagggtggaccaaaggaggccacgtgagcagtcagcaccagttctgcaccagcagcgcctccgtcctagtgggtgttcctgtttctcctggccctgggtgggctagggcctgattcgggaagatgcctttgcagggaggggaggataagtgggatctaccaattgattctggcaaaacaatttctaagatttttttgctttatgtgggaaacagatctaaatctcattttatgctgtattttatatcttagttgtgtttgaaaacgttttgatttttggaaacacatcaaaataaataatggcgtttgttgta

SEQ ID NO: 414683 - DNA, 2990 bp, Homo sapiens
cagtgtgccctgtttgcccactctcagaccccggagttcatcaatctcggagccgctggccaatatgtactcatgtgggaaccagccgacgcggagcgaggccggccgccgggcacttcctgtggaggccgcagcgggtgcgggcgccgacgggcgagagccagcgagcgagcgagcgagccgagccgagcctcccgccgtcgccatgggccagaacgacctgatgggcacggccgaggacttcgccgaccagttcctccgtgtcacaaagcagtacctgccccacgtggcgcgcctctgtctgatcagcaccttcctggaggacggcatccgtatgtggttccagtggagcgagcagcgcgactacatcgacaccacctggaactgcggctacctgctggcctcgtccttcgtcttcctcaacttgctgggacagctgactggctgcgtcctggtgttgagcaggaacttcgtgcagtacgcctgcttcgggctctttggaatcatagctctgcagacgattgcctacagcattttatgggacttgaagtttttgatgaggaacctggccctgggaggaggcctgttgctgctcctagcagaatcccgttctgaagggaagagcatgtttgcgggcgtccccaccatgcgtgagagctcccccaaacagtacatgcagctcggaggcagggtcttgctggttctgatgttcatgaccctccttcactttgacgccagcttcttttctattgtccagaacatcgtgggcacagctctgatgattttagtggccattggttttaaaaccaagctggctgctttgactcttgttgtgtggctctttgccatcaacgtatatttcaacgccttctggaccattccagtctacaagcccatgcatgacttcctgaaatacgacttcttccagaccatgtcggtgattgggggcttgctcctggtggtggccctgggccctgggggtgtctccatggatgagaagaagaaggagtggtaacagtcacagatccctacctgcctggctaagacccgtggccgtcaaggactggttcggggtggattcaacaaaactgccagcttttatgtatcctcttcccttcccctcccttggtaaaggcacagatgttttgagaactttatttgcagagacacctgagaatcgatggctcagtctgctctggagccacagtctggcgtctgacccttcagtgcaggccagcctggcagctggaagcctcccccacgccgaggctttggagtgaacagcccgcttggctgtggcatctcagtcctatttttgagtttttttgtgggggtacaggagggggccttcaagctgtactgtgagcagacgcattggtattatcattcaaagcagtctccctcttatttgtaagtttacatttttagcggaaactactaaattattttgggtggttcagccaaacctcaaaacagttaatctccctggtttaaaatcacaccagtggctttgatgttgtttctgccccgcattgtattttataggaatagtgaaaacatttagggacacccaaagaatgatgcagtattaaaggggtggtagaagctgctgtttatgataaaagtcatcggtcagaaaatcagcttggattggtgccaagtgttttattgggtaacaccctgggagttttagtagcttgaggcaaggtggaggggcaagaagtccttggggaagctgctggtctgggtgctgctggcctccaagctggcagtgggaagggctagtgagaccacacaggggtagccccagcagcagcaccctgcaagccagcctggccagctgctcagaccagcttgcagagccgcagccgctgtgggcagggggtgtggcaggagctcccagcactggagacccacggactcaacccagttacctcacatggggccttttctgagcaaggtctcgaaagcgcaggccgccctggctgagcagcaccgccctttcccagctgcactcgccctgtggacagccccgacacaccactttcctgaggctgtcgctcactcagattgtccgtttgctatgccgaatgcagccttaaagttttctaacactgccttatactgtgtttctctttttgggggagcttaactgcttgttgctccctgtcgtctgcaccatagtaaatgccacaagggtagtcgaacacctctctggcccctagacctatctggggacaggctggctcagcctgtctccagggctgctgcggcccagccccgagcctgcctccctcttggcctctcatccattggctctgcagggcaggggtgaggcaggtttctgctcataagtgcttttggaagtcacctacctttttaacacagccgaactagtcccaacgcgtttgcaaatattcccctggtagcctacttccttacccccgaatattggtaagatcgagcaatggcttcaggacatgggttctcttctcctgtgatcattcaagtgctcactgcatgaagactggcttgtctcagtgtttcaacctcaccagggctgtctcttggtccacacctcgctccctgttagtgccgtatgacagcccccatcaaatgaccttggccaagtcacggtttctctgtggtcaaggttggttggctgattggtggaaagtagggtggaccaaaggaggccacgtgagcagtcagcaccagttctgcaccagcagcgcctccgtcctagtgggtgttcctgtttctcctggccctgggtgggctagggcctgattcgggaagatgcctttgcagggaggggaggataagtgggatctaccaattgattctggcaaaacaatttctaagatttttttgctttatgtgggaaacagatctaaatctcattttatgctgtattttatatcttagttgtgtttgaaaacgttttgatttttggaaacacatcaaaataaataatggcgtttgttgta

SEQ ID NO: 414684 - DNA, 2595 bp, Homo sapiens
aaaacgtctgtaacgtaagtggtagcgagtgcccctggggggtgttttaaaatttcaaggcgacggaggggggggtggttgaagttttagttgatgtgcttggctggcgattgaacctggccctgggaggaggcctgttgctgctcctagcagaatcccgttctgaagggaagagcatgtttgcgggcgtccccaccatgcgtgagagctcccccaaacagtacatgcagctcggaggcagggtcttgctggttctgatgttcatgaccctccttcactttgacgccagcttcttttctattgtccagaacatcgtgggcacagctctgatgattttagtggccattggttttaaaaccaagctggctgctttgactcttgttgtgtggctctttgccatcaacgtatatttcaacgccttctggaccattccagtctacaagcccatgcatgacttcctgaaatacgacttcttccagaccatgtcggtgattgggggcttgctcctggtggtggccctgggccctgggggtgtctccatggatgagaagaagaaggagtggtaacagtcacagatccctacctgcctggctaagacccgtggccgtcaaggactggttcggggtggattcaacaaaactgccagcttttatgtatcctcttcccttcccctcccttggtaaaggcacagatgttttgagaactttatttgcagagacacctgagaatcgatggctcagtctgctctggagccacagtctggcgtctgacccttcagtgcaggccagcctggcagctggaagcctcccccacgccgaggctttggagtgaacagcccgcttggctgtggcatctcagtcctatttttgagtttttttgtgggggtacaggagggggccttcaagctgtactgtgagcagacgcattggtattatcattcaaagcagtctccctcttatttgtaagtttacatttttagcggaaactactaaattattttgggtggttcagccaaacctcaaaacagttaatctccctggtttaaaatcacaccagtggctttgatgttgtttctgccccgcattgtattttataggaatagtgaaaacatttagggacacccaaagaatgatgcagtattaaaggggtggtagaagctgctgtttatgataaaagtcatcggtcagaaaatcagcttggattggtgccaagtgttttattgggtaacaccctgggagttttagtagcttgaggcaaggtggaggggcaagaagtccttggggaagctgctggtctgggtgctgctggcctccaagctggcagtgggaagggctagtgagaccacacaggggtagccccagcagcagcaccctgcaagccagcctggccagctgctcagaccagcttgcagagccgcagccgctgtgggcagggggtgtggcaggagctcccagcactggagacccacggactcaacccagttacctcacatggggccttttctgagcaaggtctcgaaagcgcaggccgccctggctgagcagcaccgccctttcccagctgcactcgccctgtggacagccccgacacaccactttcctgaggctgtcgctcactcagattgtccgtttgctatgccgaatgcagccaaaattcctttttacaatttgtgatgccttaccgatttgatcttaatcctgtatttaaagttttctaacactgccttatactgtgtttctctttttgggggagcttaactgcttgttgctccctgtcgtctgcaccatagtaaatgccacaagggtagtcgaacacctctctggcccctagacctatctggggacaggctggctcagcctgtctccagggctgctgcggcccagccccgagcctgcctccctcttggcctctcatccattggctctgcagggcaggggtgaggcaggtttctgctcataagtgcttttggaagtcacctacctttttaacacagccgaactagtcccaacgcgtttgcaaatattcccctggtagcctacttccttacccccgaatattggtaagatcgagcaatggcttcaggacatgggttctcttctcctgtgatcattcaagtgctcactgcatgaagactggcttgtctcagtgtttcaacctcaccagggctgtctcttggtccacacctcgctccctgttagtgccgtatgacagcccccatcaaatgaccttggccaagtcacggtttctctgtggtcaaggttggttggctgattggtggaaagtagggtggaccaaaggaggccacgtgagcagtcagcaccagttctgcaccagcagcgcctccgtcctagtgggtgttcctgtttctcctggccctgggtgggctagggcctgattcgggaagatgcctttgcagggaggggaggataagtgggatctaccaattgattctggcaaaacaatttctaagatttttttgctttatgtgggaaacagatctaaatctcattttatgctgtattttatatcttagttgtgtttgaaaacgttttgatttttggaaacacatcaaaataaataatggcgtttgttgta

SEQ ID NO: 414685 - DNA, 2390 bp, Homo sapiens
tgcctttggaaaggctgagactcaagtatctctctcttctttcccctcagacgattgcctacagcattttatgggacttgaagtttttgatgagattgtccagaacatcgtgggcacagctctgatgattttagtggccattggttttaaaaccaagctggctgctttgactcttgttgtgtggctctttgccatcaacgtatatttcaacgccttctggaccattccagtctacaagcccatgcatgacttcctgaaatacgacttcttccagaccatgtcggtgattgggggcttgctcctggtggtggccctgggccctgggggtgtctccatggatgagaagaagaaggagtggtaacagtcacagatccctacctgcctggctaagacccgtggccgtcaaggactggttcggggtggattcaacaaaactgccagcttttatgtatcctcttcccttcccctcccttggtaaaggcacagatgttttgagaactttatttgcagagacacctgagaatcgatggctcagtctgctctggagccacagtctggcgtctgacccttcagtgcaggccagcctggcagctggaagcctcccccacgccgaggctttggagtgaacagcccgcttggctgtggcatctcagtcctatttttgagtttttttgtgggggtacaggagggggccttcaagctgtactgtgagcagacgcattggtattatcattcaaagcagtctccctcttatttgtaagtttacatttttagcggaaactactaaattattttgggtggttcagccaaacctcaaaacagttaatctccctggtttaaaatcacaccagtggctttgatgttgtttctgccccgcattgtattttataggaatagtgaaaacatttagggacacccaaagaatgatgcagtattaaaggggtggtagaagctgctgtttatgataaaagtcatcggtcagaaaatcagcttggattggtgccaagtgttttattgggtaacaccctgggagttttagtagcttgaggcaaggtggaggggcaagaagtccttggggaagctgctggtctgggtgctgctggcctccaagctggcagtgggaagggctagtgagaccacacaggggtagccccagcagcagcaccctgcaagccagcctggccagctgctcagaccagcttgcagagccgcagccgctgtgggcagggggtgtggcaggagctcccagcactggagacccacggactcaacccagttacctcacatggggccttttctgagcaaggtctcgaaagcgcaggccgccctggctgagcagcaccgccctttcccagctgcactcgccctgtggacagccccgacacaccactttcctgaggctgtcgctcactcagattgtccgtttgctatgccgaatgcagccaaaattcctttttacaatttgtgatgccttaccgatttgatcttaatcctgtatttaaagttttctaacactgccttatactgtgtttctctttttgggggagcttaactgcttgttgctccctgtcgtctgcaccatagtaaatgccacaagggtagtcgaacacctctctggcccctagacctatctggggacaggctggctcagcctgtctccagggctgctgcggcccagccccgagcctgcctccctcttggcctctcatccattggctctgcagggcaggggtgaggcaggtttctgctcataagtgcttttggaagtcacctacctttttaacacagccgaactagtcccaacgcgtttgcaaatattcccctggtagcctacttccttacccccgaatattggtaagatcgagcaatggcttcaggacatgggttctcttctcctgtgatcattcaagtgctcactgcatgaagactggcttgtctcagtgtttcaacctcaccagggctgtctcttggtccacacctcgctccctgttagtgccgtatgacagcccccatcaaatgaccttggccaagtcacggtttctctgtggtcaaggttggttggctgattggtggaaagtagggtggaccaaaggaggccacgtgagcagtcagcaccagttctgcaccagcagcgcctccgtcctagtgggtgttcctgtttctcctggccctgggtgggctagggcctgattcgggaagatgcctttgcagggaggggaggataagtgggatctaccaattgattctggcaaaacaatttctaagatttttttgctttatgtgggaaacagatctaaatctcattttatgctgtattttatatcttagttgtgtttgaaaacgttttgatttttggaaacacatcaaaataaataatggcgtttgttgta

SEQ ID NO: 414686 - DNA, 2880 bp, Homo sapiens
cagtgtgccctgtttgcccactctcagaccccggagttcatcaatctcggagccgctggccaatatgtactcatgtgggaaccagccgacgcggagcgaggccggccgccgggcacttcctgtggaggccgcagcgggtgcgggcgccgacgggcgagagccagcgagcgagcgagcgagccgagccgagcctcccgccgtcgccatgggccagaacgacctgatgggcacggccgaggacttcgccgaccagttcctccgtgtcacaaagcagtacctgccccacgtggcgcgcctctgtctgatcagcaccttcctggaggacggcatccgtatgtggttccagtggagcgagcagcgcgactacatcgacaccacctggaactgcggctacctgctggcctcgtccttcgtcttcctcaacttgctgggacagctgactggctgcgtcctggtgttgagcaggaacttcgtgcagtacgcctgcttcgggctctttggaatcatagctctgcagacgattgcctacagcattttatgggacttgaagtttttgatgaggaacctggccctgggaggaggcctgttgctgctcctagcagaatcccgttctgaagggaagagcatgtttgcgggcgtccccaccatgcgtgagagctcccccaaacagtacatgcagctcggaggcagggtcttgctggttctgatgttcatgaccctccttcactttgacgccagcttcttttctattgtccagaacatcgtgggcacagctctgatgattttagtggccattggttttaaaaccaagctggctgctttgactcttgttgtgtggctctttgccatcaacgtatatttcaacgccttctggaccattccagtctacaagcccatgcatgacttcctgaaatacgacttcttccagaccatgtcggtgattgggggcttgctcctggtggtggccctgggccctgggggtgtctccatggatgagaagaagaaggagtggtaacagtcacagatccctacctgcctggctaagacccgtggccgtcaaggactggttcggggtggattcaacaaaactgccagcttttatgtatcctcttcccttcccctcccttggtaaaggcacagatgttttgagaactttatttgcagagacacctgagaatcgatggctcagtctgctctggagccacagtctggcgtctgacccttcagtgcaggccagcctggcagctggaagcctcccccacgccgaggctttggagtgaacagcccgcttggctgtggcatctcagtcctatttttgagtttttttgtgggggtacaggagggggccttcaagctgtactgtgagcagacgcattggtattatcattcaaagcagtctccctcttatttgtaagtttacatttttagcggaaactactaaattattttgggtggttcagccaaacctcaaaacagttaatctccctggtttaaaatcacaccagtggctttgatgttgtttctgccccgcattgtattttataggaatagtgaaaacatttagggacacccaaagaatgatgcagtattaaaggggtggtagaagctgctgtttatgataaaagtcatcggtcagaaaatcagcttggattggtgccaagtgttttattgggtaacaccctgggagttttagtagcttgaggcaaggtggaggggcaagaagtccttggggaagctgctggtctgggtgctgctggcctccaagctggcagtgggaagggctagtgagaccacacaggggtagccccagcagcagcaccctgcaagccagcctggccagctgctcagaccagcttgcagagccgcagccgctgtgggcagggggtgtggcaggagctcccagcactggagacccacggactcaacccagttacctcacatggggccttttctgagcaaggtctcgaaagcgcaggccgccctggctgagcagcaccgccctttcccagctgcactcgccctgtggacagccccgacacaccactttcctgaggctgtcgctcactcagattgtccgtttgctatgccgaatgcagccaaaattcctttttacaatttgtgatgccttaccgatttgatcttaatcctgtatttaaagttttctaacactgccttatactgtgtttctctttttgggggagcttaactgcttgttgctccctgtcgtctgcaccatagtaaatgccacaagggtagtcgaacacctctctggcccctagacctatctggggacaggctggctcagcctgtctccagggctgctgcggcccagccccgagcctgcctccctcttggcctctcatccattggctctgcagggcaggggtgaggcaggtttctgctcataagtgcttttggaagtcacctacctttttaacacagccgaactagtcccaacgcgtttgcaaatattcccctggtagcctacttccttacccccgaatattggtaagatcgagcaatggcttcaggacatgggttctcttctcctgtgatcattcaagtgctcactgcatgaagactggcttgtgtgagcagtcagcaccagttctgcaccagcagcgcctccgtcctagtgggtgttcctgtttctcctggccctgggtgggctagggcctgattcgggaagatgcctttgcagggaggggaggataagtgggatctaccaattgattctggcaaaacaatttctaagatttttttgctttatgtgggaaacagatctaaatctcattttatgctgtattttatatcttagttgtgtttgaaaacgttttgatttttggaaacacatcaaaataaataatggcgtttgttgta

SEQ ID NO: 414687 - DNA, 2580 bp, Homo sapiens
cagtgtgccctgtttgcccactctcagaccccggagttcatcaatctcggagccgctggccaatatgtactcatgtgggaaccagccgacgcggagcgaggccggccgccgggcacttcctgtggaggccgcagcgggtgcgggcgccgacgggcgagagccagcgagcgagcgagcgagccgagccgagcctcccgccgtcgccatgggccagaacgacctgatgggcacggccgaggacttcgccgaccagttcctccgtgtcacaaagcagtacctgccccacgtggcgcgcctctgtctgatcagcaccttcctggaggacggcatccgtatgtggttccagtggagcgagcagcgcgactacatcgacaccacctggaactgcggctacctgctggcctcgtccttcgtcttcctcaacttgctgggacagctgactggctgcgtcctggtgttgagcaggaacttcgtgcagtacgcctgcttcgggctctttggaatcatagctctgcagacgattgcctacagcattttatgggacttgaagtttttgatgaggaacctggccctgggaggaggcctgttgctgctcctagcagaatcccgttctgaagggaagagcatgtttgcgggcgtccccaccatgcgtgagagctcccccaaacagtacatgcagctcggaggcagggtcttgctggttctgatgttcatgaccctccttcactttgacgccagcttcttttctattgtccagaacatcgtgggcacagctctgatgattttagtggccattggttttaaaaccaagctggctgctttgactcttgttgtgtggctctttgccatcaacgtatatttcaacgccttctggaccattccagtctacaagcccatgcatgacttcctgaaatacgacttcttccagaccatgtcggtgattgggggcttgctcctggtggtggccctgggccctgggggtgtctccatggatgagaagaagaaggagtggtaacagtcacagatccctacctgcctggctaagacccgtggccgtcaaggactggttcggggtggattcaacaaaactgccagcttttatgtatcctcttcccttcccctcccttggtaaaggcacagatgttttgagaactttatttgcagagacacctgagaatcgatggctcagtctgctctggagccacagtctggcgtctgacccttcagtgcaggccagcctggcagctggaagcctcccccacgccgaggctttggagtgaacagcccgcttggctgtggcatctcagtcctatttttgagtttttttgtgggggtacaggagggggccttcaagctgtactgtgagcagacgcattggtattatcattcaaagcagtctccctcttatttgtaagtttacatttttagcggaaactactaaattattttgggtggttcagccaaacctcaaaacagttaatctccctggtttaaaatcacaccagtggctttgatgttgtttctgccccgcattgtattttataggaatagtgaaaacatttagggacacccaaagaatgatgcagtattaaaggggtggtagaagctgctgtttatgataaaagtcatcggtcagaaaatcagcttggattggtgccaagtgttttattgggtaacaccctgggagttttagtagcttgaggcaaggtggaggggcaagaagtccttggggaagctgctggtctgggtgctgctggcctccaagctggcagtgggaagggctagtgagaccacacaggggtagccccagcagcagcaccctgcaagccagcctggccagctgctcagaccagcttgcagagccgcagccgctgtgggcagggggtgtggcaggagctcccagcactggagacccacggactcaacccagttacctcacatggggccttttctgagcaaggtctcgaaagcgcaggccgccctggctgagcagcaccgccctttcccagctgcactcgccctgtggacagccccgacacaccactttcctgaggctgtcgctcactcagattgtccgtttgctatgccgaatgcagccaaaattcctttttacaatttgtgatgccttaccgatttgatcttaatcctgtatttaaagttttctaacactgccttatactgtgtttctctttttgggggagcttaactgcttgttgctccctgtcgtctgcaccatagtaaatgccacaagggtagtcgaacacctctctggcccctagacctatctggggacaggctggctcagcctgtctccagggctgctgcggcccagccccgagcctgcctccctcttggcctctcatccattggctctgcagggcaggggtgaggcaggtttctgctcataagtgcttttggaagtcacctacctttttaacacagccgaactagtcccaacgcgtttgcaaatattcccctggtagcctacttccttacccccacctcgcccatttggccgcgtgcactgagtgtcactttgctgcagctcgtttctttccaataaaagtttctgtgacttaa

SEQ ID NO: 414688 - DNA, 1861 bp, Homo sapiens
cagtgtgccctgtttgcccactctcagaccccggagttcatcaatctcggagccgctggccaatatgtactcatgtgggaaccagccgacgcggagcgaggccggccgccgggcacttcctgtggaggccgcagcgggtgcgggcgccgacgggcgagagccagcgagcgagcgagcgagccgagccgagcctcccgccgtcgccatgggccagaacgacctgatgggcacggccgaggacttcgccgaccagttcctccgtgtcacaaagcagtacctgccccacgtggcgcgcctctgtctgatcagcaccttcctggaggacggcatccgtatgtggttccagtggagcgagcagcgcgactacatcgacaccacctggaactgcggctacctgctggcctcgtccttcgtcttcctcaacttgctgggacagctgactggctgcgtcctggtgttgagcaggaacttcgtgcagtacgcctgcttcgggctctttggaatcatagctctgcagacgattgcctacagcattttatgggacttgaagtttttgatgaggaacctggccctgggaggaggcctgttgctgctcctagcagaatcccgttctgaagggaagagcatgtttgcgggcgtccccaccatgcgtgagagctcccccaaacagtacatgcagctcggaggcagggtcttgctggttctgatgttcatgaccctccttcactttgacgccagcttcttttctattgtccagaacatcgtgggcacagctctgatgattttagtggccattggttttaaaaccaagctggctgctttgactcttgttgtgtggctctttgccatcaacgtatatttcaacgccttctggaccattccagtctacaagcccatgcatgacttcctgaaatacgacttcttccagaccatgtcggtgattgggggcttgctcctggtggtggccctgggccctgggggtgtctccatggatgagaagaagaaggagtggtaacagtcacagatccctacctgcctggctaagacccgtggccgtcaaggactggttcggggtggattcaacaaaactgccagcttttatgtatcctcttcccttcccctcccttggtaaaggcacagatgttttgagaactttatttgcagagacacctgagaatcgatggctcagtctgctctggagccacagtctggcgtctgacccttcagtgcaggccagcctggcagctggaagcctcccccacgccgaggctttggagtgaacagcccgcttggctgtggcatctcagtcctatttttgagtttttttgtgggggtacaggagggggccttcaagctgtactgtgagcagacgcattggtattatcattcaaagcagtctccctcttatttgtaagtttacatttttagcggaaactactaaattattttgggtggttcagccaaacctcaaaacagttaatctccctggtttaaaatcacaccagtggctttgatgttgtttctgccccgcattgtattttataggaatagtgaaaacatttagggacacccaaagaatgatgcagtattaaaggggtggtagaagctgctgtttatgataaaagtcatcggtcagaaaatcagcttggattggtgccaagtgttttattgggtaacaccctgggagttttagtagggggactacaggcgcgtgccaccacacctggctaatttttgcatttttagtagagatggggtttcactatgttggccaggctggtcttgaactcctgacctcgtgatccacccgcctcggcctcgccaaagtgctgggattacaggcgtgaagcactgcgcttgg

SEQ ID NO: 414689 - DNA, 1276 bp, Homo sapiens
cagtgtgccctgtttgcccactctcagaccccggagttcatcaatctcggagccgctggccaatatgtactcatgtgggaaccagccgacgcggagcgaggccggccgccgggcacttcctgtggaggccgcagcgggtgcgggcgccgacgggcgagagccagcgagcgagcgagcgagccgagccgagcctcccgccgtcgccatgggccagaacgacctgatgggcacggccgaggacttcgccgaccagttcctccgtgtcacaaagcagtacctgccccacgtggcgcgcctctgtctgatcagcaccttcctggaggacggcatccgtatgtggttccagtggagcgagcagcgcgactacatcgacaccacctggaactgcggctacctgctggcctcgtccttcgtcttcctcaacttgctgggacagctgactggctgcgtcctggtgttgagcaggaacttcgtgcagtacgcctgcttcgggctctttggaatcatagctctgcagacgattgcctacagcattttatgggacttgaagtttttgatgaggaacctggccctgggaggaggcctgttgctgctcctagcagaatcccgttctgaagggaagagcatgtttgcgggcgtccccaccatgcgtgagagctcccccaaacagtacctaagacccgtggccgtcaaggactggttcggggtggattcaacaaaactgccagcttttatgtatcctcttcccttcccctcccttggtaaaggcacagatgttttgagaactttatttgcagagacacctgagaatcgatggctcagtctgctctggagccacagtctggcgtctgacccttcagtgcaggccagcctggcagctggaagcctcccccacgccgaggctttggagtgaacagcccgcttggctgtggcatctcagtcctatttttgagtttttttgtgggggtacaggagggggccttcaagctgtactgtgagcagacgcattggtattatcattcaaagcagtctccctcttatttgtaagtttacatttttagcggaaactactaaattattttgggtggttcagccaaacctcaaaacagttaatctccctggtttaaaatcacaccagtggctttgatgttgtttctgccccgcattgtattttataggaatagtgaaaacatttagggacacccaaagaatgatgcagtattaaaggggtggtagaagctgctgtttatgataaaagtcatcggtcagaaaatca

SEQ ID NO: 414690 - DNA, 1623 bp, Homo sapiens
  misc_feature (6)..(6): n is a, c, g, or t
  misc_feature (15)..(15): n is a, c, g, or t
gaaatnggctaggtngaggctggtgttaatcggccgaggctgcggcgggcgtctgttctagtgtttgagccgtcgtgcttcaccggtctacctcgctagcatgtcgggccgcggcaagactggcggcaaggcccgcgccaaggccaagtcgcgctcgtcgcgcgccggcctccagttcccagtgggccgtgtacaccggctgctgcggaagggccactacgccgagcgcgttggcgccggcgcgccagtgtacctggcggcagtgctggagtacctcaccgctgagatcctggagctggcgggcaatgcggcccgcgacaacaagaagacgcgaatcatcccccgccacctgcagctggccatccgcaacgacgaggagctcaacaagctgctgggcggcgtgacgatcgcccagggaggcgtcctgcccaacatccaggccgtgctgctgcccaagaagaccagcgccaccgtggggccgaaggcgccctcgggcggcaagaaggccacccaggcctcccaggagtactaagagggcccgcgccgcggccggccgccaggcctccccatgccaccacaaaggcccttttaagggccaccaccgccctcatggaaagagctgagccgcttcagactgcggggcaagcgggccgcggctcccttcccctcccctcccctcgcccgccttcgccgcccggcctcgagtccccgcccgcccccgctcccgtcccgcaccgcctgccgcgtcggcctcgggccctgccctgtccgccgtccgccctccggtagggttcgggccttccggatgcggcttgggcgctcttcggggacctccgtggcgcggaagacccgagcctgccggggggaggccggcggcgccgcacctgcccgcctcggcgttcgtgactcagccgccccatcccgagtcgctaaggggctgcggggaggccgcagcaccttctggaagacttggccttccgctctgacgcagggccgaggtgggcagtccaggccgagaggccggcggccctgaaggtgagtgaggccctcggcagctgcagccggggtgtctggtacccccccggcgtggtgcttagcccaggactttcagacgcggccgctggccgggaggctttggtgggagagacgcgatcgccgatttcggtctggcgccccttctgcggccgggacccaggcctttcacatcagctctccctccatcttcattcataggtctgcgctggggccgggacgaagcacttggtaacaggcacatcttcctcccgagtgactgcctcctaggaggacatttaggggagggcagaggcctgcagtttggcttcacggctggctatgtggacagcaagagtcgttttcgcggaagccgactggcagccaggcctgtcgggccccccgacgccgccccatttcccttccagcaaactcaactcggcaatccaagcacctagataccagcacaagtcggttaatccctgtctggactgagcctccgttggcttctgaactggaattctgcagctaacccttccacgactagaaccttaggcattggggagttttagatggactaattttattaaaggattgttttttttttaaata

SEQ ID NO: 414691 - DNA, 1656 bp, Homo sapiens
  misc_feature (6)..(6): n is a, c, g, or t
  misc_feature (15)..(15): n is a, c, g, or t
gaaatnggctaggtngaggctggtgttaatcggccgaggctgcggcgggcgtctgttctagtgtttgagccgtcgtgcttcaccggtctacctcgctagcatgtcgggccgcggcaagactggcggcaaggcccgcgccaaggccaagtcgcgctcgtcgcgcgccggcctccagttcccagtgggccgtgtacaccggctgctgcggaagggccactacgccgagcgcgttggcgccggcgcgccagtgtacctggcggcagtgctggagtacctcaccgctgagatcctggagctggcgggcaatgcggcccgcgacaacaagaagacgcgaatcatcccccgccacctgcagctggccatccgcaacgacgaggagctcaacaagctgctgggcggcgtgacgatcgcccagggaggcgtcctgcccaacatccaggccgtgctgctgcccaagaagaccagcgccaccgtggggccgaaggcgccctcgggcggcaagaaggccacccaggcctcccaggagtactaagagggcccgcgccgcggccggccgccaggcctccccatgccaccacaaaggcccttttaagggccaccaccgccctcatggaaagagctgagccgcttcagactgcggggcaagcgggccgcggctcccttcccctcccctcccctcgcccgccttcgccgcccggcctcgagtccccgcccgcccccgctcccgtcccgcaccgcctgccgcgtcggcctcgggccctgccctgtccgccgtccgccctccggtagggttcgggccttccggatgcggcttgggcgctcttcggggacctccgtggcgcggaagacccgagcctgccggggggaggccggcggcgccgcacctgcccgcctcggcgttcgtgactcagccgccccatcccgagtcgctaaggggctgcggggaggccgcagcaccttctggaagacttggccttccgctctgacgcagggccgaggtgggcagtccaggccgagaggccggcggccctgaaggtgagtgaggccctcggcagctgcagccggggtgtctggtacccccccggcgtggtgcttagcccaggactttcagacgcggccgctggccgggaggctttggtgggagagacgcgatcgccgatttcggtctggcgccccttctgcggccgggacccaggcctttcacatcagctctccctccatcttcattcataggtctgcgctggggccgggacgaagcacttggtaacaggcacatcttcctcccgagtgactgcctcctaggaggacatttaggggagggcagaggcctgcagtttggcttcacggctggctatgtggacagcaagagtcgttttcgcggaagccgactggcagccaggcctgtcgggccccccgacgccgccccatttcccttccagcaaactcaactcggcaatccaagcacctagataccagcacaagtcggttaatccctgtctggactgagcctccgttggcttctgaactggaattctgcagctaacccttccacgactagaaccttaggcattggggagttttagatggactaattttattaaaggattgttttttttttaaataaaaaaatggtgcaaggagaaaaaacctcgtgcc

SEQ ID NO: 414692 - DNA, 2349 bp, Homo sapiens
  misc_feature (6)..(6): n is a, c, g, or t
  misc_feature (15)..(15): n is a, c, g, or t
gaaatnggctaggtngaggctggtgttaatcggccgaggctgcggcgggcgtctgttctagtgtttgagccgtcgtgcttcaccggtctacctcgctagcatgtcgggccgcggcaagactggcggcaaggcccgcgccaaggccaagtcgcgctcgtcgcgcgccggcctccagttcccagtgggccgtgtacaccggctgctgcggaagggccactacgccgagcgcgttggcgccggcgcgccagtgtacctggcggcagtgctggagtacctcaccgctgagatcctggagctggcgggcaatgcggcccgcgacaacaagaagacgcgaatcatcccccgccacctgcagctggccatccgcaacgacgaggagctcaacaagctgctgggcggcgtgacgatcgcccagggaggcgtcctgcccaacatccaggccgtgctgctgcccaagaagaccagcgccaccgtggggccgaaggcgccctcgggcggcaagaaggccacccaggcctcccaggagtactaagagggcccgcgccgcggccggccgccaggcctccccatgccaccacaaaggcccttttaagggccaccaccgccctcatggaaagagctgagccgcttcagactgcggggcaagcgggccgcggctcccttcccctcccctcccctcgcccgccttcgccgcccggcctcgagtccccgcccgcccccgctcccgtcccgcaccgcctgccgcgtcggcctcgggccctgccctgtccgccgtccgccctccggtagggttcgggccttccggatgcggcttgggcgctcttcggggacctccgtggcgcggaagacccgagcctgccggggggaggccggcggcgccgcacctgcccgcctcggcgttcgtgactcagccgccccatcccgagtcgctaaggggctgcggggaggccgcagcaccttctggaagacttggccttccgctctgacgcagggccgaggtgggcagtccaggccgagaggccggcggccctgaaggtgagtgaggccctcggcagctgcagccggggtgtctggtacccccccggcgtggtgcttagcccaggactttcagacgcggccgctggccgggaggctttggtgggagagacgcgatcgccgatttcggtctggcgccccttctgcggccgggacccaggcctttcacatcagctctccctccatcttcattcataggtctgcgctggggccgggacgaagcacttggtaacaggcacatcttcctcccgagtgactgcctcctaggaggacatttaggggagggcagaggcctgcagtttggcttcacggctggctatgtggacagcaagagtcgttttcgcggaagccgactggcagccaggcctgtcgggccccccgacgccgccccatttcccttccagcaaactcaactcggcaatccaagcacctagataccagcacaagtcggttaatccctgtctggactgagcctccgttggcttctgaactggaattctgcagctaacccttccacgactagaaccttaggcattggggagttttagatggactaattttattaaaggattgttttttttttaaataaaaaaaaaaggaaaaaaaaaaaaaaaaaaaaaaaaaaaaaaaaaaaaaaaaaaaaaaaaaaaaaaaaaaaaaaacagacacaaagacaaaaaggacacccagagaacagagaggacgggcgagagaaagcaggacggcacagcacacacaggagcgccaacagggaaacacacaaagaagggcgcaaacagaacacagcgggcaaaaaacaggcgacaggagaccaaggtgaaagagcagcgacaggagaaaaaacagacacgacggacacacagcccagaagaggggagcacaaaacgggggagagcagacagaggagacagacgaccggccgaaacgaaggacgcaggagcagaagaagcggcagatgactgagcggaagacagcgaagaggcagggcaccgatagagcaaggaagccaacaagaggaccgagcgagcgaagaacagacagaacaaaaagcgcgcggaccgccgagcccgagccccgccgggccgacgggaatcaacaccagcacacggaacgacgcagcgcgaaagaggccggacggggagcgcggacgccgaggccgggagagcggcgacaggtaacagggccacagagcagaccggaggccacgaggaagacgaagacacgcggcaccaccgacgaagacaagcaccaggcgaaagagagcggccaaacgcagaagagaagggcaggacggaggagagaacgcgcagaggt

SEQ ID NO: 414693 - DNA, 1593 bp, Homo sapiens
  misc_feature (6)..(6): n is a, c, g, or t
  misc_feature (15)..(15): n is a, c, g, or t
gaaatnggctaggtngaggctggtgttaatcggccgaggccgtcgtgcttcaccggtctacctcgctagcatgtcgggccgcggcaagactggcggcaaggcccgcgccaaggccaagtcgcgctcgtcgcgcgccggcctccagttcccagtgggccgtgtacaccggctgctgcggaagggccactacgccgagcgcgttggcgccggcgcgccagtgtacctggcggcagtgctggagtacctcaccgctgagatcctggagctggcgggcaatgcggcccgcgacaacaagaagacgcgaatcatcccccgccacctgcagctggccatccgcaacgacgaggagctcaacaagctgctgggcggcgtgacgatcgcccagggaggcgtcctgcccaacatccaggccgtgctgctgcccaagaagaccagcgccaccgtggggccgaaggcgccctcgggcggcaagaaggccacccaggcctcccaggagtactaagagggcccgcgccgcggccggccgccaggcctccccatgccaccacaaaggcccttttaagggccaccaccgccctcatggaaagagctgagccgcttcagactgcggggcaagcgggccgcggctcccttcccctcccctcccctcgcccgccttcgccgcccggcctcgagtccccgcccgcccccgctcccgtcccgcaccgcctgccgcgtcggcctcgggccctgccctgtccgccgtccgccctccggtagggttcgggccttccggatgcggcttgggcgctcttcggggacctccgtggcgcggaagacccgagcctgccggggggaggccggcggcgccgcacctgcccgcctcggcgttcgtgactcagccgccccatcccgagtcgctaaggggctgcggggaggccgcagcaccttctggaagacttggccttccgctctgacgcagggccgaggtgggcagtccaggccgagaggccggcggccctgaaggtgagtgaggccctcggcagctgcagccggggtgtctggtacccccccggcgtggtgcttagcccaggactttcagacgcggccgctggccgggaggctttggtgggagagacgcgatcgccgatttcggtctggcgccccttctgcggccgggacccaggcctttcacatcagctctccctccatcttcattcataggtctgcgctggggccgggacgaagcacttggtaacaggcacatcttcctcccgagtgactgcctcctaggaggacatttaggggagggcagaggcctgcagtttggcttcacggctggctatgtggacagcaagagtcgttttcgcggaagccgactggcagccaggcctgtcgggccccccgacgccgccccatttcccttccagcaaactcaactcggcaatccaagcacctagataccagcacaagtcggttaatccctgtctggactgagcctccgttggcttctgaactggaattctgcagctaacccttccacgactagaaccttaggcattggggagttttagatggactaattttattaaaggattgttttttttttaaata

SEQ ID NO: 414694 - DNA, 1377 bp, Homo sapiens
acacaaagaccgaaaggaaaatatgctagtagagcccgcttaattgccgaggagctgcgggcattggccgtgaaacaagaagacgcgaatcatcccccgccacctgcagctggccatccgcaacgacgaggagctcaacaagctgctgggcggcgtgacgatcgcccagggaggcgtcctgcccaacatccaggccgtgctgctgcccaagaagaccagcgccaccgtggggccgaaggcgccctcgggcggcaagaaggccacccaggcctcccaggagtactaagagggcccgcgccgcggccggccgccaggcctccccatgccaccacaaaggcccttttaagggccaccaccgccctcatggaaagagctgagccgcttcagactgcggggcaagcgggccgcggctcccttcccctcccctcccctcgcccgccttcgccgcccggcctcgagtccccgcccgcccccgctcccgtcccgcaccgcctgccgcgtcggcctcgggccctgccctgtccgccgtccgccctccggtagggttcgggccttccggatgcggcttgggcgctcttcggggacctccgtggcgcggaagacccgagcctgccggggggaggccggcggcgccgcacctgcccgcctcggcgttcgtgactcagccgccccatcccgagtcgctaaggggctgcggggaggccgcagcaccttctggaagacttggccttccgctctgacgcagggccgaggtgggcagtccaggccgagaggccggcggccctgaaggtgagtgaggccctcggcagctgcagccggggtgtctggtacccccccggcgtggtgcttagcccaggactttcagacgcggccgctggccgggaggctttggtgggagagacgcgatcgccgatttcggtctggcgccccttctgcggccgggacccaggcctttcacatcagctctccctccatcttcattcataggtctgcgctggggccgggacgaagcacttggtaacaggcacatcttcctcccgagtgactgcctcctaggaggacatttaggggagggcagaggcctgcagtttggcttcacggctggctatgtggacagcaagagtcgttttcgcggaagccgactggcagccaggcctgtcgggccccccgacgccgccccatttcccttccagcaaactcaactcggcaatccaagcacctagataccagcacaagtcggttaatccctgtctggactgagcctccgttggcttctgaactggaattctgcagctaacccttccacgactagaaccttaggcattggggagttttagatggactaattttattaaaggattgttttttttttaaata

SEQ ID NO: 414695 - DNA, 987 bp, Homo sapiens
ctcaaggatttgcattggaagggagctcccctcccctcccctcgcccgccttcgccgcccggcctcgagtccccgcccgcccccgctcccgtcccgcaccgcctgccgcgtcggcctcgggccctgccctgtccgccgtccgccctccggtagggttcgggccttccggatgcggcttgggcgctcttcggggacctccgtggcgcggaagacccgagcctgccggggggaggccggcggcgccgcacctgcccgcctcggcgttcgtgactcagccgccccatcccgagtcgctaaggggctgcggggaggccgcagcaccttctggaagacttggccttccgctctgacgcagggccgaggtgggcagtccaggccgagaggccggcggccctgaaggtgagtgaggccctcggcagctgcagccggggtgtctggtacccccccggcgtggtgcttagcccaggactttcagacgcggccgctggccgggaggctttggtgggagagacgcgatcgccgatttcggtctggcgccccttctgcggccgggacccaggcctttcacatcagctctccctccatcttcattcataggtctgcgctggggccgggacgaagcacttggtaacaggcacatcttcctcccgagtgactgcctcctaggaggacatttaggggagggcagaggcctgcagtttggcttcacggctggctatgtggacagcaagagtcgttttcgcggaagccgactggcagccaggcctgtcgggccccccgacgccgccccatttcccttccagcaaactcaactcggcaatccaagcacctagataccagcacaagtcggttaatccctgtctggactgagcctccgttggcttctgaactggaattctgcagctaacccttccacgactagaaccttaggcattggggagttttagatggactaattttattaaaggattgttttttttttaaata

SEQ ID NO: 414696 - DNA, 1422 bp, Homo sapiens
  misc_feature (6)..(6): n is a, c, g, or t
  misc_feature (15)..(15): n is a, c, g, or t
gaaatnggctaggtngaggctggtgttaatcggccgaggctgcggcgggcgtctgttctagtgtttgagccgtcgtgcttcaccggtctacctcgctagcatgtcgggccgcggcaagactggcggcaaggcccgcgccaaggccaagtcgcgctcgtcgcgcgccggcctccagttcccagtgggccgtgtacaccggctgctgcggaagggccactacgccgagcgcgttggcgccggcgcgccagtgtacctggcggcagtgctggagtacctcaccgctgagatcctggagctggcgggcaatgcggcccgcgacaacaagaagacgcgaatcatcccccgccacctgcagctggccatccgcaacgacgaggagctcaacaagctgctgggcggcgtgacgatcgcccagggaggcgtcctgcccaacatccaggccgtgctgctgcccaagaagaccagcgccaccgtggggccgaaggcgccctcgggcggcaagaaggccacccaggcctcccaggagtactaagagggcccgcgccgcggccggccgccaggcctccccatgccaccacaaaggcccttttaagggccaccaccgccctcatggaaagagctgagccgcttcagactgcggggcaagcgggccgcggctcccttcccctcccctcccctcgcccgccttcgccgcccggcctcgagtccccgcccgcccccgctcccgtcccgcaccgcctgccgcgtcggcctcgggccctgccctgtccgccgtccgccctccggtagggttcgggccttccggatgcggcttgggcgctcttcggggacctccgtggcgcggaagacccgagcctgccggggggaggccggcggcgccgcacctgcccgcctcggcgttcgtgactcagccgccccatcccgagtcgctaaggggctgcggggaggccgcagcaccttctggaagacttggccttccgctctgacgcagggccgaggtgggcagtccaggccgagaggccggcggccctggtctgcgctggggccgggacgaagcacttggtaacaggcacatcttcctcccgagtgactgcctcctaggaggacatttaggggagggcagaggcctgcagtttggcttcacggctggctatgtggacagcaagagtcgttttcgcggaagccgactggcagccaggcctgtcgggccccccgacgccgccccatttcccttccagcaaactcaactcggcaatccaagcacctagataccagcacaagtcggttaatccctgtctggactgagcctccgttggcttctgaactggaattctgcagctaacccttccacgactagaaccttaggcattggggagttttagatggactaattttattaaaggattgttttttttttaaata

SEQ ID NO: 414697 - DNA, 696 bp, Homo sapiens
  misc_feature (6)..(6): n is a, c, g, or t
  misc_feature (15)..(15): n is a, c, g, or t
gaaatnggctaggtngaggctggtgttaatcggccgaggctgcggcgggcgtctgttctagtgtttgagccgtcgtgcttcaccggtctacctcgctagcatgtcgggccgcggcaagactggcggcaaggcccgcgccaaggccaagtcgcgctcgtcgcgcgccggcctccagttcccagtgggccgtgtacaccggctgctgcggaagggccactacgccgagcgcgttggcgccggcgcgccagtgtacctggcggcagtgctggagtacctcaccgctgagatcctggagctggcgggcaatgcggcccgcgacaacaagaagacgcgaatcatcccccgccacctgcagctggccatccgcaacgacgaggagctcaacaagctgctgggcggcgtgacgatcgcccagggaggcgtcctgcccaacatccaggccgtgctgctgcccaagaagaccagcgccaccgtggggccgaaggcgccctcgggcggcaagaaggccacccaggcctcccaggagtactaagagggcccgcgccgcggccggccgccaggcctccccatgccaccacaaaggcccttttaagggccaccaccgccctcatggaaagagctgagccgcttcagactgcggggcaagcgggccgcggctcccttcctctaaggctcatgaggacgggtaagaaaaca

SEQ ID NO: 414698 - DNA, 1722 bp, Homo sapiens
  misc_feature (6)..(6): n is a, c, g, or t
  misc_feature (15)..(15): n is a, c, g, or t
gaaatnggctaggtngaggctggtgttaatcggccgaggctgcggcgggcgtctgttctagtgtttgagccgtcgtgcttcaccggtctacctcgctagcatgtcgggccgcggcaagactggcggcaaggcccgcgccaaggccaagtcgcgctcgtcgcgcgccggcctccagttcccagtgggccgtgtacaccggctgctgcggaagggccactacgccgagcgcgttggcgccggcgcgccagtgtacctggcggcagtgctggagtacctcaccgctgagatcctggagctggcgggcaatgcggcccgcgacaacaagaagacgcgaatcatcccccgccacctgcagctggccatccgcaacgacgaggagctcaacaagctgctgggcggcgtgacgatcgcccagggaggcgtcctgcccaacatccaggccgtgctgctgcccaagaagaccagcgccaccgtggggccgaaggcgccctcgggcggcaagaaggccacccaggcctcccaggagtactaagagggcccgcgccgcggccggccgccaggcctccccatgccaccacaaaggcccttttaagggccaccaccgccctcatggaaagagctgagccgcttcagactgcggggcaagcgggccgcggctccctacgttcctgtacctcctagaactgtcagctatgtgctgtccagacagctactctcacccagactggcacatacccagtggcaagttgtgaccggacagacacacagatgatctgtagcaacttccagcgtgtcaccacatgaccctaccaactctggaagctacaacacaacgtggatgggaagtgggtaccatacatcacttgaacccaggaaggtccaagccccaaactactgataccatgcgagacataccgccctgctaccggacggcagccacgacaattgacacgccacaaagcagcgggactctacggcgcatgaagacgaaccaacagcggaacagacacaccaaacacacccaagaccatcgaaagcaacacacataggaacagccaaagcatgtagaatagacacaagcaacaagcaagaacccccaccagccaccagagaaagaacccaataaaacacaagcagcacaaaaaccccagcaagccaacaaccaacacaacaaggccacgcgcctgagagacaacaccaccctcacagaccacatcaatacggaacaaaccaaacgacaccagtgaccacaccacatgggctagcgaacaactgcggcaggcgcgaccacaaaccctgcaaaacaacacaggaagaagcaacaccaaacaaacacggaccaacaacggcacacaaaccaaccgacaccacaaacactcacaaagagcaacaaaccacacaagagcgctcagcgcaggagaacatgaagcagcaccacggaccaagacgccaaagcacgcacaggggcactatccacgccagcgcgcgagatcaccctacacgcaccagccaaaacggagggcaacacacggcgaacgcccctaggagacaccaacatcaagataggcgacacagccgacgacgcacagcagacaccaccgcctacacggacacactacagacagagagcagacagtcctcagcagactgcaacagcagccccgacgaacaccagcgacacgacaacacaacacaacaaccacaggacagcggaagaaaagg

SEQ ID NO: 414699 - DNA, 754 bp, Homo sapiens
  misc_feature (6)..(6): n is a, c, g, or t
  misc_feature (15)..(15): n is a, c, g, or t
gaaatnggctaggtngaggctggtgttaatcggccgaggctgcggcgggcgtctgttctagtgtttgagccgtcgtgcttcaccggtctacctcgctagcatgtcgggccgcggcaagactggcggcaaggcccgcgccaaggccaagtcgcgctcgtcgcgcgccggcctccagttcccagtgggccgtgtacaccggctgctgcggaagggccactacgccgagcgcgttggcgccggcgcgccagtgtacctggcggcagtgctggagtacctcaccgctgagatcctggagctggcgggcaatgcggcccgcgacaacaagaagacgcgaatcatcccccgccacctgcagctggccatccgcaacgacgaggagctcaacaagctgctgggcggcgtgacgatcgcccagggaggcgtcctgcccaacatccaggccgtgctgctgcccaagaagaccagcgccaccgtggggccgaaggcgccctcgggcggcaagaaggccacccaggcctcccaggagtactaagagggcccgcgccgcggccggccgccaggcctccccatgccaccacaaaggcccttttaagggccaccaccctgtctggactgagcctccgttggcttctgaactggaattctgcagctaacccttccacgactagaaccttaggcattggggagttttagatggactaattttattaaaggattgttttttttttaaataggagcatttgttttcattttg

SEQ ID NO: 414700 - DNA, 1644 bp, Homo sapiens
  misc_feature (60)..(60): n is a, c, g, or t
acaacacacaacaaaaacaacaactacccaaaaactcggctaggtacgaggctgggtggngtgcggcgggcgtctgttctagtgtttgagccgtcgtgcttcaccggtctacctcgctagcatgtcgggccgcggcaagactggcggcaaggcccgcgccaaggccaagtcgcgctcgtcgcgcgccggcctccagttcccagtgggccgtgtacaccggctgctgcggaagggccactacgccgagcgcgttggcgccggcgcgccagtgtacctggcggcagtgctggagtacctcaccgctgagatcctggagctggcgggcaatgcggcccgcgacaacaagaagacgcgaatcatcccccgccacctgcagctggccatccgcaacgacgaggagctcaacaagctgctgggcggcgtgacgatcgcccagggaggcgtcctgcccaacatccaggccgtgctgctgcccaagaagaccagcgccaccgtggggccgaaggcgccctcgggcggcaagaaggccacccaggcctcccaggagtactaagagggcccgcgccgcggccggccgccaggcctccccatgccaccacaaaggcccttttaagggccaccaccgccctcatggaaagagctgagccgcttcagactgcggggcaagcgggccgcggctcccttcccctcccctcccctcgcccgccttcgccgcccggcctcgagtccccgcccgcccccgctcccgtcccgcaccgcctgccgcgtcggcctcgggccctgccctgtccgccgtccgccctccggtagggttcgggccttccggatgcggcttgggcgctcttcggggacctccgtggcgcggaagacccgagcctgccggggggaggccggcggcgccgcacctgcccgcctcggcgttcgtgactcagccgccccatcccgagtcgctaaggggctgcggggaggccgcagcaccttctggaagacttggccttccgctctgacgcagggccgaggtgggcagtccaggccgagaggccggcggccctgaaggtgagtgaggccctcggcagctgcagccggggtgtctggtacccccccggcgtggtgcttagcccaggactttcagacgcggccgctggccgggaggctttggtgggagagacgcgatcgccgatttcggtctggcgccccttctgcggccgggacccaggcctttcacatcagctctccctccatcttcattcataggtctgcgctggggccgggacgaagcacttggtaacaggcacatcttcctcccgagtgactgcctcctaggaggacatttaggggagggcagaggcctgcagtttggcttcacggctggctatgtggacagcaagagtcgttttcgcggaagccgactggcagccaggcctgtcgggccccccgacgccgccccatttcccttccagcaaactcaactcggcaatccaagcacctagataccagcacaagtcggttaatccctgtctggactgagcctccgttggcttctgaactggaattctgcagctaacccttccacgactagaaccttaggcattggggagttttagatggactaattttattaaaggattgttttttttttaaata

SEQ ID NO: 414701 - DNA, 1790 bp, Homo sapiens
  misc_feature (6)..(6): n is a, c, g, or t
  misc_feature (15)..(15): n is a, c, g, or t
gaaatnggctaggtngaggctggtgttaatcggccgaggctgcggcgggcgtctgttctagtgtttgagccgtcgtgcttcaccggtctacctcgctagcatgtcgggccgcggcaagactggcggcaaggcccgcgccaaggccaagtcgcgctcgtcgcgcgccggcctccagttcccagtgggccgtgtacaccggctgctgcggaagggccactacgccgagcgcgttggcgccggcgcgccagtgtacctggcggcagtgctggagtacctcaccgctgagatcctggagctggcgggcaatgcggcccgcgacaacaagaagacgcgaatcatcccccgccacctgcagctggccatccgcaacgacgaggagctcaacaagctgctgggcggcgtgacgatcgcccagggaggcgtcctgcccaacatccaggccgtgctgctgcccaagaagaccagcgccaccgtggggccgaaggcgccctcgggcggcaagaaggccacccaggcctcccaggagtactaagagggcccgcgccgcggccggccgccaggcctccccatgccaccacaaaggcccttttaagggccaccaccgccctcatggaaagagctgagccgcttcagactgcggggcaagcgggccgcggctcccttcccctcccctcccctcgcccgccttcgccgcccggcctcgagtccccgcccgcccccgctcccgtcccgcaccgcctgccgcgtcggcctcgggccctgccctgtccgccgtccgccctccggtagggttcgggccttccggatgcggcttgggcgctcttcggggacctccgtggcgcggaagacccgagcctgccggggggaggccggcggcgccgcacctgcccgcctcggcgttcgtgactcagccgccccatcccgagtcgctaaggggctgcggggaggccgcagcaccttctggaagacttggccttccgctctgacgcagggccgaggtgggcagtccaggccgagaggccggcggccctgaaggtgagtgaggccctcggcagctgcagccggggtgtctggtacccccccggcgtggtgcttagcccaggactttcagacgcggccgctggccgggaggctttggtgggagagacgcgatcgccgatttcggtctggcgccccttctgcggccgggacccaggcctttcacatcagctctccctccatcttcattcataggtctgcgctggggccgggacgaagcacttggtaacaggcacatcttcctcccgagtgactgcctcctaggaggacatttaggggagggcagaggcctgcagtttggcttcacggctggctatgtggacagcaagagtcgttttcgcggaagccgactggcagccaggcctgtcgggccccccgacgccgccccatttcccttccagcaaactcaactcggcaatccaagcacctagataccagcacaagtcggttaatccctgtctggactgagcctccgttggcttctgaactggaattctgcagctaacccttccacgactagaaccttaggcattggggagttttagatggactaattttattaaaggattgttttttttttaaataaaaaaaataaaatgtcgggacataattatgggatgagaaaaaaggatataaaagagacaatggtgaaagaaaggatagagaccaaaatgtagttaaaagtggtaaataagcgacgaccaaatatgagacgacaaaagataaacggcggacacgcgataagaggcaac

SEQ ID NO: 414702 - DNA, 1386 bp, Homo sapiens
  misc_feature (6)..(6): n is a, c, g, or t
  misc_feature (15)..(15): n is a, c, g, or t
gaaatnggctaggtngaggctggtgttaatcggccgaggctgcggcgggcgtctgttctagtgtttgagccgtcgtgcttcaccggtctacctcgctagcatgtcgggccgcggcaagactggcggcaaggcccgcgccaaggccaagtcgcgctcgtcgcgcgccggcctccagttcccagtgggccgtgtacaccggctgctgcggaagggccactacgccgagcgcgttggcgccggcgcgccagtgtacctggcggcagtgctggagtacctcaccgctgagatcctggagctggcgggcaatgcggcccgcgacaacaagaagacgcgaatcatcccccgccacctgcagctggccatccgcaacgacgaggagctcaacaagctgctgggcggcgtgacgatcgcccagggaggcgtcctgcccaacatccaggccgtgctgctgcccaagaagaccagcgccaccgtggggccgaaggcgccctcgggcggcaagaaggccacccaggcctcccaggagtactaagagggcccgcgccgcggccggccgccaggcctccccatgccaccacaaaggcccttttaagggccaccaccgccctcatggaaagagctgagccgcttcagactgcggggcaagcgggccgcggctcccttcccctcccctcccctcgcccgccttcgccgcccggcgctgcggggaggccgcagcaccttctggaagacttggccttccgctctgacgcagggccgaggtgggcagtccaggccgagaggccggcggccctgaaggtgagtgaggccctcggcagctgcagccggggtgtctggtacccccccggcgtggtgcttagcccaggactttcagacgcggccgctggccgggaggctttggtgggagagacgcgatcgccgatttcggtctggcgccccttctgcggccgggacccaggcctttcacatcagctctccctccatcttcattcataggtctgcgctggggccgggacgaagcacttggtaacaggcacatcttcctcccgagtgactgcctcctaggaggacatttaggggagggcagaggcctgcagtttggcttcacggctggctatgtggacagcaagagtcgttttcgcggaagccgactggcagccaggcctgtcgggccccccgacgccgccccatttcccttccagcaaactcaactcggcaatccaagcacctagataccagcacaagtcggttaatccctgtctggactgagcctccgttggcttctgaactggaattctgcagctaacccttccacgactagaaccttaggcattggggagttttagatggactaattttattaaaggattgttttttttttaaata

SEQ ID NO: 414703 - DNA, 1595 bp, Homo sapiens
  misc_feature (6)..(6): n is a, c, g, or t
  misc_feature (15)..(15): n is a, c, g, or t
gaaatnggctaggtngaggctggtgttaatcggccgaggctgcggcgggcgtctgttctagtgtttgagccgtcgtgcttcaccggtctacctcgctagcatgtcgggccgcggcaagactggcggcaaggcccgcgccaaggccaagtcgcgctcgtcgcgcgccggcctccagttcccagtgggccgtgtacaccggctgctgcggaagggccactacgccgagcgcgttggcgccggcgcgccagtgtacctggcggcagtgctggagtacctcaccgctgagatcctggagctggcgggcaatgcggcccgcgacaacaagaagacgcgaatcatcccccgccacctgcagctggccatccgcaacgacgaggagctcaacaagctgctgggcggcgtgacgatcgcccagggaggcgtcctgcccaacatccaggccgtgctgctgcccaagaagaccagcgccaccgtggggccgaaggcgccctcgggcggcaagaaggccacccaggcctcccaggagtactaagagggcccgcgccgcggccggccgccaggcctccccatgccacgccctcatggaaagagctgagccgcttcagactgcggggcaagcgggccgcggctcccttcccctcccctcccctcgcccgccttcgccgcccggcctcgagtccccgcccgcccccgctcccgtcccgcaccgcctgccgcgtcggcctcgggccctgccctgtccgccgtccgccctccggtagggttcgggccttccggatgcggcttgggcgctcttcggggacctccgtggcgcggaagacccgagcctgccggggggaggccggcggcgccgcacctgcccgcctcggcgttcgtgactcagccgccccatcccgagtcgctaaggggctgcggggaggccgcagcaccttctggaagacttggccttccgctctgacgcagggccgaggtgggcagtccaggccgagaggccggcggccctgaaggtgagtgaggccctcggcagctgcagccggggtgtctggtacccccccggcgtggtgcttagcccaggactttcagacgcggccgctggccgggaggctttggtgggagagacgcgatcgccgatttcggtctggcgccccttctgcggccgggacccaggcctttcacatcagctctccctccatcttcattcataggtctgcgctggggccgggacgaagcacttggtaacaggcacatcttcctcccgagtgactgcctcctaggaggacatttaggggagggcagaggcctgcagtttggcttcacggctggctatgtggacagcaagagtcgttttcgcggaagccgactggcagccaggcctgtcgggccccccgacgccgccccatttcccttccagcaaactcaactcggcaatccaagcacctagataccagcacaagtcggttaatccctgtctggactgagcctccgttggcttctgaactggaattctgcagctaacccttccacgactagaaccttaggcattggggagttttagatggactaattttattaaaggattgttttttttttaaata

SEQ ID NO: 414704 - DNA, 1194 bp, Homo sapiens
  misc_feature (6)..(6): n is a, c, g, or t
  misc_feature (15)..(15): n is a, c, g, or t
gaaatnggctaggtngaggctggtgttaatcggccgaggctgcggcgggcgtctgttctagtgtttgagccgtcgtgcttcaccggtctacctcgctagcatgtcgggccgcggcaagactggcggcaaggcccgcgccaaggccaagtcgcgctcgtcgcgcgccggcctccagttcccagtgggccgtgtacaccggctgctgcggaagggccactacgccgagcgcgttggcgccggcgcgccagtgtacctggcggcagtgctggagtacctcaccgctgagatcctggagctggcgggcaatgcggcccgcgacaacaagaagacgcgaatcatcccccgccacctgcagctggccatccgcaacgacgaggagctcaacaagctgctgggcggcgtgacgatcgcccagggaggcgtcctgcccaacatccaggccgtgctgctgcccaagaagaccagcgccaccgtggggccgaaggcgccctcgggcggcaagaaggccacccaggcctcccaggagtactaagagggcccgcgccgcggccggccgccaggcctccccatgccaccacaaaggcccttttaagggccaccaccaaggtgagtgaggccctcggcagctgcagccggggtgtctggtacccccccggcgtggtgcttagcccaggactttcagacgcggccgctggccgggaggctttggtgggagagacgcgatcgccgatttcggtctggcgccccttctgcggccgggacccaggcctttcacatcagctctccctccatcttcattcataggtctgcgctggggccgggacgaagcacttggtaacaggcacatcttcctcccgagtgactgcctcctaggaggacatttaggggagggcagaggcctgcagtttggcttcacggctggctatgtggacagcaagagtcgttttcgcggaagccgactggcagccaggcctgtcgggccccccgacgccgccccatttcccttccagcaaactcaactcggcaatccaagcacctagataccagcacaagtcggttaatccctgtctggactgagcctccgttggcttctgaactggaattctgcagctaacccttccacgactagaaccttaggcattggggagttttagatggactaattttattaaaggattgttttttttttaaata

SEQ ID NO: 414705 - DNA, 834 bp, Homo sapiens
  misc_feature (6)..(6): n is a, c, g, or t
  misc_feature (15)..(15): n is a, c, g, or t
gaaatnggctaggtngaggctggtgttaatcggccgaggctgcggcgggcgtctgttctagtgtttgagccgtcgtgcttcaccggtctacctcgctagcatgtcgggccgcggcaagactggcggcaaggcccgcgccaaggccaagtcgcgctcgtcgcgcgccggcctccagttcccagtgggccgtgtacaccggctgctgcggaagggccactacgccgagcgcgttggcgccggcgcgccagtgtacctggcggcagtgctggagtacctcaccgctgagatcctggagctggcgggcaatgcggcccgcgacaacaagaagacgcgaatcatcccccgccacctgcagctggccatccgcaacgacgaggagctcaacaagctgctgggcggcgtgacgatcgcccagggaggcgtcctgcccaacatccaggccgtgctgctgcccaagaagaccagcgccaccgtggggccgaaggcgccctcgggcggcaagaaggccacccaggcctcccaggagtactaagagggcccgcgccgcggccggccgccaggcctccccatgccaccacaaaggcccttttaagggccaccaccgccctcatggaaagagctgagccgcttcagactgcggggcaagcgggccgcggctcccttggcccttcccacactctgcctccgtctgcagaactcgtccatctgcaccaggctctgcttcactccccccaagtcttggaattgttctttcctttgagtcacatttcacgctcatggaagagctgagcgtcagatggggcagcggcggttcctgtcgggagggggacgggg

SEQ ID NO: 414706 - DNA, 775 bp, Homo sapiens
  misc_feature (6)..(6): n is a, c, g, or t
  misc_feature (15)..(15): n is a, c, g, or t
gaaatnggctaggtngaggctggtgttaatcggccgaggctgcggcgggcgtctgttctagtgtttgagccgtcgtgcttcaccggtctacctcgctagcatgtcgggccgcggcaagactggcggcaaggcccgcgccaaggccaagtcgcgctcgtcgcgcgccggcctccagttcccagtgggccgtgtacaccggctgctgcggaagggccactacgccgagcgcgttggcgccggcgcgccagtgtacctggcggcagtgctggagtacctcaccgctgagatcctggagctggcgggcaatgcggcccgcgacaacaagaagacgcgaatcatcccccgccacctgcagctggccatccgcaacgacgaggagctcaacaagctgctgggcggcgtgacgatcgcccagggaggcgtcctgcccaacatccaggccgtgctgctgcccaagaagaccagcgccaccgtggggccgaaggcgccctcgggcggcaagaaggccacccaggcctcccaggagtactaagagggcccgcgccgcggccggccgccaggcctccccatgccaccacaaaggcccttttaagggccaccaccgccctcatggaaagagctgagccgcttcagactgcggggcaagcgggccgcggctccctggtagggtgggccgtgagttcggacgagggatgctccaggtggcatctcagctccagaggtgaagtcccagtggagcctatggctagtcttagatgccagcggggctatgtca

SEQ ID NO: 414707 - DNA, 451 bp, Homo sapiens
cagtgcagctgctgctgcggtcgctctgagatccccactctccctccatcttcattcataggtctgcgctggggccgggacgaagcacttggtaacaggcacatcttcctcccgagtgactgcctcctaggaggacatttaggggagggcagaggcctgcagtttggcttcacggctggctatgtggacagcaagagtcgttttcgcggaagccgactggcagccaggcctgtcgggccccccgacgccgccccatttcccttccagcaaactcaactcggcaatccaagcacctagataccagcacaagtcggttaatccctgtctggactgagcctccgttggcttctgaactggaattctgcagctaacccttccacgactagaaccttaggcattggggagttttagatggactaattttattaaaggattgttttttttttaaata

SEQ ID NO: 414708 - DNA, 1748 bp, Homo sapiens
gtcctgatgaagtgtgcagactctcagaaacagcaggaaggacttcatgagaaccctcaggctggagaagggactagggcacaaggagagctctcctaggaccaggaccaagaagctacaggcaggcacagtttagctcctgcagagacccagcttttcacaagttggagccttccagagatagagggactgtggtaggtggtgacccacccatcactggaggtggaagcagaggccgtttgccagggatgctggagaggggattcaagcatctggctgggcaacgtgatgctcagggccgtctccactcagggcttaggggagtctgtgagtagaagagctttaggtgatttgtttggtgggggaaggcaagtacacagctatgcactttccgtttctgacttttgccaccctgtcagccatggggagcccactgtgggactgaaaccctgagctgaatgcggcctcatgtctcagagaaacactggcaagttggtcagagccgccgtctgcatcgaggcgtagctgagcggcaggatggggggctgcctgcccagggtctctcaccgtggtgtaagcagagccatggcttgcctaggaccctatagataccatcactctttctcagctcgactggagtttctgcacctttgcaggggcaaagtaactccctgcaccctgaaccaccccccattcctgttcatttcagcagataatgatggagggggggggtgtccatcgtgctgagggtgtgaccgcaagagggtgaaaacttccagccaactttctcagtcctttctcttgcgagagggaagccacctgctatacaaactaataccccctgccttgaccccttccccacgactcagttgacagaaggatatactttgttataacttattattttgttctctgtaaatacaagatgtttataggaaatatgtattctgaactctatctgcagaatgagtcactacaccaaaatagttctattatttagaatgtgttaattttaaagggacctgataggtatttatttacatatgcgatccacatttgtgtgaaagcatgtgatcatactaacccagcctcctggaatgtcgctgtacgatgattgatgtctttttctcagtccatagttacaattgtttagtatgctaatcagtccagttccctgaggtttaagatcaaatataaattactctgcttttcgactcattcaggtagcattgtacctgaacctgattgctactttttcatcttaaatattatatttcctcatctaatctgccttcccctcatccacagacatttggagaaggaaatgggagggtgtctgttatccctttctctttgctttgtccccgttgttagactggcagcgtcagttgctcggtgggcttggttagagccgtgggtgaggcaggtggctggcggggacagggagaggctgagagggaagtggtggcatttactgctctgacacttccactgtccctgctggggatgctggggccaaggcctgtggggcctgtgaactgcacagccaggagcaaggaacccactaaatactccgtcacctccatgtcccctctacagtgttaaattattacataagcaggtgaaaggtagaaggcgaattatgtgagtaaatatggtctgttttctcttcagcaaaaatgactatttttgtgtgtgactaatttatttttattattgtaaagatacaataaaccggttgaaatatc

SEQ ID NO: 414709 - DNA, 893 bp, Homo sapiens
agttactctggtcagtgtgtgtgtgggtgtgtgttgggtattgtgtgatgatggagtgctgctgtgagagtactttataggaaatatgtattctgaactctatctgcagaatgagtcactacaccaaaatagttctattatttagaatgtgttaattttaaagggacctgataggtatttatttacatatgcgatccacatttgtgtgaaagcatgtgatcatactaacccagcctcctggaatgtcgctgtacgatgattgatgtctttttctcagtccatagttacaattgtttagtatgctaatcagtccagttccctgaggtttaagatcaaatataaattactctgcttttcgactcattcaggtagcattgtacctgaacctgattgctactttttcatcttaaatattatatttcctcatctaatctgccttcccctcatccacagacatttggagaaggaaatgggagggtgtctgttatccctttctctttgctttgtccccgttgttagactggcagcgtcagttgctcggtgggcttggttagagccgtgggtgaggcaggtggctggcggggacagggagaggctgagagggaagtggtggcatttactgctctgacacttccactgtccctgctggggatgctggggccaaggcctgtggggcctgtgaactgcacagccaggagcaaggaacccactaaatactccgtcacctccatgtcccctctacagtgttaaattattacataagcaggtgaaaggtagaaggcgaattatgtgagtaaatatggtctgttttctcttcagcaaaaatgactatttttgtgtgtgactaatttatttttattattgtaaagatacaataaaccggttgaaatatc

SEQ ID NO: 414710 - DNA, 1856 bp, Homo sapiens
gtcctgatgaagtgtgcagactctcagaaacagcaggaaggacttcatgagaaccctcaggctggagaagggactagggcacaaggagagctctcctaggaccaggaccaagaagctacaggcaggcacagtttagctcctgcagagacccagcttttcacaagttggagccttccagagatagagggactgtggtaggtggtgacccacccatcactggaggtggaagcagaggccgtttgccagggatgctggagaggggattcaagcatctggctgggcaacgtgatgctcagggccgtctccactcagggcttaggggagtctgtgagtagaagagctttaggtgatttgtttggtgggggaaggcaagtacacagctatgcactttccgtttctgacttttgccaccctgtcagccatggggagcccactgtgggactgaaaccctgagctgaatgcggcctcatgtctcagagaaacactggcaagttggtcagagccgccgtctgcatcgaggcgtagctgagcggcaggatggggggctgcctgcccagggtctctcaccgtggtgtaagcagagccatggcttgcctaggaccctatagataccatcactctttctcagctcgactggagtttctgcacctttgcaggggcaaagtaactccctgcaccctgaaccaccccccattcctgttcatttcagcagataatgatggagggggggggtgtccatcgtgctgagggtgtgaccgcaagagggtgaaaacttccagccaactttctcagtcctttctcttgcgagagggaagccacctgctatacaaactaataccccctgccttgaccccttccccacgactcagttgacagaaggatatactttgttataacttattattttgttctctgtaaatacaagatgtttataggaaatatgtattctgaactctatctgcagaatgagtcactacaccaaaatagttctattatttagaatgtgttaattttaaagggacctgataggtatttatttacatatgcgatccacatttgtgtgaaagcatgtgatcatactaacccagcctcctggaatgtcgctgtacgatgattgatgtctttttctcagtccatagttacaattgtttagtatgctaatcagtccagttccctgaggtttaagatcaaatataaattactctgcttttcgactcattcaggtagcattgtacctgaacctgattgctactttttcatcttaaatattatatttcctcatctaatctgccttcccctcatccacagacatttggagaaggaaatgggagggtgtctgttatccctttctctttgctttgtccccgttgttagactggcagcgtcagttgctcggtgggcttggttagagccgtgggtgaggcaggtggctggcggggacagggagaggctgagagggaagtggtggcatttactgctctgacacttccactgtccctgctggggatgctggggccaaggcctgtggggcctgtgaactgcacagccaggagcaaggaacccactaaatactccgtcacctccatgtcccctctacagtgttaaattattacataagcaggtgaaaggtagaaggcgaattatgtgagtaaatatggtctgttttctcttcagcaaaaatgactatttttgtgtgtgactaatttatttttattattgtaaagatacaataaaccggttgaaatatctgctttgttgacaagcgtgtgctttctctggccttattcgcgttctgttctcctgcaaatagcgccctctaaaaagaagagtcagacaataaactggttgaaatatct

SEQ ID NO: 414711 - DNA, 208 bp, Homo sapiens
ttggtggctattgtgcacttgaaatgtggctcgtgcgactgaggaactgaatttgacattttatttaatgtcagtcaatttaaattcaagtagcctcatgtggccagtaggcaccctctagggcagtgtagaaagtgcaagggcagctgggggagaagctcctggcagggcagtggtatcacctcagaggagtttgtagggaggcagt

SEQ ID NO: 414712 - DNA, 783 bp, Homo sapiens
gcgggcggcgcgggcacgggcacgggcgcgggcggcgcggcgaggaggcggcccgcggagtccagcgaagtttggcggaacatggcggaagcgtctggggcacgcaggagcgcggggcggcggcggccggagcccgaggagctgtagcagccttagtcgccgccgccgcggggcgaggtcgccgccatggcccgctggatcccgaccaagaggcagaagtacggggttgcgatctataactacaatgcttctcaagatgtggagctctccttgcagatcggtgacacagttcacatcctggagatgtacgagggttggtacagaggatataccctccaaaataaatctaaaaaggcaattggttccaggacccccacaataccgaaatccatggatgctcaagtctctgatataaaatggcatagtatttgcatataacctctgcatttcctcccgtgtactttaaatcatgtctagattatttataatacctaatacaatgtaaatgctatgtaagtagttattataccgtattgtttagggaataatgacaaggaaataaacctctgcttactttttttttctatatttttaatcatcagttggttgaacccatgatatggagggccttgtgtatataaaaatcaatctagctaatagtgccattgttgttggctttgaacagtagatagatagggttcccccaggatctaaatgataaattctggattttttttttaatttttttgtgttcattaaagagtgcttaaaacctttaagctt

SEQ ID NO: 414713 - DNA, 1245 bp, Homo sapiens
gcgggcggcgcgggcacgggcacgggcgcgggcggcgcggcgaggaggcggcccgcggagtccagcgaagtttggcggaacatggcggaagcgtctggggcacgcaggagcgcggggcggcggcggccggagcccgaggagctgtagcagccttagtcgccgccgccgcggggcgaggtcgccgccatggcccgctggatcccgaccaagaggcagaagtacggggttgcgatctataactacaatgcttctcaagatgtggagctctccttgcagatcggtgacacagttcacatcctggagatgtacgagggttggtacagaggatataccctccaaaataaatctaaaaaggcaattggttccaggacccccacaataccgaaatccatggatgctcaagtctctgatataaaatggcatagtatttgcatataacctctgcatttcctcccgtgtactttaaatcatgtctagattatttataatacctaatacaatgtaaatgctatgtaagtagttattataccgtattgtttagggaataatgacaaggaaataaacctctgcttactttttttttctatatttttaatcatcagttggttgaacccatgatatggagggccttgtgtatataaaaatcaatctagctaatagtgccattgttgttggctttgaacagtagatagatagggttcccccaggatctaaatgataaattctggattttttttttaatttttttgtgttcattaaagagtgcttaaaacctttaagcttaaaatctcacccttcagaagaaatctttcggtaagagtttctctttgttctcttggtaagtaaagaaaaactttctaattcaatgaaatgatgacacagacaagggacatgcatttatttgatgattgttttaagccgaaatatccttcttgtggagagattcagggaaaatacaggcaaatcaaattcagttgccatgaattctgctctgcttttgacaccccgtcattaagagatcagctcattagaaacgctctcctgtgctgtgtccctcatttctccgtctttaaggggaagagctacttgaaaggcctgttgttttaatggaaattcttggtgtcatttataagctgacccagccatttagagtgatgataaaaggagctagttgatgataaaaggagctagtggttttacaaattgaagaagccaagcgcttttccgaaactgattattgatcct

SEQ ID NO: 414714 - DNA, 2199 bp, Homo sapiens
gcgggcggcgcgggcacgggcacgggcgcgggcggcgcggcgaggaggcggcccgcggagtccagcgaagtttggcggaacatggcggaagcgtctggggcacgcaggagcgcggggcggcggcggccggagcccgaggagctgtagcagccttagtcgccgccgccgcggggcgaggtcgccgccatggcccgctggatcccgaccaagaggcagaagtacggggttgcgatctataactacaatgcttctcaagatgtggagctctccttgcagatcggtgacacagttcacatcctggagatgtacgagggttggtacagaggatataccctccaaaataaatctaaaaagggcattttccctgaaacatatatccatttgaaagaggcaactgtggaagacctggggcagcatgaaaccgtgattcctggcgagctccccctggtgcaggagctcacgtccactctgcgagaatgggctgtcatctggcgaaagctctacgtgaacaacaagctcaccctcttccgccagctgcagcagatgacgtacagcctgatcgagtggcggtcccagatcctgtctgggacgctccccaaggatgaactggcagagctcaagaagaaagtcacagccaaaattgatcatgggaacagaatgctggggttagatctggtggtgcgagatgacaatgggaacatcctagaccctgacgaaaccagcaccattgccctcttcaaggcccatgaggtggcctccaaaaggattgaggaaaagatccaagaagagaagtcaatcctgcagaacctcgatttgcggggccagtccatcttcagtaccatccacacctatggcctctatgtgaacttcaagaactttgtctgcaacatcggggaagatgcagagttgtttatggccctctacgacccagaccagtccacttttatcagtgagaactatctaattcgttggggcagtaacgggatgcccaaggaaatagagaagctcaataacctccaagcagtgtttacagaccttagcagcatggacctcatccggccccgcgtcagccttgtgtgccagattgtccgcgtgggccatatggagctgaaggaaggcaagaagcacacctgtggactccgaagaccttttggagtggcagtgatggatattactgatatcatacatgggaaggtggatgatgaagaaaagcagcattttattccctttcagcagtaagtactttggcatgtgtcccaggtgacttgagacctggattagccattcaattgtcttttaacacagaaacaggtgttagaaaccattttctcagagaaggaaagattctaagctgcaagattgtcagataggagctgaacagaagactttattcaaagtccttgatgttggactcccattgaagagggtaaactgaactttcctgattctatagaaagcatcaaaggaatataaaagggcacatatctgtctgctctggaatgcagagagggtgccgtccttgtgtcagcaatgccaaaatatatgtgcagtctattgcatgaaacaggcatcatggatgacacggaatcacgtgggctagcatagggcttctcagactgcatcatgcatatgaatcaggggaacttgttaggctgcaggggagttctgcctctgacaagctcccaggtgatgctgatgtagctggtctgagggccacactgtctgtagcgagggtttaggagatgagagagtgaagggctgacccacccatgggccagtgttcctgcatgttgggggaaagccagcctgggagcatgtgaaaggatccttgcagagctttactgaggccctccatattgagctgcaggagctggagccatgggtaggccattgaggagctgttgggagcagattcaagccgtgtcactctgaagaagtgcaggtgtgaacgtcatgacctgctccagcacctgcacaggcagtggaggcctagtggaggccaagagcattgccgggaccaagtcccaccaggggccatcgtgccagtcagagggcatcatctcagctcacttgcagctgccactgcagacaagtagaacaaactgagaattccacaaaccagccagagtcatatatttgagttaatatatcactttttacaaatgatatcacaaattagtggagaaagatacattatgc

SEQ ID NO: 414715 - DNA, 836 bp, Homo sapiens
atgctttcaactactataatcacaaaatttatagataaagtgtttcatgttatgaaacatttatctataaattttgtgattatagtagtggaatacatagaaaaaaatatgctttcaactttgtgagtgaatttcgtgttgtgtaagttatatgtcaaatctttgaattttaattttactcttttatacatgtgataatttcataaagtgagggatcccaaaaaaagagtttcatccaacattcttgttctgcaggttgcttttataaagaaggtgaactattttcatgtaatgttaagagttaaacttatctttcccaaatataactttattattagcttgggaaaaatgaaattgtattcccatttttaaaataaatacaaatgtttatttcagaagggcagttttgattatatgtgaatacacaaattttactggatttatcttaataaaaagactctgacgatgattgtgttttgttatatcttcaaaaatatagctagtgaaatattgtgcttaatttttttctattgtgttattcatgaaaatatttaatattcactgacataaaattaatataaagtaaaattcaccattttaattataataaaaataaagtatataattcaatggttgtcagtatattcacaatgttgtgtccactgtttaattccagagaatttttatcacccaaataagaaacaaagcaccaattagcagtctcttcccattttcgcccaacttatcccccacctccatcccttggcaaccactaatctgccttctatctctatggatttgcctattctgaacatttattataaatggaatcacat

SEQ ID NO: 414716 - DNA, 1981 bp, Homo sapiens
tgatttttgacgattccttccctgagaagagggcgaggagaagaagaaagaaaaaggagaactgaattgaattagattagcatgaaggaccttttcacgcggagactaaaagtactgcgcataacttcctgctcagaaatatatgcaaataagaagacagatcctgaaagagcaagcttatgacatccctttcccttctcaagtggacactgctatgctctcacccctcactcagaactaagagtctccagatgcttcctgcccttgaacattggaatacaagttcttcagctttgggactcttggaccttcgaccacagactgaaggctgcactgtcggcttccctatttttgaggttttggaacttggactggctttcttgctcctcagcttgcagacagcctaatgtgggacttcatcttgtgatcgtaggagagtacaggtcgtgctgcagttagttcattgaaaactcatttgctcttggagcagtcaggcagtgactgccttcggctttttttctgctgactaagatctcctatagagagctacaacaatgcccaaaagaaaggctgcaggtcaaggtgatatgaggcaggagccaaagagaagatctgccaggttgtctgctatgcttgtgccagttacaccagaggtgaagcctaaaagaacatcaagttcaaggaaaatgaagacaaaaagtgatatgatggaagaaaacatagatacaagtgcccaagcagttgctgaaaccaagcaagaagcagttgttgaagaagactacaatgaaaatgctaaaaatggagaagccaaaattacagaggcaccagcttctgaaaaagaaattgtggaagtaaaagaagaaaatattgaagatgccacagaaaagggaggagaaaagaaagaagcagtggcagcagaagtaaaaaatgaagaagaagatcagaaagaagatgaagaagatcaaaacgaagagaaaggggaagctggaaaagaagacaaagatgaaaaaggggaagaagatggaaaagaggataaaaatggaaatgagaaaggagaagatgcaaaagagaaagaagatggaaaaaaaggtgaagacggaaaaggaaatggagaagatggaaaagagaaaggagaagatgaaaaagaggaagaagacagaaaagaaacaggagatggaaaagagaatgaagatggaaaagagaagggagataaaaaagaggggaaagatgtaaaagtcaaagaagatgaaaaagagagagaagatggaaaagaagatgaaggtggaaatgaggaagaagctggaaaagagaaagaagatttaaaagaagaggaagaaggaaaagaggaagatgagatcaaagaagatgatggaaaaaaagaggagccacagagtattgtttaaaactgccctatgtagtttcataatttggtaacatgtaccttcatgttgtaaagttaatagagataaatatttttatcaaaaattttataaacacagcctttctttagcattgatttaatttcagaacatcttcatattgattattagccataaagtttctaacatgaaacatttatctataaattttgtgattatagtagtggaatacatagaaaaaaatatgctttcaactttgtgagtgaatttcgtgttgtgtaagttatatgtcaaatctttgaattttaattttactcttttatacatgtgataatttcataaagtgagggatcccaaaaaaagagtttcatccaacattcttgttctgcaggttgcttttataaagaaggtgaactattttcatgtaatgttaagagttaaacttatctttcccaaatataactttattattagcttgggaaaaatgaaattgtattcccatttttaaaataaatacaaatgtttatttcagaagggcagttttgattatatgtgaatacacaaattttactggatttatcttaataaaaagactctgacga

SEQ ID NO: 414717 - DNA, 1034 bp, Homo sapiens
gccgccctttttttcaaaaatcgaaactctttcttgggcctccttgagtgcaacttcaagtctctccaccttcggattcccttcccttaggcacagcaggagcgggctcacagttaactcctcaggttcgaagtaattctgggccccatcggcagatctgctcctatatttagacaaggccgtgccagtggagacggttctcgtgggcccaggactatgctttttttctgctgactaagatctcctatagagagctacaacaatgcccaaaagaaaggctgcaggtcaaggtgatatgaggcaggagccaaagagaagatctgccaggttgtctgctatgcttgtgccagttacaccagaggtgaagcctaaaagaacatcaagttcaagggaaaagaggaagatgagatcaaagaagatgatggaaaaaaagaggagccacagagtattgtttaaaactgccctatgtagtttcataatttggtaacatgtaccttcatgttgtaaagttaatagagataaatatttttatcaaaaattttataaacacagcctttctttagcattgatttaatttcagaacatcttcatattgattattagccataaagtttctaacatgaaacatttatctataaattttgtgattatagtagtggaatacatagaaaaaaatatgctttcaactttgtgagtgaatttcgtgttgtgtaagttatatgtcaaatctttgaattttaattttactcttttatacatgtgataatttcataaagtgagggatcccaaaaaaagagtttcatccaacattcttgttctgcaggttgcttttataaagaaggtgaactattttcatgtaatgttaagagttaaacttatctttcccaaatataactttattattagcttgggaaaaatgaaattgtattcccatttttaaaataaatacaaatgtttatttcagaagggcagttttgattatatgtgaatacacaaattttactggatttatcttaataaaaagactctgacga

SEQ ID NO: 414718 - DNA, 620 bp, Homo sapiens
aggagagtacaggtcgtgctgcagttagttcattgaaaactcatttgctcttggagcagtcaggcagtgactgccttcggctttttttctgctgactaagatctcctatagagagctacaacaatgcccaaaagaaaggtaagtgaaatggaaagacagacggggaatgagctgctgagttacctatttcctaataggaagaatttatttgtttgtttggttttttttaaagctttttggcttcttccattttgtgatgtaatgaaacggaaaggggtagaagggcaaagagcagtcggtgtaaggtttaggatggtcttgcatgcaactggtagttcacttttggagtgttctgtttaaggagagaatctcttgaaaggtgtctccatgctgaattacaaacagccatagcgctgggctgtcgcttcctaccccaacccccttcctccgcttaccctattggagaacacttctcccaaccatacttcagtttcctcctctgccaccggcttttctcggggaaccgtcccgtctggggaacgaaagccatggctttctcctgtatttgcctttgttcttcccgttttcttttttcttttttttttttccttccctcctcc

SEQ ID NO: 414719 - DNA, 2351 bp, Homo sapiens
tgatttttgacgattccttccctgagaagagggcgaggagaagaagaaagaaaaaggagaactgaattgaattagattagcatgaaggaccttttcacgcggagactaaaagtactgcgcataacttcctgctcagaaatatatgcaaataagaagacagatcctgaaagagcaagcttatgacatccctttcccttctcaagtggacactgctatgctctcacccctcactcagaactaagagtctccagatgcttcctgcccttgaacattggaatacaagttcttcagctttgggactcttggaccttcgaccacagactgaaggctgcactgtcggcttccctatttttgaggttttggaacttggactggctttcttgctcctcagcttgcagacagcctaatgtgggacttcatcttgtgatcgtaggagagtacaggtcgtgctgcagttagttcattgaaaactcatttgctcttggagcagtcaggcagtgactgccttcggctttttttctgctgactaagatctcctatagagagctacaacaatgcccaaaagaaaggctgcaggtcaaggtgatatgaggcaggagccaaagagaagatctgccaggttgtctgctatgcttgtgccagttacaccagaggtgaagcctaaaagaacatcaagttcaaggaaaatgaagacaaaaagtgatatgatggaagaaaacatagatacaagtgcccaagcagttgctgaaaccaagcaagaagcagttgttgaagaagactacaatgaaaatgctaaaaatggagaagccaaaattacagaggcaccagcttctgaaaaagaaattgtggaagtaaaagaagaaaatattgaagatgccacagaaaagggaggagaaaagaaagaagcagtggcagcagaagtaaaaaatgaagaagaagatcagaaagaagatgaagaagatcaaaacgaagagaaaggggaagctggaaaagaagacaaagatgaaaaaggggaagaagatggaaaagaggataaaaatggaaatgagaaaggagaagatgcaaaagagaaagaagatggaaaaaaaggtgaagacggaaaaggaaatggagaagatggaaaagagaaaggagaagatgaaaaagaggaagaagacagaaaagaaacaggagatggaaaagagaatgaagatggaaaagagaagggagataaaaaagaggggaaagatgtaaaagtcaaagaagatgaaaaagagagagaagatggaaaagaagatgaaggtggaaatgaggaagaagctggaaaagagaaagaagatttaaaagaagaggaagaaggaaaagaggaagatgagatcaaagaagatgatggaaaaaaagaggagccacagagtattgtttaaaactgccctatgtagtttcataatttggtaacatgtaccttcatgttgtaaagttaatagagataaatatttttatcaaaaattttataaacacagcctttctttagcattgatttaatttcagaacatcttcatattgattattagccataaagtttctaacatgaaacatttatctataaattttgtgattatagtagtggaatacatagaaaaaaatatgctttcaactttgtgagtgaatttcgtgttgtgtaagttatatgtcaaatctttgaattttaattttactcttttatacatgtgataatttcataaagtgagggatcccaaaaaaagagtttcatccaacattcttgttctgcaggttgcttttataaagaaggtgaactattttcatgtaatgttaagagttaaacttatctttcccaaatataactttattattagcttgggaaaaatgaaattgtattcccatttttaaaataaatacaaatgtttatttcagaagggcagttttgattatatgtgaatacacaaattttactggatttatcttaataaaaagactctgacgatgattgtgttttgttatatcttcaaaaatatagctagtgaaatattgtgcttaatttttttctattgtgttattcatgaaaatatttaatattcactgacataaaattaatataaagtaaaattcaccattttaattataataaaaataaagtatataattcaatggttgtcagtatattcacaatgttgtgtccactgtttaattccagagaatttttatcacccaaataagaaacaaagcaccaattagcagtctcttcccattttcgcccaacttatcccccacctccatcccttggcaaccactaatctgccttctatctctatggatttgcctattctgaacatttattataaatggaatcacat

SEQ ID NO: 414720 - DNA, 2059 bp, Homo sapiens
gccgccctttttttcaaaaatcgaaactctttcttgggcctccttgagtgcaacttcaagtctctccaccttcggattcccttcccttaggcacagcaggagcgggctcacagttaactcctcaggttcgaagtaattctgggccccatcggcagatctgctcctatatttagacaaggccgtgccagtggagacggttctcgtgggcccaggactatgctttttttctgctgactaagatctcctatagagagctacaacaatgcccaaaagaaaggctgcaggtcaaggtgatatgaggcaggagccaaagagaagatctgccaggttgtctgctatgcttgtgccagttacaccagaggtgaagcctaaaagaacatcaagttcaaggaaaatgaagacaaaaagtgatatgatggaagaaaacatagatacaagtgcccaagcagttgctgaaaccaagcaagaagcagttgttgaagaagactacaatgaaaatgctaaaaatggagaagccaaaattacagaggcaccagcttctgaaaaagaaattgtggaagtaaaagaagaaaatattgaagatgccacagaaaagggaggagaaaagaaagaagcagtggcagcagaagtaaaaaatgaagaagaagatcagaaagaagatgaagaagatcaaaacgaagagaaaggggaagctggaaaagaagacaaagatgaaaaaggggaagaagatggaaaagaggataaaaatggaaatgagaaaggagaagatgcaaaagagaaagaagatggaaaaaaaggtgaagacggaaaaggaaatggagaagatggaaaagagaaaggagaagatgaaaaagaggaagaagacagaaaagaaacaggagatggaaaagagaatgaagatggaaaagagaagggagataaaaaagaggggaaagatgtaaaagtcaaagaagatgaaaaagagagagaagatggaaaagaagatgaaggtggaaatgaggaagaagctggaaaagagaaagaagatttaaaagaagaggaagaaggaaaagaggaagatgagatcaaagaagatgatggaaaaaaagaggagccacagagtattgtttaaaactgccctatgtagtttcataatttggtaacatgtaccttcatgttgtaaagttaatagagataaatatttttatcaaaaattttataaacacagcctttctttagcattgatttaatttcagaacatcttcatattgattattagccataaagtttctaacatgaaacatttatctataaattttgtgattatagtagtggaatacatagaaaaaaatatgctttcaactttgtgagtgaatttcgtgttgtgtaagttatatgtcaaatctttgaattttaattttactcttttatacatgtgataatttcataaagtgagggatcccaaaaaaagagtttcatccaacattcttgttctgcaggttgcttttataaagaaggtgaactattttcatgtaatgttaagagttaaacttatctttcccaaatataactttattattagcttgggaaaaatgaaattgtattcccatttttaaaataaatacaaatgtttatttcagaagggcagttttgattatatgtgaatacacaaattttactggatttatcttaataaaaagactctgacgatgattgtgttttgttatatcttcaaaaatatagctagtgaaatattgtgcttaatttttttctattgtgttattcatgaaaatatttaatattcactgacataaaattaatataaagtaaaattcaccattttaattataataaaaataaagtatataattcaatggttgtcagtatattcacaatgttgtgtccactgtttaattccagagaatttttatcacccaaataagaaacaaagcaccaattagcagtctcttcccattttcgcccaacttatcccccacctccatcccttggcaaccactaatctgccttctatctctatggatttgcctattctgaacatttattataaatggaatcacat

SEQ ID NO: 414721 - DNA, 2321 bp, Homo sapiens
tgatttttgacgattccttccctgagaagagggcgaggagaagaagaaagaaaaaggagaactgaattgaattagattagcatgaaggaccttttcacgcggagactaaaagtactgcgcataacttcctgctcagaaatatatgcaaataagaagacagatcctgaaagagcaagcttatgacatccctttcccttctcaagtggacactgctatgctctcacccctcactcagaactaagagtctccagatgcttcctgcccttgaacattggaatacaagttcttcagctttgggactcttggaccttcgaccacagactgaaggctgcactgtcggcttccctatttttgaggttttggaacttggactggctttcttgctcctcagcttgcagacagcctaatgtgggacttcatcttgtgatcgtaggagagtacaggtcgtgctgcagttagttcattgaaaactcatttgctcttggagcagtcaggcagtgactgccttcggctttttttctgctgactaagatctcctatagagagctacaacaatgcccaaaagaaagccaaagagaagatctgccaggttgtctgctatgcttgtgccagttacaccagaggtgaagcctaaaagaacatcaagttcaaggaaaatgaagacaaaaagtgatatgatggaagaaaacatagatacaagtgcccaagcagttgctgaaaccaagcaagaagcagttgttgaagaagactacaatgaaaatgctaaaaatggagaagccaaaattacagaggcaccagcttctgaaaaagaaattgtggaagtaaaagaagaaaatattgaagatgccacagaaaagggaggagaaaagaaagaagcagtggcagcagaagtaaaaaatgaagaagaagatcagaaagaagatgaagaagatcaaaacgaagagaaaggggaagctggaaaagaagacaaagatgaaaaaggggaagaagatggaaaagaggataaaaatggaaatgagaaaggagaagatgcaaaagagaaagaagatggaaaaaaaggtgaagacggaaaaggaaatggagaagatggaaaagagaaaggagaagatgaaaaagaggaagaagacagaaaagaaacaggagatggaaaagagaatgaagatggaaaagagaagggagataaaaaagaggggaaagatgtaaaagtcaaagaagatgaaaaagagagagaagatggaaaagaagatgaaggtggaaatgaggaagaagctggaaaagagaaagaagatttaaaagaagaggaagaaggaaaagaggaagatgagatcaaagaagatgatggaaaaaaagaggagccacagagtattgtttaaaactgccctatgtagtttcataatttggtaacatgtaccttcatgttgtaaagttaatagagataaatatttttatcaaaaattttataaacacagcctttctttagcattgatttaatttcagaacatcttcatattgattattagccataaagtttctaacatgaaacatttatctataaattttgtgattatagtagtggaatacatagaaaaaaatatgctttcaactttgtgagtgaatttcgtgttgtgtaagttatatgtcaaatctttgaattttaattttactcttttatacatgtgataatttcataaagtgagggatcccaaaaaaagagtttcatccaacattcttgttctgcaggttgcttttataaagaaggtgaactattttcatgtaatgttaagagttaaacttatctttcccaaatataactttattattagcttgggaaaaatgaaattgtattcccatttttaaaataaatacaaatgtttatttcagaagggcagttttgattatatgtgaatacacaaattttactggatttatcttaataaaaagactctgacgatgattgtgttttgttatatcttcaaaaatatagctagtgaaatattgtgcttaatttttttctattgtgttattcatgaaaatatttaatattcactgacataaaattaatataaagtaaaattcaccattttaattataataaaaataaagtatataattcaatggttgtcagtatattcacaatgttgtgtccactgtttaattccagagaatttttatcacccaaataagaaacaaagcaccaattagcagtctcttcccattttcgcccaacttatcccccacctccatcccttggcaaccactaatctgccttctatctctatggatttgcctattctgaacatttattataaatggaatcacat

SEQ ID NO: 414722 - DNA, 1158 bp, Homo sapiens
tgatttttgacgattccttccctgagaagagggcgaggagaagaagaaagaaaaaggagaactgaattgaattagattagcatgaaggaccttttcacgcggagactaaaagtactgcgcataacttcctgctcagaaatatatgcaaataagaagacagatcctgaaagagcaagcttatgacatccctttcccttctcaagtggacactgctatgctctcacccctcactcagaactaagagtctccagatgcttcctgcccttgaacattggaatacaagttcttcagctttgggactcttggaccttcgaccacagactgaaggctgcactgtcggcttccctatttttgaggttttggaacttggactggctttcttgctcctcagcttgcagacagcctaatgtgggacttcatcttgtgatcgtaggagagtacaggtcgtgctgcagttagttcattgaaaactcatttgctcttggagcagtcaggcagtgactgccttcggctttttttctgctgactaagatctcctatagagagctacaacaatgcccaaaagaaaggctgcaggtcaaggtgatatgaggcaggagccaaagagaagatctgccaggttgtctgctatgcttgtgccagttacaccagaggtgaagcctaaaagaacatcaagttcaaggaaaatgaagacaaaaagtgatatgatggaagaaaacatagatacaagtgcccaagcagttgctgaaaccaagcaagaagcagttgttgaagaagactacaatgaaaatgctaaaaatggagaagccaaaattacagaggcaccagcttctgaaaaagaaattgtggaagtaaaagaagaaaatattgaagatgccacagaaaagggaggagaaaagaaagaagcagtggcagcagaagtaaaaaatgaagaagaagatcagaaagagaaacgaagatggacacaaaaaggtgaacgacggaacaacggaacctggacgaacgactggacacagagaccacggagaagatgacacaccacggacgaacgaccagacaagaaaacaggcagatggacaccgagaactgccgcatggcccaacagcaagggcagattcaccaagaaggggaaagactgtacaagtcacagacgcatga

SEQ ID NO: 414723 - DNA, 224 bp, Homo sapiens
ttaaaacgtggatgtggaccagtgagtcatctgtgtcttgtcatctttaggagcctagcacaccagtcagagaaatctatggatttggagattgagatccctccaaatcttcgttcctagagaacatctaacctctggcagagtgaaaaacattttgccaatatcagcctgatggaaagctgaggatcagaaaagtcaggtaatatcacacatttgaagggtgc

SEQ ID NO: 414724 - DNA, 963 bp, Homo sapiens
caaggttatccatctcaagtagcctagcaatatttgcaacatcccaatggccctgtccttttctttacttatggccgtgctggtgctcagctacaaatccatctgttctctgggctgtgatctgcctcagacccacagcctcggtaataggagggccttgatactcctgggacaaatgggaagaatctctcctttctcctgcctgaaggacagacatgatttccgaatcccccaggaggagtttgatggcaaccagttccagaaggctcaagccatctctgtcctccatgagatgatccagcagaccttcaatctcttcagcacagaggactcatctgctgcttgggaacagagcctcctagaaaaattttccactgaactttaccagcaactgaatgacctggaagcatgtgtgatacaggaggttggggtggaagagactcccctgatgaatgaggactccatcctggctgtgaggaaatacttccaaagaatcactctttatctaatagagaggaaatacagcccttgtgcctgggaggttgtcagagcagaaatcatgagatccctctcgttttcaacaaacttgcaaaaaagattaaggaggaaggattgaaaactggttcaacatggcaatgatcctgattgactaatacattatctcacactttcatgagttcttccatttcaaagactcacttctataaccacgacgcgttgaatcaaaattttcaaatgttttcagcagtgtaaagaagtgtcgtgtatacctgtgcaggcactagtcctttacagatgaccattctgatgtctctgttcatcttttgtttaaatatttatttaattatttttaaaatttatgtaatatcatgagtcgctttacattgtggttaatgtaacaatatatgttcttcatatttagccaatatattaatttcctttttcattaaatttttactatac

SEQ ID NO: 414725 - DNA, 4913 bp, Homo sapiens
cggacagattccagtctgctgttagatgattattcatccaagttgagccccaaaccaaagagagccaagcacagcctactgtctggagaagagaaagaaaatttgcccagtgactacatggtacccattttctcaggacgtcaaaagcatgtcagtggaattactgatacggaagaagaaagaattaaggaagctgctgcttatatagcccagaggaatcttcttgctagtgaggaaggaatcacaacacctaaacagtccacggcatccaagcagaccacggcatctaagcagtccacggcatccaagcagtccacagcatccaagcagtccacggcatccaggcagtccacggcatccaggcagtctgtggtttccaaacaggccacatccgctcttcaacaggaagaaacttctgaaaagaagtcaaggaaagttgtgattcgaggaaaggcagaacgcctgtccctgaggaaaacattagaagaaaccgagacatatcatgccaagctgaatgaagaccatcttctccatgctcctgagtttatcattaaacctcgctcccacacggtttgggagaaggagaatgtaaaattgcattgctccatagcaggatggccagaacctcgtgtcacgtggtataaaaaccaggtgccaataaatgtccatgcaaaccctggaaagtatattattgagagtcgatatggaatgcacactctggagattaatgcatgtgattttgaagatacagctcagtaccgggcctcggcgatgaatgttaaaggagagctttcggcatatgcttcagttgtggtaaaaaggtataagggagagtttgatgagactcgcttccatgctggggcttccaccatgcccctcagctttggtgtgaccccatatggttatgcatcccggtttgagatccactttgatgacaaatttgatgtgtcttttgggagagagggagagacaatgagtctaggctgtcgtgttgtcatcactcctgaaattaaacatttccagccagagatccggtggtacagaaatggagtacctctttctccatcaaaatgggtgcaaacactttggagtggagagcgggcaacgctgacattttcccatctcaacaaagaagatgaaggcctctatacaatccgtgtacggatgggagaatattatgaacaatatagtgcttatgtctttgttcgagatgctgatgcagagattgaaggagccccagctgctcccttggatgtgaagtgcttggaggccaacaaagattatatcatcatctcctggaaacagccagctgtcgatggagggagtcctattctcggatattttattgataagtgtgaggtgggcacagatagctggtcgcagtgcaatgacacacctgtgaagtttgctcgttttcctgtcactggattgatcgaaggtcgttcctatatcttccgagttcgagctgtgaataaaatgggaataggtttcccatctcgagtttccgaggccgtggctgctctggatccggctgagaaagctagactaaagtcgcccctcagcaccctggactggacagtcattgttactgaagaggaaccttcagagggtattgtgcctggccccccgacagacctctctgtcactgaggccacccggagctatgtggtgctcagctggaagccccctggccagcgtggtcatgagggcattatgtactttgtggaaaagtgtgaggcaggaacagaaaactggcagcgagtgaacacggagctccctgtgaagtctccccgctttgctctgtttgacttggccgaggggaaatcctactgtttccgtgtccgctgttctaattctgcaggagttggtgagccctcagaggcaacggaggtgactgtggtaggggacaaacttgatatccccaaggctcctggcaaaatcatcccaagcagaaacacagacacctcagtggtagtttcgtgggaggagtccaaagatgccaaagagctggtcgggtactacatagaggcaaacgttgctggctctggcaagtgggagccctgtaacaacaaccccgtgaaaactcaccgattcacttgtcatggattagtgactggtcagagttatatattccgggtcagagcagtcaatgcagctggacttagtgaatattcccaggattcagaagctattgaagtcaaagctgctattgcaccaccatctccaccctgtgatatcacctgtcttgaaagttttcgtgactcaatggttcttggatggaagcaaccagataagactggaggggcagaaattactggctattatgtgaactatcgcgaggtcattgatggggtaccaggaaaatggagagaagccaatgtcaaggctgtcagagaggaggcatacaagattagcaacttgaaggaaaacatggtgtatcagttccaagtggcagccatgaacatggctgggctgggcgcgccctccgcagtaagcgaatgcttcaaatgtgaagagtggaccatcgccgtcccaggaccaccgcacagtctcaagtgtagtgaagtcaggaaagactcactggttctccagtggaagccgccagtccactccgggcggactccggtcactggttacttcgtggacttgaaggagaaggccaaagaagaccagtggcgagggctcaatgaggcggctattaaaaacgtatacctgaaggttcgaggcctcaaggagggcgtcagctacgtgttccgtgttcgagccataaaccaggcgggagttgggaagccatctgaccttgctggccctgttgtggcagagacccgtccaggaaggaaagaggttgttgtaaatgtggatgatgatggagtcatttcattgaacttcgagtgtgataagatgactccaaagtccgagttctcctggtccaaagattatgtatccactgaggactctccacgattggaagtcgaaagcaagggcaacaagacgaaaatgaccttcaaagaccttgggatggatgacttgggtatttactcttgcgatgtaacagacactgatggaatagcatcaagctacttaatagatgaggaagaattgaaacgtttacttgctctcagccatgaacacaagttcccaactgtcccagttaaatcagagttggcagttgaaattttggagaaaggccaggtccggttttggatgcaggctgagaaactgtctggcaatgccaaagtcaactacatatttaacgagaaggaaatttttgaaggcccgaaatataaaatgcatattgaccgaaacactggcatcatcgaaatgttcatggaaaagctacaggatgaggatgagggaacgtacactttccagcttcaagatggaaaagcaactaaccattctactgttgttctcgttggagatgttttcaaaaagctccagaaagaagctgaattccagcggcaagaatggatcaggaaacaaggtcctcactttgttgagtatttgagctgggaagtgactggtgaatgtaatgtactattgaaatgcaaggtggcaaatattaagaaggagactcatattgtgtggtacaaagatgagagggagatatcagtggatgaaaagcatgactttaaggatggtatatgtaccctgcttataacagagttttccaagaaagatgctgggatttatgaagttatcctgaaagatgaccgaggaaaagataagagcagactgaagcttgtggatgaagcctttaaggaactgatgatggaagtatgcaaaaaaatagctttgtctgctacagacctgaaaatccagagcacagccgagggcatccaactgtactcttttgtaacttactatgtggaggatttgaaagttaactggtcccacaatgggtccgccattaggtactcagacagagttaagaccggggtcactggagagcagatctggctacaaatcaacgagcccaccccgaatgacaaagggaagtatgtcatggagctctttgatggcaaaactggacatcagaagacagtggatctctctggacaagcatacgatgaggcctatgctgaattccagaggttgaaacaagctgccattgccgagaaaaatcgtgcccgggtgttgggaggtctcccagacgtggtcaccatccaggaggggaaggcccttaatctcacttgcaacgtgtggggagacccgcctccggaggtgtcgtggttgaagaacgagaaggccctggcctcagacgaccactgcaacctcaagttcgaggctgggaggaccgcgtacttcaccatcaacggcgtgagcaccgctgactcgggcaaatacgggctggttgtgaagaacaagtatggctcggagaccagcgacttcaccgtcagcgtgttcatcccagaggaggaggcgaggatggccgccttggagtccctgaaaggtggcaagaaggccaagtgaccggaggtgcgaggagagccagccggcctgtgtgacttgggtgtgaatggtttgggttaaggatgagacgtcttcatgctttctcctccctattattttctggcttgaggggaaaataatgtcaggtctttcactcatataaaaaagcaccaactaatgacactttaattgtttttctttatctacaaaattatgtgttaagaaaataccattcatagcatgaagattaggaaacagttttaaggagaagacttgaatgaagttggagggacattgaatgatggtcagagggcagacgaatgtgtcgtggggcgagttgggatttgctgcagctgtgaagccatggccgtgtctcgtgtgttgttacagaggtgatgtgcttttcgacgggcgcctcgtggcttggaacctcctctgtatgaataaacagttttcacgtc

SEQ ID NO: 414726 - DNA, 412 bp, Homo sapiens
cagccgcctatggtgcaccccgactggcatggctatgctgggtcttcatgctttctcctccctattattttctggcttgaggggaaaataatgtcaggtctttcactcatataaaaaagcaccaactaatgacactttaattgtttttctttatctacaaaattatgtgttaagaaaataccattcatagcatgaagattaggaaacagttttaaggagaagacttgaatgaagttggagggacattgaatgatggtcagagggcagacgaatgtgtcgtggggcgagttgggatttgctgcagctgtgaagccatggccgtgtctcgtgtgttgttacagaggtgatgtgcttttcgacgggcgcctcgtggcttggaacctcctctgtatgaataaacagttttcacgtc

SEQ ID NO: 414727 - DNA, 4219 bp, Homo sapiens
cggacagattccagtctgctgttagatgattattcatccaagttgagccccaaaccaaagagagccaagcacagcctactgtctggagaagagaaagaaaatttgcccagtgactacatggtacccattttctcaggacgtcaaaagcatgtcagtggaattactgatacggaagaagaaagaattaaggaagctgctgcttatatagcccagaggaatcttcttgctagtgaggaaggaatcacaacacctaaacagtccacggcatccaagcagaccacggcatctaagcagtccacggcatccaagcagtccacagcatccaagcagtccacggcatccaggcagtccacggcatccaggcagtctgtggtttccaaacaggccacatccgctcttcaacaggaagaaacttctgaaaagaagtcaaggaaagttgtgattcgaggaaaggcagaacgcctgtccctgaggaaaacattagaagaaaccgagacatatcatgccaagctgaatgaagaccatcttctccatgctcctgagtttatcattaaacctcgctcccacacggtttgggagaaggagaatgtaaaattgcattgctccatagcaggatggccagaacctcgtgtcacgtggtataaaaaccaggtgccaataaatgtccatgcaaaccctggaaagtatattattgagagtcgatatggaatgcacactctggagattaatgcatgtgattttgaagatacagctcagtaccgggcctcggcgatgaatgttaaaggagagctttcggcatatgcttcagttgtggtaaaaaggtataagggagagtttgatgagactcgcttccatgctggggcttccaccatgcccctcagctttggtgtgaccccatatggttatgcatcccggtttgagatccactttgatgacaaatttgatgtgtcttttgggagagagggagagacaatgagtctaggctgtcgtgttgtcatcactcctgaaattaaacatttccagccagagatccggtggtacagaaatggagtacctctttctccatcaaaatgggtgcaaacactttggagtggagagcgggcaacgctgacattttcccatctcaacaaagaagatgaaggcctctatacaatccgtgtacggatgggagaatattatgaacaatatagtgcttatgtctttgttcgagatgctgatgcagagattgaaggagccccagctgctcccttggatgtgaagtgcttggaggccaacaaagattatatcatcatctcctggaaacagccagctgtcgatggagggagtcctattctcggatattttattgataagtgtgaggtgggcacagatagctggtcgcagtgcaatgacacacctgtgaagtttgctcgttttcctgtcactggattgatcgaaggtcgttcctatatcttccgagttcgagctgtgaataaaatgggaataggtttcccatctcgagtttccgaggccgtggctgctctggatccggctgagaaagctagactaaagtcgcccctcagcaccctggactggacagtcattgttactgaagaggaaccttcagagggtattgtgcctggccccccgacagacctctctgtcactgaggccacccggagctatgtggtgctcagctggaagccccctggccagcgtggtcatgagggcattatgtactttgtggaaaagtgtgaggcaggaacagaaaactggcagcgagtgaacacggagctccctgtgaagtctccccgctttgctctgtttgacttggccgaggggaaatcctactgtttccgtgtccgctgttctaattctgcaggagttggtgagccctcagaggcaacggaggtgactgtggtaggggacaaacttgatatccccaaggctcctggcaaaatcatcccaagcagaaacacagacacctcagtggtagtttcgtgggaggagtccaaagatgccaaagagctggtcgggtactacatagaggcaaacgttgctggctctggcaagtgggagccctgtaacaacaaccccgtgaaaactcaccgattcacttgtcatggattagtgactggtcagagttatatattccgggtcagagcagtcaatgcagctggacttagtgaatattcccaggattcagaagctattgaagtcaaagctgctattgcaccaccatctccaccctgtgatatcacctgtcttgaaagttttcgtgactcaatggttcttggatggaagcaaccagataagactggaggggcagaaattactggctattatgtgaactatcgcgaggtcattgatggggtaccaggaaaatggagagaagccaatgtcaaggctgtcagagaggaggcatacaagattagcaacttgaaggaaaacatggtgtatcagttccaagtggcagccatgaacatggctgggctgggcgcgccctccgcagtaagcgaatgcttcaaatgtgaagagtggaccatcgccgtcccaggaccaccgcacagtctcaagtgtagtgaagtcaggaaagactcactggttctccagtggaagccgccagtccactccgggcggactccggtcactggttacttcgtggacttgaaggagaaggccaaagaagaccagtggcgagggctcaatgaggcggctattaaaaacgtatacctgaaggttcgaggcctcaaggagggcgtcagctacgtgttccgtgttcgagccataaaccaggcgggagttgggaagccatctgaccttgctggccctgttgtggcagagacccgtccaggaaggaaagaggttgttgtaaatgtggatgatgatggagtcatttcattgaacttcgagtgtgataagatgactccaaagtccgagttctcctggtccaaagattatgtatccactgaggactctccacgattggaagtcgaaagcaagggcaacaagacgaaaatgaccttcaaagaccttgggatggatgacttgggtatttactcttgcgatgtaacagacactgatggaatagcatcaagctacttaatagatgaggaagaattgaaacgtttacttgctctcagccatgaacacaagttcccaactgtcccagttaaatcagagttggcagttgaaattttggagaaaggccaggtccggttttggatgcaggctgagaaactgtctggcaatgccaaagtcaactacatatttaacgagaaggaaatttttgaaggcccgaaatataaaatgcatattgaccgaaacactggcatcatcgaaatgttcatggaaaagctacaggatgaggatgagggaacgtacactttccagcttcaagatggaaaagcaactaaccattctactgttgttctcgttggagatgttttcaaaaagctccagaaagaagctgaattccagcggcaagaatggatcaggaaacaaggtcctcactttgttgagtatttgagctgggaagtgactggtgaatgtaatgtactattgaaatgcaaggtggcaaatattaagaaggagactcatattgtgtggtacaaagatgagagggagatatcagtggatgaaaagcatgactttaaggatggtatatgtaccctgcttataacagagttttccaagaaagatgctgggatttatgaagttatcctgaaagatgaccgaggaaaagataagagcagactgaagcttgtggatgaagcctttaaggaactgatgatggaagtatgcaaaaaaatagctttgtctgctacagacctgaaaatccagagcacagccgagggcatccaactgtactcttttgtaacttactatgtggaggatttgaaagttaactggtcccacaatgggtccgccattaggtactcagacagagttaagaccggggtcactggagagcagatctggctacaaatcaacgagcccaccccgaatgacaaagggaagtatgtcatggagctctttgatggcaaaactggacatcagaagacagtggatctctctggacaaggtaaacagatattttgcagattcaaatttactctagatgaatgagccttttaaaaggaatgaagggagttgggcatggtggcttatgcctgtaatcccaacaccttgagaggccaaggcaggaggatgacttgaagtcaggagttcaagaccagcc

SEQ ID NO: 414728 - DNA, 255 bp, Homo sapiens
tcttcagtggccaaacatgaagaattaaaagcataattcttgactgaactggtgggtgggttgaactttaggagtacatgggcggtcattcctggcgcacatatcagtgtgacatgagccctggagcatgtcgtccctctcagccctgctcctttctgtctcctggggcccagtgactgaggccttacgctagaactgtgtatcatccaactctccatttataaaggaaacttcctgctgcaacaacaaaaaaaa

SEQ ID NO: 414729 - DNA, 526 bp, Homo sapiens
ggttgctttttgtctcaatctagataatccattcaataagaagtaaattaattatccttaaccaatggtgggctgagaacaaccctcaaaatagatattttttatgttaaatggggagaaatatctatactttatgttatactggataaaaatgtgttttaagtctaaaaaaaaccagacgagctaaactttgcctagtgtgtctacaaccattttttaggagacgcaggaataccagggcataataagatcagattggtgtaattttgtatgtttttgaaatccttcattaattgtagaaccttgatatgattagaaacaaactgtatttcaacaaacaggtttcagtatttgcacactgaaaaagtgttttgtattttaactataaatatttcacgtatctgtatagaccatctagaaatgtagaggtcttacagcattagaacgaaggaagtttacatgtgctctatctatttttctgagcctcttttaataaaggttgcaagaaggcataaaacaagagttt

SEQ ID NO: 414730 - DNA, 196 bp, Homo sapiens
gatccacccaccttggcctcccaaagtgctgagattacaggtgtgagccactgcacccagcctgtagtttctaagttttctatagtgaacacgcaatacttccttttgcaagcaggaaaagagtatttgcacgggcggccagccacctccatgcaatggaggctgataggtgcccagcaccttccccacgccgcca

SEQ ID NO: 414731 - DNA, 405 bp, Homo sapiens
caatttcaggtctcgagtcagagaacagactatttcctcttccccttaattaacctccatccatttgcttgattgtttgtggctccttctataagggatgggtggaggtgccttacagtgaaaagacaggtatacatacacacacactgtatatatatagattggaaattcaaaggcatgacattcctgggaaccaaaaagcctgtccaaagattagctccatagctagctcaagggctttcaaatgccagaaaagagaactagggcagccagaagacttggccccacaattcaagtattaacactgagcaattctgtgttataatttgcagcagttagaggaaatcccaaagtccacgtttttgctatttcagtaaatttttttggatctcactctgtcaccca

SEQ ID NO: 414732 - DNA, 114 bp, Homo sapiens
gtccatatgtgattaacgctgggatagccctggagatgcagaaaacagccttgttgggatgtttgatgcccttggcttcatcacccatctcacaatgaccagaaactcaatgac

SEQ ID NO: 414733 - DNA, 1090 bp, Homo sapiens
ggccctctgcggccgccgtagctccccggcagaaacccggaagtggaactctgagccattcagcgtttgggtgaagacggaggcgggttctacagagacgtaggctgtcagggagtgtttatttcgcgtccgcttctgtttctccgcgcccctgtgctgccccgactcacatactcgtccagaaccggcctcagcctctccgcgcagaagtttcccggagccatggccgagtactcctacgtgaagtctaccaagctcgtgctcaagggaaccaagacgaagagtaagaagaaaaagagcaaagataagaaaagaaaaagagaagaagatgaagaaacccagcttgatattgttggaatctggtggacagtaacaaactttggtgaaatttcaggaaccatagccattgaaatggataagggaacctatatacatgcactcgacaatggtctttttaccctgggagctccacacaaagaagttgatgagggccctagtcctccagagcagtttacggctgtcaaattatctgattccagaatcgccctgaagtctggctatggaaaatatcttggtataaattcagatggacttgttgttgggcgttcagatgcaattggaccaagagaacaatgggaaccagtctttcaaaatgggaaaatggctttgttggcctcaaatagctgctttattagatgcaatgaagcaggggacatagaagcaaaaagtaaaacagcaggagaagaagaaatgatcaagattagatcctgtgctgaaagagaaaccaagaaaaaagatgacattccagaagaagacaaaggaaatgtaaaacaatgtgaaatcaattatgtaaagaaatttcagagcttccaagaccacaaacttaaaataagtaaagaagacagtaaaattcttaaaaaggctcggaaagatggatttttgcatgagacgcttctggacaggagagccaaattgaaagccgacagatactgcaagtgactgggatttttgtttctgccttatctttctgtgtttttttctgaataaaatattcagaggaaatgcttttacagaaaaaaagaaaagtgaa

SEQ ID NO: 414734 - DNA, 837 bp, Homo sapiens
ggccctctgcggccgccgtagctccccggcagaaacccggaagtggaactctgagccattcagcgtttgggtgaagacggaggcgggttctacagagacgtaggctgtcagggagtgtttatttcgcgtccgcttctgtttctccgcgcccctgtgctgccccgactcacatactcgtccagaaccggcctcagcctctccgcgcagaagtttcccggagccatggccgagtactcctacgtgaagtctaccaagctcgtgctcaagggaaccaagacgaagagtaagaagaaaaagagcaaagataagaaaagaaaaagagaagaagatgaagaaacccagcttgatattgttggaatctggtggacagtaacaaactttggtgaaatttcaggaaccatagccattgaaatggataagggaacctatatacatgcactcgacaatggtctttttaccctgggagctccacacaaagaagttgatgagggccctagtcctccagagcagtttacggctgtcaaattatctgattccagaatcgccctgaagtctggctatggaaaatatcttggtataaattcagatggacttgttgttgggcgttcagatgcaattggaccaagagaacaatgggaaccagtctttcaaaatgggaaaatggctttgttggcctcaaatagctgctttattagatgcaatgaagcaggggacatagaagcaaaaagtaaaacagcaggagaagaagaaatgatcaagagctggtcaagattagacccttgcctgaaggagaacccggaggggcctttcccaagatagccaaggaaagtgtcgggc

SEQ ID NO: 414735 - DNA, 1116 bp, Homo sapiens
ttacatttaattttatttatttatattttattgtatcatgtttaaattatttttcatctggatatcatcacaaaagtgttattgaaggcaacaattgcaaatatatgtgcagtgctttgcacttatacaaagatacaaagatacttacacaaagattgcatttttcactgtttaaagcaattttcagatgaaatacaaagttttctgggtctctttggttagtcaagtacttggaagctctgaacagtgattatttaggactcttttcgtaccatttaattgcaggctctcctaatctctgtcagcccttcacctttatgaccttgccttatctaccagaacacagatccctcttactaaaggtagcattgtgctacaggccctagcagggaatgttttcaggtctgggacccctctaatcaaaactgtcacaaagatgtcattggcacaaacacgttatttgtcatcactttctgagcagccctggaactagactctggccacagagatcccttaggagacatgagtccttaccattgccaattacctgttctgtgggcgatcctaattgttgaatgcagatcaattaacttatgacatgtgatagtaaacatctatccaaacttaggaggatataagagctagtaaaagaggtgggttccaattaattaaaaacaagttgtgtaatgttaaaagttttaatactttggtaatagtctgtgcaacataaaatagctattaagctttcaatccgatcaaatgaacacttgtctactagggataatttgatcctagtgtattcacttggaggacaaaattaaattagttaatgatcgctttatttcctagcaggatctgatgtgtaaaatgtttctgaaataattttgtctgtagtgtttctgacacaatgctgtggaggaagcatgtgatagcacttactcatatagattatatatatgaagtaaaaacacatagccagaacctttttctgaatatagttgctcagttaattttttcttctgcataagaaatcatctcgaatgttcttatgtgatacgtaaagtggggaaggtggaagataaacatataacccattggattctcttttccaatatc

SEQ ID NO: 414736 - DNA, 308 bp, Homo sapiens
aatgcttttcttttcttgaggcttcagttttcctaatcatcctaccacctcccaaagctagtcactcagaaagaaatttcagagcttccaagaccacaaacttaaaataagtaaagaagacagtaaaattcttaaaaaggctcggaaagatggatttttgcatgagacgcttctggacaggagagccaaattgaaagccgacagatactgcaagtgactgggatttttgtttctgccttatctttctgtgtttttttctgaataaaatattcagaggaaatgcttttacagaaaaaaagaaaagtgaa

SEQ ID NO: 414737 - DNA, 874 bp, Homo sapiens
tgaagccactggccttgagaaccctctcgaggagtctggcctcatgaagatgccagaataaatggcagtaagaagaaaaagagcaaagataagaaaagaaaaagagaagaagatgaagaaacccagcttgatattgttggaatctggtggacagtaacaaactttggtgaaatttcaggaaccatagccattgaaatggataagggaacctatatacatgcactcgacaatggtctttttaccctgggagctccacacaaagaagttgatgagggccctagtcctccagagcagtttacggctgtcaaattatctgattccagaatcgccctgaagtctggctatggaaaatatcttggtataaattcagatggacttgttgttgggcgttcagatgcaattggaccaagagaacaatgggaaccagtctttcaaaatgggaaaatggctttgttggcctcaaatagctgctttattagatgcaatgaagcaggggacatagaagcaaaaagtaaaacagcaggagaagaagaaatgatcaagattagatcctgtgctgaaagagaaaccaagaaaaaagatgacattccagaagaagacaaaggaaatgtaaaacaatgtgaaatcaattatgtaaagaaatttcagagcttccaagaccacaaacttaaaataagtaaagaagacagtaaaattcttaaaaaggctcggaaagatggatttttgcatgagacgcttctggacaggagagccaaattgaaagccgacagatactgcaagtgactgggatttttgtttctgccttatctttctgtgtttttttctgaataaaatattcagaggaaatgcttttacagaaaaaaagaaaagtgaa

SEQ ID NO: 414738 - DNA, 1590 bp, Homo sapiens
ggccctctgcggccgccgtagctccccggcagaaacccggaagtggaactctgagccattcagcgtttgggtgaagacggaggcgggttctacagagacgtaggctgtcagggagtgtttatttcgcgtccgcttctgtttctccgcgcccctgtgctgccccgactcacatactcgtccagaaccggcctcagcctctccgcgcagaagtttcccggagccatggccgagtactcctacgtgaagtctaccaagctcgtgctcaagggaaccaagacgaagagtaagaagaaaaagagcaaagataagaaaagaaaaagagaagaagatgaagaaacccagcttgatattgttggaatctggtggacagtaacaaactttggtgaaatttcaggaaccatagccattgaaatggataagggaacctatatacatgcactcgacaatggtctttttaccctgggagctccacacaaagaagttgatgagggccctagtcctccagagcagtttacggctgtcaaattatctgattccagaatcgccctgaagtctggctatggaaaatatcttggtataaattcagatggacttgttgttgggcgttcagatgcaattggaccaagagaacaatgggaaccagtctttcaaaatgggaaaatggctttgttggcctcaaatagctgctttattagatgcaatgaagcaggggacatagaagcaaaaagtaaaacagcaggagaagaagaaatgatcaaggctctcctaatctctgtcagcccttcacctttatgaccttgccttatctaccagaacacagatccctcttactaaaggtagcattgtgctacaggccctagcagggaatgttttcaggtctgggacccctctaatcaaaactgtcacaaagatgtcattggcacaaacacgttatttgtcatcactttctgagcagccctggaactagactctggccacagagatcccttaggagacatgagtccttaccattgccaattacctgttctgtgggcgatcctaattgttgaatgcagatcaattaacttatgacatgtgatagtaaacatctatccaaacttaggaggatataagagctagtaaaagaggtgggttccaattaattaaaaacaagttgtgtaatgttaaaagttttaatactttggtaatagtctgtgcaacataaaatagctattaagctttcaatccgatcaaatgaacacttgtctactagggataatttgatcctagtgtattcacttggaggacaaaattaaattagttaatgatcgctttatttcctagcaggatctgatgtgtaaaatgtttctgaaataattttgtctgtagtgtttctgacacaatgctgtggaggaagcatgtgatagcacttactcatatagattatatatatgaagtaaaaacacatagccagaacctttttctgaatatagttgctcagttaattttttcttctgcataagaaatcatctcgaatgttcttatgtgatacgtaaagtggggaaggtggaagataaacatataacccattggattctcttttccaatatc

SEQ ID NO: 414739 - DNA, 677 bp, Homo sapiens
ggccctctgcggccgccgtagctccccggcagaaacccggaagtggaactctgagccattcagcgtttgggtgaagacggaggcgggttctacagagacgtaggctgtcagggagtgtttatttcgcgtccgcttctgtttctccgcgcccctgtgctgccccgactcacatactcgtccagaaccggcctcagcctctccgcgcagaagtttcccggagccatggccgagtactcctacgtgaagtctaccaagctcgtgctcaagggaaccaagacgaagagtaagaagaaaaagagcaaagataagaaaagaaaaagagaagaagatgaagaaacccagcttgatattgttggaatctggtggacagtaacaaactttggtgaaatttcaggaaccatagccattgaaatggataagggaacctatatacatgcactcgacaatggtctttttaccctgggagctccacacaaagaagttgatgagggccctagtcctccagagcagtttacggctgtcaaattatctgattccagaatcgccctgaagtctggctatggaaaatatcttggtataaattcagatggacttgttgttgggcgttcagatgcaattggaccaagagaacaatgggaaccagtctttcaaaatgtaagtgctgttattgtttataa

SEQ ID NO: 414740 - DNA, 1167 bp, Homo sapiens
ggccctctgcggccgccgtagctccccggcagaaacccggaagtggaactctgagccattcagcgtttgggtgaagacggaggcgggttctacagagacgtaggctgtcagggagtgtttatttcgcgtccgcttctgtttctccgcgcccctgtgctgccccgactcacatactcgtccagaaccggcctcagcctctccgcgcagaagtttcccggagccatggccgagtactcctacgtgaagtctaccaagctcgtgctcaagggaaccaagacgaagagtaagaagaaaaagagcaaagataagaaaagaaaaagagaagaagatgaagaaacccagcttgatattgttggaatctggtggacagtaacaaactttggtgaaatttcaggaaccatagccattgaaatggataagggaacctatatacatgcactcgacaatggtctttttaccctgggagctccacacaaagaagttgatgagggccctagtcctccagagcagtttacggctgtcaaattatctgattccagaatcgccctgaagtctggctatggaaaatatcttggtataaattcagatggacttgttgttgggcgttcagatgcaattggaccaagagaacaatgggaaccagtctttcaaaatgggaaaatggctttgttggcctcaaatagctgctttattagatgcaatgaagcaggggacatagaagcaaaaagtaaaacagcaggagaagaagaaatgatcaaggctctcctaatctctgtcagcccttcacctttatgaccttgccttatctaccagaacacagatccctcttactaaagattagatcctgtgctgaaagagaaaccaagaaaaaagatgacattccagaagaagacaaaggaaatgtaaaacaatgtgaaatcaattatgtaaagaaatttcagagcttccaagaccacaaacttaaaataagtaaagaagacagtaaaattcttaaaaaggctcggaaagatggatttttgcatgagacgcttctggacaggagagccaaattgaaagccgacagatactgcaagtgactgggatttttgtttctgccttatctttctgtgtttttttctgaataaaatattcagaggaaatgcttttacagaaaaaaagaaaagtgaa

SEQ ID NO: 414741 - DNA, 1146 bp, Homo sapiens
tctactgaaatggctttgatgtcatgcttcaaaatattttgaacactttaaatacatatattcacacaaatatatatacacccacacaatttatctgtatgtgtttatgactttcagattttcatattctcaatgcttctaactaaaatttggttcataaaaagtatcttatataaaacctatagtaaatattttaaaaatgtgcttttccatttttaataacatgtattttggtaaatacttgattcagagagccaatgaattagagttggcatatgagtttcacatagattcttatactaggtaagtatttaccaaaacatgtatcagaagcagaaagttgttaaaaaggtttaccagacaacaagactggaaagtgtattaagtgtgcctggccttgacatcttgttctggataatctagtctacatcttaatttaggaaagctaatctgtaaaactgttcaaatatttgaacaatatttgataatgcttacataatctttcaagataatatcaggaaacagagttctttcatgtatgtaagtagttaataggacataacatcagatgtctagatgaattatagctatggcttaattacacaataatctgccttcttagtagaaattgcttatttccagcatttgctgtaaaaaaaaaaaagacagtcagtttacaaaaatatacaatcctatggatttaatttatttaaattttgttcattctaattttttttggtgcgtgataatagcaagttatcttagttgaaaatagagattcattcattaaagaatattaaatcttttgtgcccaagtgccttaataaataagtagaatcttaacttttctgataagcattccagtaaaagctaatgtacatagatatgccttgagccactgtttctactttcacccttctctccacacatattgccacgtctgctgtgtagttacctgcttacatgtacagccatttcaataaatgtattcttttaacattttatcttttaaatttcaaataggaatttatagttggtaaaaataaaaattttaaagtgatttaatattgtcattttcatgttctcaatattgttatagatccactgagaaaatgtcaaataaaatctaatatttcaaaggtgaaa

SEQ ID NO: 414742 - DNA, 2571 bp, Homo sapiens
gcgccacacttgaagaggctgagggaggcggtgtcgccgccgcggcgctgtcatggagctagcgcaggaagcgcgggaactgggttgctgggcggtcgaagagatgggggtgcccgtggcggcccgggccccggaatcgacgctgcgcaggctgtgtctgggccagggggctgacatctgggcctacatcttgcagcatgtgcacagtcagaggactgtcaagaagatccggggaaacctactctggtatggccaccaggacagtccacaggtccgtcggaagttagagctggaagctgctgtgacccgcctgcgggcagaaatccaggaactcgaccagagcctggagctgatggagcgagacactgaggctcaggacacggccatggagcaggcacgtcagcacactcaagacacccagcgtcgagctctcctcctccgggcccaagctggggccatgcgaagacagcagcatacgctccgagatcccatgcagcggctgcagaatcaactgaggcgcctgcaggacatggagaggaaagccaaagtagatgtgacctttggatccctcacgtcggcagctctgggcctggagcccgtggtcctgcgtgatgtccgaacagcctgcaccctccgggcccagttcctgcagaacctcctgcttccccaggccaagaggggcagcctcccaacccctcatgatgaccactttggcacttcgtaccagcagtggctgagctcagtggagacgctgctgacaaaccaccccccaggccacgtcctggctgccttggagcacctggctgcagagcgggaggcagagattcggtccctgtgcagtggggatgggcttggcgacacagagatatccagaccccaggccccggaccagtcagactccagccagaccctgccgtccatggttcatctcatccaggagggctggcggactgtgggtgtgctggtctcccagcggagcaccctcctgaaggagcggcaagtcttgacccagcgcctccagggcctggtggaggaggtggagagacgcgtcctgggatccagtgagaggcaggtgctgatactggggcttcggcgctgttgcctgtggacggagctcaaggccctgcacgatcagagccaggagctgcaggatgcagctgggcatcggcagctcctgctgagggagctacaggccaaacagcagcggatcctgcactggcgccagctggtggaggagacccaggaacaggtccgcctgctcatcaagggaaactcggccagcaagacccgcctgtgccggagcccgggggaggtgctagctctggtccagcgaaaggtggtccctacatttgaggcagtggcaccacagagccgggagctgctgcgctgtctggaggaggaagtccggcatttgccccacattctgttgggcacgctgctgcggcacaggccgggagagttgaagcccctgcccacggtcctcccatccatccaccagctgcaccccgcgtccccaaggggctccagcttcatagcgctgagccacaagctggggctgcctccagggaaggcctcggagctgctcctgccggcggctgcctctcttcgccaggaccttctgctcctgcaggaccagcggagcctctggtgctgggatctactccacatgaagaccagcctgccgccaggccttcccacccaggagctgctgcagatccaggcatcccaggaaaaacagcagaaagagaacctggggcaggctctgaagaggctggagaagctactgaaacaggcactggagcgaatccctgagctgcaggggatcgtgggggactggtgggagcagccaggccaggccgccctctctgaggagctctgccagggcctgtccctgccccagtggcggctgcgctgggttcaggcccagggggccctgcagaagctgtgcagctgaagagagggttcaaacggaagccgagaacttgacactgttcaccccaacacctcacctcccccaggacatttggaagaaagcagcgccaggattcctcggcagtcgtccccacccgcacctgcagtcccctcatgtgctgttctgctgccccactcagctcctggaccctgtcctttcatcccgctaaagcaccccctaaaaccccttcatcactttcattctcagcaaaaagtaattgagcacctcctctaggcgctggggagtccacactgaacaaaagaaacagaaaaccctgtcttccagcagttgagttctagggcagggagacagagtttacaagataaggaaaatatatatgtagtatgctgcaagttaactgctgtgtgggaaatccagcagggggtgggatgtgtgatttgaattgagggccacactgcccaggtcgtgctccgtcaaggggtgagcaggagcaacaggggtggctgagtaagggcttgcagctggaggcaacagcacatgcaaaggccctgagccaggatgtgctgcaataagggccactgagggggacagtgtaggttgggggtgaggaatgtattaaaagatgagattgccttcta

SEQ ID NO: 414743 - DNA, 266 bp, Homo sapiens
gcactccagcctgagcaatagattaagactctctgttaaaaaaaaaaaaaagagcgtgcgcgcagtgggattacaggcatgagccaccgcgcctgaccacattgccatatctgaaatggctggattctcttaggtgcttttctttttctttctttctttctttttttgagacacgagaatcaccagaacccagaaagtggcagttgcagtgaactgagatcacgccattgcactccagcctgagcaatagattaagactctctgtt

SEQ ID NO: 414744 - DNA, 4643 bp, Homo sapiens
gcgccacacttgaagaggctgagggaggcggtgtcgccgccgcggcgctgtcatggagctagcgcaggaagcgcgggaactgggttgctgggcggtcgaagagatgggggtgcccgtggcggcccgggccccggaatcgacgctgcgcaggctgtgtctgggccagggggctgacatctgggcctacatcttgcagcatgtgcacagtcagaggactgtcaagaagatccggggaaacctactctggtaactgcttcttaaagctatcccctcctgtcttccccactcccatttagccctgtccccaccacagcatcacacctattgccctcccccctagaagccccactcatccgctgactctggcctcgttttcctaggtatggccaccaggacagtccacaggtccgtcggaagttagagctggaagctgctgtgacccgcctgcgggcagaaatccaggaactcgaccagagcctggagctgatggagcgagacactgaggctcaggacacggccatggagcaggcacgtcagcacactcaagacacccagcgtcgagctctcctcctccgggcccaagctggggccatgcgaagacagcagcatacgctccgagatcccatgcagcggctgcagaatcaactgaggcgcctgcaggacatggagaggaaagccaaagtagatgtgacctttggatccctcacgtcggcagctctgggcctggagcccgtggtcctgcgtgatgtccgaacagcctgcaccctccgggcccagttcctgcagaacctcctgcttccccaggccaagaggggcagcctcccaacccctcatgatgaccactttggcacttcgtaccagcagtggctgagctcagtggagacgctgctgacaaaccaccccccaggccacgtcctggctgccttggagcacctggctgcagagcgggaggcagagattcggtccctgtgcagtggggatgggcttggcgacacagagatatccagaccccaggccccggaccagtcagactccagccagaccctgccgtccatggttcatctcatccaggagggctggcggactgtgggtgtgctggtctcccagcggagcaccctcctgaaggagcggcaagtcttgacccagcgcctccagggcctggtggaggaggtggagagacgcgtcctgggatccagtgagaggcaggtgctgatactggggcttcggcgctgttgcctgtggacggagctcaaggccctgcacgatcagagccaggagctgcaggatgcagctgggcatcggcagctcctgctgagggagctacaggccaaacagcagcggatcctgcactggcgccagctggtggaggagacccaggaacaggtccgcctgctcatcaagggaaactcggccagcaagacccgcctgtgccggagcccgggggaggtgctagctctggtccagcgaaaggtggtccctacatttgaggcagtggcaccacagagccgggagctgctgcgctgtctggaggaggaagtccggcatttgccccacattctgttgggcacgctgctgcggcacaggccgggagagttgaagcccctgcccacggtcctcccatccatccaccagctgcaccccgcgtccccaaggggctccagcttcatagcgctgagccacaagctggggctgcctccagggaaggcctcggagctgctcctgccggcggctgcctctcttcgccaggaccttctgctcctgcaggaccagcggagcctctggtgctgggatctactccacatgaagaccagcctgccgccaggccttcccacccaggagctgctgcagatccaggcatcccaggaaaaacagcagaaagagaacctggggcaggctctgaagaggctggagaagctactgaaacaggcactggagcgaatccctgagctgcaggggatcgtgggggactggtgggagcagccaggccaggccgccctctctgaggagctctgccagggcctgtccctgccccagtggcggctgcgctgggttcaggcccagggggccctgcagaagctgtgcagctgaagagagggttcaaacggaagccgagaacttgacactgttcaccccaacacctcacctcccccaggacatttggaagaaagcagcgccaggattcctcggcagtcgtccccacccgcacctgcagtcccctcatgtgctgttctgctgccccactcagctcctggaccctgtcctttcatcccgctaaagcaccccctaaaaccccttcatcactttcattctcagcaaaaagtaattgagcacctcctctaggcgctggggagtccacactgaacaaaagaaacagaaaaccctgtcttccagcagttgagttctagggcagggagacagagtttacaagataaggaaaatatatatgtagtatgctgcaagttaactgctgtgtgggaaatccagcagggggtgggatgtgtgatttgaattgagggccacactgcccaggtcgtgctccgtcaaggggtgagcaggagcaacaggggtggctgagtaagggcttgcagctggaggcaacagcacatgcaaaggccctgagccaggatgtgctgcaataagggccactgagggggacagtgtaggttgggggtgaggaatgtattaaaagatgagattgccttctagtttgtatagtttctttttttacatgtaaatcagccatttggaatttatcctagcacatggatccaattttgtcttattttacatatatcctagtagcacttactgaaattcccagtcagagtggcagttgcctctgagggaaggtgggtggcagggatcaactgaggaggagacacagaaatgtcctagctgatgggaatgtgctgtgtcaagagcagcggcggtgacgcaggtgtagagatttgtcagagctcatgtagttgtagtcttaaggcctgtgcatttcactgcgtgggttactcaatttataaagcaaagcccttacacttttgagatgccacctttttatgcactaaatttccatgtttaattgggttatatctggcttctctccagacctgctttgtatttaactctccatgtgtcattcctacagtagcttaatagaaaggcttgtgacacattgtcatatctgttcttgttttcttttgttttttttttttttttttttgagatgcagtctcattctgttgcccaagttggagtgcagtggcatgatctcagctcactgcaacctccgcctcccaggttcaagccattctcatgcctcagcttccccagtagctaggattacaggtacgcaccaccacgcccagctcatttttgtacttttagtagggacggggtttcatcatgttggccagactggtctcgaactcctgacctcaagtgatctgcctgcctcggcctcccaaagtgctgggattacaggcatgagccaccgcgcctgaccacattgccatatctgaaatggctggattctcttaggtgcttttctttttctttctttctttctttttttgagacagaatctggctgtttcccaggctgaagtgcagtggcatgaactcagctcactgcaacctctgcctcctggattcaaacaattctcatgtctcagcctcctgaatagctgggattacaggcacccaccaccatatctggctaatatttgtattttttgtagagtcggagctttaccatgttggtcaggctgctctccaactcctggcctcaagtgattctatcgcctctgcctcccaaatcttcacctgctgggattagtttcccctgtctcagtaaattttttttcccaaactaagtgaacattagatttaatttggctggccccagaagaaaaacatgcacagatggtagttttactggtgttgcagtaagttttcaaatttggaagtttggcagctttatgatcttgaaccttgctgtccatctctcacacaactcctctcttggcctccagagtccctttactctcccagctttcctcctgcccctggctgctgtttcccagcctttccacattggctttcccatgtagtccttagtgtgtctgctcctcctctctctcctcatcacagttcccagcccccaccttcaactgaactcaacaaaatcttcaacttcatacagtagtcacattgttagtaataacactggcatttttattttgataaaatagaccgtttaaatttttgagattctaccttatattttttgaattatatactaaagcaaataagtagtgatgtaatgtcattggggaccaagatttttagtgtaaatgaaaaaagataacaaatataaactcaagtaaacaccctgtagtctttcacatgaattggaaatatcagaataaagtcatgatttttctctttctaaaaaatatgtatttccctagttaagtcccctgaaaaggtctaaatataatgacaccccagtaacactgagcagcactagtatacagactgtggtctctataagtgccatttctgactaagaactagggacttttgtgaaaacagctgattccaggtctggggcaagaaatgtgcaaaatgtgtccaggatattttgtg

SEQ ID NO: 414745 - DNA, 4633 bp, Homo sapiens
tgtggcatcaaagctggtgagaagagatgatgggacaggtatgggagagatgctgaggccagtgtgggacccaatgggtgcaaggggctcatatgacacctaaggggaggcttccaggaggccttgggacttctaggtgcagggctccgggaagagatcagtactgggacaaagatgtggttgtcaccagcacagacaggaaacaggctggaagtgtgggtaagacaatcctaggaggaaggagggagggagccaataccctaatgcttctgtgtcagacacagaaactgctgagcaaaaaccctctgccaccagttgaggagcctggtacccccaaaagacaggccaggctgagccccgatcagaccatctgaccctgaatctgatcctcccaggtccgtcggaagttagagctggaagctgctgtgacccgcctgcgggcagaaatccaggaactcgaccagagcctggagctgatggagcgagacactgaggctcaggacacggccatggagcaggcacgtcagcacactcaagacacccagcgtcgagctctcctcctccgggcccaagctggggccatgcgaagacagcagcatacgctccgagatcccatgcagcggctgcagaatcaactgaggcgcctgcaggacatggagaggaaagccaaagtagatgtgacctttggatccctcacgtcggcagctctgggcctggagcccgtggtcctgcgtgatgtccgaacagcctgcaccctccgggcccagttcctgcagaacctcctgcttccccaggccaagaggggcagcctcccaacccctcatgatgaccactttggcacttcgtaccagcagtggctgagctcagtggagacgctgctgacaaaccaccccccaggccacgtcctggctgccttggagcacctggctgcagagcgggaggcagagattcggtccctgtgcagtggggatgggcttggcgacacagagatatccagaccccaggccccggaccagtcagactccagccagaccctgccgtccatggttcatctcatccaggagggctggcggactgtgggtgtgctggtctcccagcggagcaccctcctgaaggagcggcaagtcttgacccagcgcctccagggcctggtggaggaggtggagagacgcgtcctgggatccagtgagaggcaggtgctgatactggggcttcggcgctgttgcctgtggacggagctcaaggccctgcacgatcagagccaggagctgcaggatgcagctgggcatcggcagctcctgctgagggagctacaggccaaacagcagcggatcctgcactggcgccagctggtggaggagacccaggaacaggtccgcctgctcatcaagggaaactcggccagcaagacccgcctgtgccggagcccgggggaggtgctagctctggtccagcgaaaggtggtccctacatttgaggcagtggcaccacagagccgggagctgctgcgctgtctggaggaggaagtccggcatttgccccacattctgttgggcacgctgctgcggcacaggccgggagagttgaagcccctgcccacggtcctcccatccatccaccagctgcaccccgcgtccccaaggggctccagcttcatagcgctgagccacaagctggggctgcctccagggaaggcctcggagctgctcctgccggcggctgcctctcttcgccaggaccttctgctcctgcaggaccagcggagcctctggtgctgggatctactccacatgaagaccagcctgccgccaggccttcccacccaggagctgctgcagatccaggcatcccaggaaaaacagcagaaagagaacctggggcaggctctgaagaggctggagaagctactgaaacaggcactggagcgaatccctgagctgcaggggatcgtgggggactggtgggagcagccaggccaggccgccctctctgaggagctctgccagggcctgtccctgccccagtggcggctgcgctgggttcaggcccagggggccctgcagaagctgtgcagctgaagagagggttcaaacggaagccgagaacttgacactgttcaccccaacacctcacctcccccaggacatttggaagaaagcagcgccaggattcctcggcagtcgtccccacccgcacctgcagtcccctcatgtgctgttctgctgccccactcagctcctggaccctgtcctttcatcccgctaaagcaccccctaaaaccccttcatcactttcattctcagcaaaaagtaattgagcacctcctctaggcgctggggagtccacactgaacaaaagaaacagaaaaccctgtcttccagcagttgagttctagggcagggagacagagtttacaagataaggaaaatatatatgtagtatgctgcaagttaactgctgtgtgggaaatccagcagggggtgggatgtgtgatttgaattgagggccacactgcccaggtcgtgctccgtcaaggggtgagcaggagcaacaggggtggctgagtaagggcttgcagctggaggcaacagcacatgcaaaggccctgagccaggatgtgctgcaataagggccactgagggggacagtgtaggttgggggtgaggaatgtattaaaagatgagattgccttctagtttgtatagtttctttttttacatgtaaatcagccatttggaatttatcctagcacatggatccaattttgtcttattttacatatatcctagtagcacttactgaaattcccagtcagagtggcagttgcctctgagggaaggtgggtggcagggatcaactgaggaggagacacagaaatgtcctagctgatgggaatgtgctgtgtcaagagcagcggcggtgacgcaggtgtagagatttgtcagagctcatgtagttgtagtcttaaggcctgtgcatttcactgcgtgggttactcaatttataaagcaaagcccttacacttttgagatgccacctttttatgcactaaatttccatgtttaattgggttatatctggcttctctccagacctgctttgtatttaactctccatgtgtcattcctacagtagcttaatagaaaggcttgtgacacattgtcatatctgttcttgttttcttttgttttttttttttttttttttgagatgcagtctcattctgttgcccaagttggagtgcagtggcatgatctcagctcactgcaacctccgcctcccaggttcaagccattctcatgcctcagcttccccagtagctaggattacaggtacgcaccaccacgcccagctcatttttgtacttttagtagggacggggtttcatcatgttggccagactggtctcgaactcctgacctcaagtgatctgcctgcctcggcctcccaaagtgctgggattacaggcatgagccaccgcgcctgaccacattgccatatctgaaatggctggattctcttaggtgcttttctttttctttctttctttctttttttgagacagaatctggctgtttcccaggctgaagtgcagtggcatgaactcagctcactgcaacctctgcctcctggattcaaacaattctcatgtctcagcctcctgaatagctgggattacaggcacccaccaccatatctggctaatatttgtattttttgtagagtcggagctttaccatgttggtcaggctgctctccaactcctggcctcaagtgattctatcgcctctgcctcccaaatcttcacctgctgggattagtttcccctgtctcagtaaattttttttcccaaactaagtgaacattagatttaatttggctggccccagaagaaaaacatgcacagatggtagttttactggtgttgcagtaagttttcaaatttggaagtttggcagctttatgatcttgaaccttgctgtccatctctcacacaactcctctcttggcctccagagtccctttactctcccagctttcctcctgcccctggctgctgtttcccagcctttccacattggctttcccatgtagtccttagtgtgtctgctcctcctctctctcctcatcacagttcccagcccccaccttcaactgaactcaacaaaatcttcaacttcatacagtagtcacattgttagtaataacactggcatttttattttgataaaatagaccgtttaaatttttgagattctaccttatattttttgaattatatactaaagcaaataagtagtgatgtaatgtcattggggaccaagatttttagtgtaaatgaaaaaagataacaaatataaactcaagtaaacaccctgtagtctttcacatgaattggaaatatcagaataaagtcatgatttttctctttctaaaaaatatgtatttccctagttaagtcccctgaaaaggtctaaatataatgacaccccagtaacactgagcagcactagtatacagactgtggtctctataagtgccatttctgactaagaactagggacttttgtgaaaacagctgattccaggtctggggcaagaaatgtgcaaaatgtgtccaggatattttgtg

SEQ ID NO: 414746 - DNA, 3041 bp, Homo sapiens
gcgccacacttgaagaggctgagggaggcggtgtcgccgccgcggcgctgtcatggagctagcgcaggaagcgcgggaactgggttgctgggcggtcgaagagatgggggtgcccgtggcggcccgggccccggaatcgacgctgcgcaggctgtgtctgggccagggggctgacatctgggcctacatcttgcagcatgtgcacagtcagaggactgtcaagaagatccggggaaacctactctggtatggccaccaggacagtccacaggtccgtcggaagttagagctggaagctgctgtgacccgcctgcgggcagaaatccaggaactcgaccagagcctggagctgatggagcgagacactgaggctcaggacacggccatggagcaggcacgtcagcacactcaagacacccagcgtcgagctctcctcctccgggcccaagctggggccatgcgaagacagcagcatacgctccgagatcccatgcagcggctgcagaatcaactgaggcgcctgcaggacatggagaggaaagccaaagtagatgtgacctttggatccctcacgtcggcagctctgggcctggagcccgtggtcctgcgtgatgtccgaacagcctgcaccctccgggcccagttcctgcagaacctcctgcttccccaggccaagaggggcagcctcccaacccctcatgatgaccactttggcacttcgtaccagcagtggctgagctcagtggagacgctgctgacaaaccaccccccaggccacgtcctggctgccttggagcacctggctgcagagcgggaggcagagattcggtccctgtgcagtggggatgggcttggcgacacagagatatccagaccccaggccccggaccagtcagactccagccagaccctgccgtccatggttcatctcatccaggagggctggcggactgtgggtgtgctggtctcccagcggagcaccctcctgaaggagcggcaagtcttgacccagcgcctccagggcctggtggaggaggtggagagacgcgtcctgggatccagtgagaggcaggtgctgatactggggcttcggcgctgttgcctgtggacggagctcaaggccctgcacgatcagagccaggagctgcaggatgcagctgggcatcggcagctcctgctgagggagctacaggccaaacagcagcggatcctgcactggcgccagctggtggaggagacccaggaacaggtccgcctgctcatcaagggaaactcggccagcaagacccgcctgtgccggagcccgggggaggtgctagctctggtccagcgaaaggtggtccctacatttgaggcagtggcaccacagagccgggagctgctgcgctgtctggaggaggaagtccggcatttgccccacattctgttgggcacgctgctgcggcacaggccgggagagttgaagcccctgcccacggtcctcccatccatccaccagctgcaccccgcgtccccaaggggctccagcttcatagcgctgagccacaagctggggctgcctccagggaaggcctcggagctgctcctgccggcggctgcctctcttcgccaggaccttctgctcctgcaggaccagcggagcctctggtgctgggatctactccacatgaagaccagcctgccgccaggccttcccacccaggagctgctgcagatccaggcatcccaggaaaaacagcagaaagagaacctggggcaggctctgaagaggctggagaagctactgaaacaggcactggagcgaatccctgagctgcaggggatcgtgggggactggtgggagcagccaggccaggccgccctctctgaggagctctgccagggcctgtccctgccccagtggcggctgcgctgggttcaggcccagggggccctgcagaagctgtgcagctgaagagagggttcaaacggaagccgagaacttgacactgttcaccccaacacctcacctcccccaggacatttggaagaaagcagcgccaggattcctcggcagtcgtccccacccgcacctgcagtcccctcatgtgctgttctgctgccccactcagctcctggaccctgtcctttcatcccgctaaagcaccccctaaaaccccttcatcactttcattctcagcaaaaagtaattgagcacctcctctaggcgctggggagtccacactgaacaaaagaaacagaaaaccctgtcttccagcagttgagttctagggcagggagacagagtttacaagataaggaaaatatatatgtagtatgctgcaagttaactgctgtgtgggaaatccagcagggggtgggatgtgtgatttgaattgagggccacactgcccaggtcgtgctccgtcaaggggtgagcaggagcaacaggggtggctgagtaagggcttgcagctggaggcaacagcacatgcaaaggccctgagccaggatgtgctgcaataagggccactgagggggacagtgtaggttgggggtgaggaatgtattaaaagatgagattgccttctaaaaaaaaaaaaaaaaaaaaaaaaaaaaaaaaaaaaaaaaaaaaaaaaaaaaaaaaaaaaaaaaaaaaaaaaaaaaaaaaaaaaagaaaaaaaaagagaaaaggagaggggggagggaagaaaagaaagacaggagagaggggacagcaacagagccgacgactgacggaatgttcttggaaaacggaggagccagccagaaaggaaggggaacagcatattcagagagaggaaaaccggcgagagcccgcgaacaaaccacagcaggcgaggagaagacgaggaacacggcaagcgcaagaaggagagctgccacgcgttcgagggagagaagcagacaaaccaaaaagcgagtgggcgaggccgaacaaaaaggagaaggacaaaacaacccacgacagagagaagcaaagaggacggacggacgagcgggagacagcgaacaaacagagcgcgaggggaagcggcgag

SEQ ID NO: 414747 - DNA, 3190 bp, Homo sapiens
cccagagcctccagaacccaaggcctcctctcagtccccacccaacccagacttctccccgcccgtaggttgaagcccctgcccacggtcctcccatccatccaccagctgcaccccgcgtccccaaggggctccagcttcatagcgctgagccacaagctggggctgcctccagggaaggtgagtgcccgtctcctgtgacttgtctccccagccccgccccaggtgaccgtccttccctcctcctccaggcctcggagctgctcctgccggcggctgcctctcttcgccaggaccttctgctcctgcaggaccagcggagcctctggtgctgggatctactccacatgaagaccagcctgccgccaggccttcccacccaggagctgctgcagatccaggcatcccaggaaaaacagcagaaagagaacctggggcaggctctgaagaggctggagaagctactgaaacaggcactggagcgaatccctgagctgcaggggatcgtgggggactggtgggagcagccaggccaggccgccctctctgaggagctctgccagggcctgtccctgccccagtggcggctgcgctgggttcaggcccagggggccctgcagaagctgtgcagctgaagagagggttcaaacggaagccgagaacttgacactgttcaccccaacacctcacctcccccaggacatttggaagaaagcagcgccaggattcctcggcagtcgtccccacccgcacctgcagtcccctcatgtgctgttctgctgccccactcagctcctggaccctgtcctttcatcccgctaaagcaccccctaaaaccccttcatcactttcattctcagcaaaaagtaattgagcacctcctctaggcgctggggagtccacactgaacaaaagaaacagaaaaccctgtcttccagcagttgagttctagggcagggagacagagtttacaagataaggaaaatatatatgtagtatgctgcaagttaactgctgtgtgggaaatccagcagggggtgggatgtgtgatttgaattgagggccacactgcccaggtcgtgctccgtcaaggggtgagcaggagcaacaggggtggctgagtaagggcttgcagctggaggcaacagcacatgcaaaggccctgagccaggatgtgctgcaataagggccactgagggggacagtgtaggttgggggtgaggaatgtattaaaagatgagattgccttctagtttgtatagtttctttttttacatgtaaatcagccatttggaatttatcctagcacatggatccaattttgtcttattttacatatatcctagtagcacttactgaaattcccagtcagagtggcagttgcctctgagggaaggtgggtggcagggatcaactgaggaggagacacagaaatgtcctagctgatgggaatgtgctgtgtcaagagcagcggcggtgacgcaggtgtagagatttgtcagagctcatgtagttgtagtcttaaggcctgtgcatttcactgcgtgggttactcaatttataaagcaaagcccttacacttttgagatgccacctttttatgcactaaatttccatgtttaattgggttatatctggcttctctccagacctgctttgtatttaactctccatgtgtcattcctacagtagcttaatagaaaggcttgtgacacattgtcatatctgttcttgttttcttttgttttttttttttttttttttgagatgcagtctcattctgttgcccaagttggagtgcagtggcatgatctcagctcactgcaacctccgcctcccaggttcaagccattctcatgcctcagcttccccagtagctaggattacaggtacgcaccaccacgcccagctcatttttgtacttttagtagggacggggtttcatcatgttggccagactggtctcgaactcctgacctcaagtgatctgcctgcctcggcctcccaaagtgctgggattacaggcatgagccaccgcgcctgaccacattgccatatctgaaatggctggattctcttaggtgcttttctttttctttctttctttctttttttgagacagaatctggctgtttcccaggctgaagtgcagtggcatgaactcagctcactgcaacctctgcctcctggattcaaacaattctcatgtctcagcctcctgaatagctgggattacaggcacccaccaccatatctggctaatatttgtattttttgtagagtcggagctttaccatgttggtcaggctgctctccaactcctggcctcaagtgattctatcgcctctgcctcccaaatcttcacctgctgggattagtttcccctgtctcagtaaattttttttcccaaactaagtgaacattagatttaatttggctggccccagaagaaaaacatgcacagatggtagttttactggtgttgcagtaagttttcaaatttggaagtttggcagctttatgatcttgaaccttgctgtccatctctcacacaactcctctcttggcctccagagtccctttactctcccagctttcctcctgcccctggctgctgtttcccagcctttccacattggctttcccatgtagtccttagtgtgtctgctcctcctctctctcctcatcacagttcccagcccccaccttcaactgaactcaacaaaatcttcaacttcatacagtagtcacattgttagtaataacactggcatttttattttgataaaatagaccgtttaaatttttgagattctaccttatattttttgaattatatactaaagcaaataagtagtgatgtaatgtcattggggaccaagatttttagtgtaaatgaaaaaagataacaaatataaactcaagtaaacaccctgtagtctttcacatgaattggaaatatcagaataaagtcatgatttttctctttctaaaaaatatgtatttccctagttaagtcccctgaaaaggtctaaatataatgacaccccagtaacactgagcagcactagtatacagactgtggtctctataagtgccatttctgactaagaactagggacttttgtgaaaacagctgattccaggtctggggcaagaaatgtgcaaaatgtgtccaggatattttgtg

SEQ ID NO: 414748 - DNA, 707 bp, Homo sapiens
gcgccacacttgaagaggctgagggaggcggtgtcgccgccgcggcgctgtcatggagctagcgcaggaagcgcgggaactgggttgctgggcggtcgaagagatgggggtgcccgtggcggcccgggccccggaatcgacgctgcgcaggctgtgtctgggccagggggctgacatctgggcctacatcttgcagcatgtgcacagtcagaggactgtcaagaagatccggggaaacctactctggtaactgcttcttaaagctatcccctcctgtcttccccactcccatttagccctgtccccaccacagcatcacacctattgccctcccccctagaagccccactcatccgctgactctggcctcgttttcctaggtatggccaccaggacagtccacaggtgagaagcatatgctacaagattctctttcatccgaaaaatgacttgtagatcttctgctctaagcccaaccaggtgctgggtgatgctggggacaatgggtcacaagacagccttgatctccatcctcatagggcttaaagtccagtggaaacagcattagctcagccaggtgcagtggctcacacctgtaatcccagcactttgggaggctcacctgaggcctcatctcaggtgatgagatcacctgagggctccaggaagcgatcagtactgggacaaagatgtggtttgggaggcgg

SEQ ID NO: 414749 - DNA, 431 bp, Homo sapiens
tttagaggataattgacgtgtcttgtaacgttctctgtccgcttacccaaccccacagaacccctcatgatgaccactttggcacttcgtaccagcagtggctgagctcagtggaggtgagagggcagggctctcaggaaagccacaccctcccgctccttgatcaaaacttagggtgccaggacctaactcttgatgacagccctattcccatggggtctcagctcacagccctgccccgatcctgccctgacttcaccctccctccccctagacgctgctgacaaaccaccccccaggccacgtcctggctgccttggagcacctggctgcagagcgggaggcagagattcggtccctgtgcagtggggatgggcttggcgacacagagatatccaggtgtggggcagggtattctcacagttggggaa

SEQ ID NO: 414750 - DNA, 4509 bp, Homo sapiens
gcgccacacttgaagaggctgagggaggcggtgtcgccgccgcggcgctgtcatggagctagcgcaggaagcgcgggaactgggttgctgggcggtcgaagagatgggggtgcccgtggcggcccgggccccggaatcgacgctgcgcaggctgtgtctgggccagggggctgacatctgggcctacatcttgcagcatgtgcacagtcagaggactgtcaagaagatccggggaaacctactctggtatggccaccaggacagtccacaggtccgtcggaagttagagctggaagctgctgtgacccgcctgcgggcagaaatccaggaactcgaccagagcctggagctgatggagcgagacactgaggctcaggacacggccatggagcaggcacgtcagcacactcaagacacccagcgtcgagctctcctcctccgggcccaagctggggccatgcgaagacagcagcatacgctccgagatcccatgcagcggctgcagaatcaactgaggcgcctgcaggacatggagaggaaagccaaagtagatgtgacctttggatccctcacgtcggcagctctgggcctggagcccgtggtcctgcgtgatgtccgaacagcctgcaccctccgggcccagttcctgcagaacctcctgcttccccaggccaagaggggcagcctcccaacccctcatgatgaccactttggcacttcgtaccagcagtggctgagctcagtggagacgctgctgacaaaccaccccccaggccacgtcctggctgccttggagcacctggctgcagagcgggaggcagagattcggtccctgtgcagtggggatgggcttggcgacacagagatatccagaccccaggccccggaccagtcagactccagccagaccctgccgtccatggttcatctcatccaggagggctggcggactgtgggtgtgctggtctcccagcggagcaccctcctgaaggagcggcaagtcttgacccagcgcctccagggcctggtggaggaggtggagagacgcgtcctgggatccagtgagaggcaggtgctgatactggggcttcggcgctgttgcctgtggacggagctcaaggccctgcacgatcagagccaggagctgcaggatgcagctgggcatcggcagctcctgctgagggagctacaggccaaacagcagcggatcctgcactggcgccagctggtggaggagacccaggaacaggtccgcctgctcatcaagggaaactcggccagcaagacccgcctgtgccggagcccgggggaggtgctagctctggtccagcgaaaggtggtccctacatttgaggcagtggcaccacagagccgggagctgctgcgctgtctggaggaggaagtccggcatttgccccacattctgttgggcacgctgctgcggcacaggccgggagagttgaagcccctgcccacggtcctcccatccatccaccagctgcaccccgcgtccccaaggggctccagcttcatagcgctgagccacaagctggggctgcctccagggaaggcctcggagctgctcctgccggcggctgcctctcttcgccaggaccttctgctcctgcaggaccagcggagcctctggtgctgggatctactccacatgaagaccagcctgccgccaggccttcccacccaggagctgctgcagatccaggcatcccaggaaaaacagcagaaagagaacctggggcaggctctgaagaggctggagaagctactgaaacaggcactggagcgaatccctgagctgcaggggatcgtgggggactggtgggagcagccaggccaggccgccctctctgaggagctctgccagggcctgtccctgccccagtggcggctgcgctgggttcaggcccagggggccctgcagaagctgtgcagctgaagagagggttcaaacggaagccgagaacttgacactgttcaccccaacacctcacctcccccaggacatttggaagaaagcagcgccaggattcctcggcagtcgtccccacccgcacctgcagtcccctcatgtgctgttctgctgccccactcagctcctggaccctgtcctttcatcccgctaaagcaccccctaaaaccccttcatcactttcattctcagcaaaaagtaattgagcacctcctctaggcgctggggagtccacactgaacaaaagaaacagaaaaccctgtcttccagcagttgagttctagggcagggagacagagtttacaagataaggaaaatatatatgtagtatgctgcaagttaactgctgtgtgggaaatccagcagggggtgggatgtgtgatttgaattgagggccacactgcccaggtcgtgctccgtcaaggggtgagcaggagcaacaggggtggctgagtaagggcttgcagctggaggcaacagcacatgcaaaggccctgagccaggatgtgctgcaataagggccactgagggggacagtgtaggttgggggtgaggaatgtattaaaagatgagattgccttctagtttgtatagtttctttttttacatgtaaatcagccatttggaatttatcctagcacatggatccaattttgtcttattttacatatatcctagtagcacttactgaaattcccagtcagagtggcagttgcctctgagggaaggtgggtggcagggatcaactgaggaggagacacagaaatgtcctagctgatgggaatgtgctgtgtcaagagcagcggcggtgacgcaggtgtagagatttgtcagagctcatgtagttgtagtcttaaggcctgtgcatttcactgcgtgggttactcaatttataaagcaaagcccttacacttttgagatgccacctttttatgcactaaatttccatgtttaattgggttatatctggcttctctccagacctgctttgtatttaactctccatgtgtcattcctacagtagcttaatagaaaggcttgtgacacattgtcatatctgttcttgttttcttttgttttttttttttttttttttgagatgcagtctcattctgttgcccaagttggagtgcagtggcatgatctcagctcactgcaacctccgcctcccaggttcaagccattctcatgcctcagcttccccagtagctaggattacaggtacgcaccaccacgcccagctcatttttgtacttttagtagggacggggtttcatcatgttggccagactggtctcgaactcctgacctcaagtgatctgcctgcctcggcctcccaaagtgctgggattacaggcatgagccaccgcgcctgaccacattgccatatctgaaatggctggattctcttaggtgcttttctttttctttctttctttctttttttgagacagaatctggctgtttcccaggctgaagtgcagtggcatgaactcagctcactgcaacctctgcctcctggattcaaacaattctcatgtctcagcctcctgaatagctgggattacaggcacccaccaccatatctggctaatatttgtattttttgtagagtcggagctttaccatgttggtcaggctgctctccaactcctggcctcaagtgattctatcgcctctgcctcccaaatcttcacctgctgggattagtttcccctgtctcagtaaattttttttcccaaactaagtgaacattagatttaatttggctggccccagaagaaaaacatgcacagatggtagttttactggtgttgcagtaagttttcaaatttggaagtttggcagctttatgatcttgaaccttgctgtccatctctcacacaactcctctcttggcctccagagtccctttactctcccagctttcctcctgcccctggctgctgtttcccagcctttccacattggctttcccatgtagtccttagtgtgtctgctcctcctctctctcctcatcacagttcccagcccccaccttcaactgaactcaacaaaatcttcaacttcatacagtagtcacattgttagtaataacactggcatttttattttgataaaatagaccgtttaaatttttgagattctaccttatattttttgaattatatactaaagcaaataagtagtgatgtaatgtcattggggaccaagatttttagtgtaaatgaaaaaagataacaaatataaactcaagtaaacaccctgtagtctttcacatgaattggaaatatcagaataaagtcatgatttttctctttctaaaaaatatgtatttccctagttaagtcccctgaaaaggtctaaatataatgacaccccagtaacactgagcagcactagtatacagactgtggtctctataagtgccatttctgactaagaactagggacttttgtgaaaacagctgattccaggtctggggcaagaaatgtgcaaaatgtgtccaggatattttgtg

SEQ ID NO: 414751 - DNA, 728 bp, Homo sapiens
ctgggctagagcaggggagggggcacaggtgaggcccatagtaactcctctttctgcctctgcactgtaggactgtcaagaagatccggggaaacctactctggtatggccaccaggacagtccacaggtccgtcggaagttagagctggaagctgctgtgacccgcctgcgggcagaaatccaggaactcgaccagagcctggagctgatggagcgagacactgaggctcaggacacggccatggagcaggcacgtcagcacactcaagacacccagcgtcgagctctcctcctccgggcccaagctggggccatgcgaagacagcagcatacgctccgagatcccatgcagcggctgcagaatcaactgaggcgcctgcaggacatggagaggaaagccaaagtagatgtgacctttggatccctcacgtcggcagctctgggcctggagcccgtggtcctggtaagagtcctggtcatgggagaaggggcagggagcctggagtcaggcagatgctagggtccccctcaggtcccttcctcctcttctccctagcgtgatgtccgaacagcctgcaccctccgggcccagttcctgcagaacctcctgcttccccaggccaagaggggcagcctcccaaaccgtcatgatgaccacttttggcacttcagtacacagcagtggcctgagcttcagtggagacggctgctgacgaaacaacacccg

SEQ ID NO: 414752 - DNA, 4681 bp, Homo sapiens
gcgccacacttgaagaggctgagggaggcggtgtcgccgccgcggcgctgtcatggagctagcgcaggaagcgcgggaactgggttgctgggcggtcgaagagatgggggtgcccgtggcggcccgggccccggaatcgacgctgcgcaggctgtgtctgggccagggggctgacatctgggcctacatcttgcagcatgtgcacagtcagaggactgtcaagaagatccggggaaacctactctggtatggccaccaggacagtccacaggtgagaagcatatgctacaagattctctttcatccgaaaaatgacttgtagatcttctgctctaagcccaaccaggtgctgggtgatgctggggacaatgggtcacaagacagccttgatctccatcctcatagggcttaaagtccagtggaaacagcattagctcagccaggtccgtcggaagttagagctggaagctgctgtgacccgcctgcgggcagaaatccaggaactcgaccagagcctggagctgatggagcgagacactgaggctcaggacacggccatggagcaggcacgtcagcacactcaagacacccagcgtcgagctctcctcctccgggcccaagctggggccatgcgaagacagcagcatacgctccgagatcccatgcagcggctgcagaatcaactgaggcgcctgcaggacatggagaggaaagccaaagtagatgtgacctttggatccctcacgtcggcagctctgggcctggagcccgtggtcctgcgtgatgtccgaacagcctgcaccctccgggcccagttcctgcagaacctcctgcttccccaggccaagaggggcagcctcccaacccctcatgatgaccactttggcacttcgtaccagcagtggctgagctcagtggagacgctgctgacaaaccaccccccaggccacgtcctggctgccttggagcacctggctgcagagcgggaggcagagattcggtccctgtgcagtggggatgggcttggcgacacagagatatccagaccccaggccccggaccagtcagactccagccagaccctgccgtccatggttcatctcatccaggagggctggcggactgtgggtgtgctggtctcccagcggagcaccctcctgaaggagcggcaagtcttgacccagcgcctccagggcctggtggaggaggtggagagacgcgtcctgggatccagtgagaggcaggtgctgatactggggcttcggcgctgttgcctgtggacggagctcaaggccctgcacgatcagagccaggagctgcaggatgcagctgggcatcggcagctcctgctgagggagctacaggccaaacagcagcggatcctgcactggcgccagctggtggaggagacccaggaacaggtccgcctgctcatcaagggaaactcggccagcaagacccgcctgtgccggagcccgggggaggtgctagctctggtccagcgaaaggtggtccctacatttgaggcagtggcaccacagagccgggagctgctgcgctgtctggaggaggaagtccggcatttgccccacattctgttgggcacgctgctgcggcacaggccgggagagttgaagcccctgcccacggtcctcccatccatccaccagctgcaccccgcgtccccaaggggctccagcttcatagcgctgagccacaagctggggctgcctccagggaaggcctcggagctgctcctgccggcggctgcctctcttcgccaggaccttctgctcctgcaggaccagcggagcctctggtgctgggatctactccacatgaagaccagcctgccgccaggccttcccacccaggagctgctgcagatccaggcatcccaggaaaaacagcagaaagagaacctggggcaggctctgaagaggctggagaagctactgaaacaggcactggagcgaatccctgagctgcaggggatcgtgggggactggtgggagcagccaggccaggccgccctctctgaggagctctgccagggcctgtccctgccccagtggcggctgcgctgggttcaggcccagggggccctgcagaagctgtgcagctgaagagagggttcaaacggaagccgagaacttgacactgttcaccccaacacctcacctcccccaggacatttggaagaaagcagcgccaggattcctcggcagtcgtccccacccgcacctgcagtcccctcatgtgctgttctgctgccccactcagctcctggaccctgtcctttcatcccgctaaagcaccccctaaaaccccttcatcactttcattctcagcaaaaagtaattgagcacctcctctaggcgctggggagtccacactgaacaaaagaaacagaaaaccctgtcttccagcagttgagttctagggcagggagacagagtttacaagataaggaaaatatatatgtagtatgctgcaagttaactgctgtgtgggaaatccagcagggggtgggatgtgtgatttgaattgagggccacactgcccaggtcgtgctccgtcaaggggtgagcaggagcaacaggggtggctgagtaagggcttgcagctggaggcaacagcacatgcaaaggccctgagccaggatgtgctgcaataagggccactgagggggacagtgtaggttgggggtgaggaatgtattaaaagatgagattgccttctagtttgtatagtttctttttttacatgtaaatcagccatttggaatttatcctagcacatggatccaattttgtcttattttacatatatcctagtagcacttactgaaattcccagtcagagtggcagttgcctctgagggaaggtgggtggcagggatcaactgaggaggagacacagaaatgtcctagctgatgggaatgtgctgtgtcaagagcagcggcggtgacgcaggtgtagagatttgtcagagctcatgtagttgtagtcttaaggcctgtgcatttcactgcgtgggttactcaatttataaagcaaagcccttacacttttgagatgccacctttttatgcactaaatttccatgtttaattgggttatatctggcttctctccagacctgctttgtatttaactctccatgtgtcattcctacagtagcttaatagaaaggcttgtgacacattgtcatatctgttcttgttttcttttgttttttttttttttttttttgagatgcagtctcattctgttgcccaagttggagtgcagtggcatgatctcagctcactgcaacctccgcctcccaggttcaagccattctcatgcctcagcttccccagtagctaggattacaggtacgcaccaccacgcccagctcatttttgtacttttagtagggacggggtttcatcatgttggccagactggtctcgaactcctgacctcaagtgatctgcctgcctcggcctcccaaagtgctgggattacaggcatgagccaccgcgcctgaccacattgccatatctgaaatggctggattctcttaggtgcttttctttttctttctttctttctttttttgagacagaatctggctgtttcccaggctgaagtgcagtggcatgaactcagctcactgcaacctctgcctcctggattcaaacaattctcatgtctcagcctcctgaatagctgggattacaggcacccaccaccatatctggctaatatttgtattttttgtagagtcggagctttaccatgttggtcaggctgctctccaactcctggcctcaagtgattctatcgcctctgcctcccaaatcttcacctgctgggattagtttcccctgtctcagtaaattttttttcccaaactaagtgaacattagatttaatttggctggccccagaagaaaaacatgcacagatggtagttttactggtgttgcagtaagttttcaaatttggaagtttggcagctttatgatcttgaaccttgctgtccatctctcacacaactcctctcttggcctccagagtccctttactctcccagctttcctcctgcccctggctgctgtttcccagcctttccacattggctttcccatgtagtccttagtgtgtctgctcctcctctctctcctcatcacagttcccagcccccaccttcaactgaactcaacaaaatcttcaacttcatacagtagtcacattgttagtaataacactggcatttttattttgataaaatagaccgtttaaatttttgagattctaccttatattttttgaattatatactaaagcaaataagtagtgatgtaatgtcattggggaccaagatttttagtgtaaatgaaaaaagataacaaatataaactcaagtaaacaccctgtagtctttcacatgaattggaaatatcagaataaagtcatgatttttctctttctaaaaaatatgtatttccctagttaagtcccctgaaaaggtctaaatataatgacaccccagtaacactgagcagcactagtatacagactgtggtctctataagtgccatttctgactaagaactagggacttttgtgaaaacagctgattccaggtctggggcaagaaatgtgcaaaatgtgtccaggatattttgtg

SEQ ID NO: 414753 - DNA, 4351 bp, Homo sapiens
tgcctagaatgataccacctgtatacctagaacaccagccctggggaaacagccacaaacagagaacatgtccctgccctcctggagcttatgctgtgacacagagaagacagatagtaaagtaggaaccaaacagaccctatcatttctggtagagatgagtgctgtgaagaaaagcctatcatagaagggagagggagatgctgccctagcgagggtggtcagcgaaggcctctgaggaggggacattgagttggaagaggaatttctgtggagaaggaatagcaagagcagaggtggtgtgctcagcatgcaggaagagcagcccggaggccaatgtcagctcaagtttctcaggcaagaccgagaacctgaggaggaaagccaaagtagatgtgacctttggatccctcacgtcggcagctctgggcctggagcccgtggtcctgcgtgatgtccgaacagcctgcaccctccgggcccagttcctgcagaacctcctgcttccccaggccaagaggggcagcctcccaacccctcatgatgaccactttggcacttcgtaccagcagtggctgagctcagtggagacgctgctgacaaaccaccccccaggccacgtcctggctgccttggagcacctggctgcagagcgggaggcagagattcggtccctgtgcagtggggatgggcttggcgacacagagatatccagaccccaggccccggaccagtcagactccagccagaccctgccgtccatggttcatctcatccaggagggctggcggactgtgggtgtgctggtctcccagcggagcaccctcctgaaggagcggcaagtcttgacccagcgcctccagggcctggtggaggaggtggagagacgcgtcctgggatccagtgagaggcaggtgctgatactggggcttcggcgctgttgcctgtggacggagctcaaggccctgcacgatcagagccaggagctgcaggatgcagctgggcatcggcagctcctgctgagggagctacaggccaaacagcagcggatcctgcactggcgccagctggtggaggagacccaggaacaggtccgcctgctcatcaagggaaactcggccagcaagacccgcctgtgccggagcccgggggaggtgctagctctggtccagcgaaaggtggtccctacatttgaggcagtggcaccacagagccgggagctgctgcgctgtctggaggaggaagtccggcatttgccccacattctgttgggcacgctgctgcggcacaggccgggagagttgaagcccctgcccacggtcctcccatccatccaccagctgcaccccgcgtccccaaggggctccagcttcatagcgctgagccacaagctggggctgcctccagggaaggcctcggagctgctcctgccggcggctgcctctcttcgccaggaccttctgctcctgcaggaccagcggagcctctggtgctgggatctactccacatgaagaccagcctgccgccaggccttcccacccaggagctgctgcagatccaggcatcccaggaaaaacagcagaaagagaacctggggcaggctctgaagaggctggagaagctactgaaacaggcactggagcgaatccctgagctgcaggggatcgtgggggactggtgggagcagccaggccaggccgccctctctgaggagctctgccagggcctgtccctgccccagtggcggctgcgctgggttcaggcccagggggccctgcagaagctgtgcagctgaagagagggttcaaacggaagccgagaacttgacactgttcaccccaacacctcacctcccccaggacatttggaagaaagcagcgccaggattcctcggcagtcgtccccacccgcacctgcagtcccctcatgtgctgttctgctgccccactcagctcctggaccctgtcctttcatcccgctaaagcaccccctaaaaccccttcatcactttcattctcagcaaaaagtaattgagcacctcctctaggcgctggggagtccacactgaacaaaagaaacagaaaaccctgtcttccagcagttgagttctagggcagggagacagagtttacaagataaggaaaatatatatgtagtatgctgcaagttaactgctgtgtgggaaatccagcagggggtgggatgtgtgatttgaattgagggccacactgcccaggtcgtgctccgtcaaggggtgagcaggagcaacaggggtggctgagtaagggcttgcagctggaggcaacagcacatgcaaaggccctgagccaggatgtgctgcaataagggccactgagggggacagtgtaggttgggggtgaggaatgtattaaaagatgagattgccttctagtttgtatagtttctttttttacatgtaaatcagccatttggaatttatcctagcacatggatccaattttgtcttattttacatatatcctagtagcacttactgaaattcccagtcagagtggcagttgcctctgagggaaggtgggtggcagggatcaactgaggaggagacacagaaatgtcctagctgatgggaatgtgctgtgtcaagagcagcggcggtgacgcaggtgtagagatttgtcagagctcatgtagttgtagtcttaaggcctgtgcatttcactgcgtgggttactcaatttataaagcaaagcccttacacttttgagatgccacctttttatgcactaaatttccatgtttaattgggttatatctggcttctctccagacctgctttgtatttaactctccatgtgtcattcctacagtagcttaatagaaaggcttgtgacacattgtcatatctgttcttgttttcttttgttttttttttttttttttttgagatgcagtctcattctgttgcccaagttggagtgcagtggcatgatctcagctcactgcaacctccgcctcccaggttcaagccattctcatgcctcagcttccccagtagctaggattacaggtacgcaccaccacgcccagctcatttttgtacttttagtagggacggggtttcatcatgttggccagactggtctcgaactcctgacctcaagtgatctgcctgcctcggcctcccaaagtgctgggattacaggcatgagccaccgcgcctgaccacattgccatatctgaaatggctggattctcttaggtgcttttctttttctttctttctttctttttttgagacagaatctggctgtttcccaggctgaagtgcagtggcatgaactcagctcactgcaacctctgcctcctggattcaaacaattctcatgtctcagcctcctgaatagctgggattacaggcacccaccaccatatctggctaatatttgtattttttgtagagtcggagctttaccatgttggtcaggctgctctccaactcctggcctcaagtgattctatcgcctctgcctcccaaatcttcacctgctgggattagtttcccctgtctcagtaaattttttttcccaaactaagtgaacattagatttaatttggctggccccagaagaaaaacatgcacagatggtagttttactggtgttgcagtaagttttcaaatttggaagtttggcagctttatgatcttgaaccttgctgtccatctctcacacaactcctctcttggcctccagagtccctttactctcccagctttcctcctgcccctggctgctgtttcccagcctttccacattggctttcccatgtagtccttagtgtgtctgctcctcctctctctcctcatcacagttcccagcccccaccttcaactgaactcaacaaaatcttcaacttcatacagtagtcacattgttagtaataacactggcatttttattttgataaaatagaccgtttaaatttttgagattctaccttatattttttgaattatatactaaagcaaataagtagtgatgtaatgtcattggggaccaagatttttagtgtaaatgaaaaaagataacaaatataaactcaagtaaacaccctgtagtctttcacatgaattggaaatatcagaataaagtcatgatttttctctttctaaaaaatatgtatttccctagttaagtcccctgaaaaggtctaaatataatgacaccccagtaacactgagcagcactagtatacagactgtggtctctataagtgccatttctgactaagaactagggacttttgtgaaaacagctgattccaggtctggggcaagaaatgtgcaaaatgtgtccaggatattttgtg

SEQ ID NO: 414754 - DNA, 1519 bp, Homo sapiens
gcgccacacttgaagaggctgagggaggcggtgtcgccgccgcggcgctgtcatggagctagcgcaggaagcgcgggaactgggttgctgggcggtcgaagagatgggggtgcccgtggcggcccgggccccggaatcgacgctgcgcaggctgtgtctgggccagggggctgacatctgggcctacatcttgcagcatgtgcacagtcagaggactgtcaagaagatccggggaaacctactctggtatggccaccaggacagtccacaggtccgtcggaagttagagctggaagctgctgtgacccgcctgcgggcagaaatccaggaactcgaccagagcctggagctgatggagcgagacactgaggctcaggacacggccatggagcaggcacgtcagcacactcaagacacccagcgtcgagctctcctcctccgggcccaagctggggccatgcgaagacagcagcatacgctccgagatcccatgcagcggctgcagaatcaactgaggcgcctgcaggacatggagaggaaagccaaagtagatgtgacctttggatccctcacgtcggcagctctgggcctggagcccgtggtcctgcgtgatgtccgaacagcctgcaccctccgggcccagttcctgcagaacctcctgcttccccaggccaagaggggcagcctcccaacccctcatgatgaccactttggcacttcgtaccagcagtggctgagctcagtggagacgctgctgacaaaccaccccccaggccacgtcctggctgccttggagcacctggctgcagagcgggaggcagagattcggtccctgtgcagtggggatgggcttggcgacacagagatatccagaccccaggccccggaccagtcagactccagccagaccctgccgtccatggttcatctcatccaggagggctggcggactgtgggtgtgctggtctcccagcggagcaccctcctgaaggagcggcaagtcttgacccagcgcctccagggcctggtggaggaggtggagagacgcgtcctgggatccagtgagaggcaggtgctgatactggggcttcggcgctgttgcctgtggacggagctcaaggccctgcacgatcagagccaggagctgcaggatgcagctgggcatcggcagctcctgctgagggagctacaggccaaacagcagcggatcctgcactggcgccagctggtggaggagacccaggaacaggtccgcctgctcatcaagggaaactcggccagcaagacccgcctgtgccggagcccgggggaggtgctagctctggtccagcgaaaggtggtccctacatttgaggcagtggcaccacagagccgggagctgctgcgctgtctggaggaggaagtccggcatttgccccacattctgttgggcacgctgctgcggcacaggccgggagagtgagactggggctgccccacccctgccctgcatcccctgccatgggtgactgtcactccc

SEQ ID NO: 414755 - DNA, 6658 bp, Homo sapiens
ttagagtgcctggaatttgatccggaagaattttactacctattggaagcagcagaaggccatgccaaagaaggacagggtattaaaaccgacattcccaggtacatcattagccaactgggactcaataaggatcccttggaagaaatggctcatttgggaaactacgatagtgggacagcagaaacaccagaaacagatgaatcagtgagtagctctaatgcctccctgaaacttcgaaggaaacctcgggaaagtgattttgaaacgattaaattgattagcaatggagcctatggggcagtctactttgttcggcataaagaatcccggcagaggtttgccatgaagaagattaataaacagaacctcatccttcgaaaccagatccagcaggcctttgtggagcgggatatcctgacttttgcagaaaacccctttgttgtcagcatgtattgctcctttgaaacaaggcgccacttgtgcatggtcatggaatatgtggaagggggagactgtgctactttaatgaaaaacatgggtcctctccctgttgatatggccagaatgtactttgctgagacggtcttggccttggaatatttacataattatggaattgtacacagggatttgaaaccagacaacttgttggttacctccatggggcacataaagctgacagattttggattatctaaggtgggactaatgagcatgactaccaacctttacgagggtcatattgagaaggatgctagagagttcctggataaacaggtctgtggcacacctgaatacattgcaccagaagtgattctgaggcagggttatggaaagccggtggactggtgggccatggggattatcctctatgaatttctggttggatgcgtgccattctttggggatactccagaggagctatttggacaagtcatcagtgatgagatcaactggcctgagaaggatgaggcacccccacctgatgcccaggatctgattaccttactcctcaggcagaatcccctggagaggctgggaacaggtggtgcatatgaagtcaaacagcatcgattcttccgttctttagactggaacagtttgctgagacagaaggcagaatttattccccaactggaatctgaggatgacacaagttattttgatactcggtctgagaagtatcatcatatggaaacggaggaagaagatgacacaaatgatgaagactttaatgtggaaataaggcagttttcttcatgttcacacaggttttcaaaagttttcagcagtatagatcgaatcactcagaattcagcagaagagaaggaagactctgtggacaaaaccaaaagcaccaccttgccatccacagaaacactgagctggagttcagaatattctgaaatgcaacagctatcaacatccaactcttcagatactgaaagcaacagacataaactcagttctggcctacttcccaaactggctatttcaacagagggagagcaagatgaagctgcctcctgccctggagacccccatgaggagccaggaaagccagcccttcctcctgaagagtgtgcccaggaggagcctgaggtcaccaccccagccagcaccatcagcagctccaccctgtcagttggcagtttttcagagcacttggatcagataaatggacgaagcgagtgtgtggacagtacagataattcctcaaagccatccagtgaacccgcttctcacatggctcggcagcgattagaaagcacagaaaaaaagaaaatctcggggaaagtcacaaagtccctctctgccagtgctctttccctcatgatcccaggagatatgtttgctgtttcccctctgggaagtccaatgtctccccattccctgtcctcggacccttcttcttcacgagattcctctcccagccgagattcctcagcagcttctgccagtccacatcagccgattgtgatccacagttcggggaagaactacggctttaccatccgagccatccgggtgtatgtgggagacagtgacatctatacagtgcaccatatcgtctggaatgtagaagaaggaagtccggcatgccaggcaggactgaaggctggagatcttatcactcacatcaatggagaaccagtgcatggacttgtccacacagaagttatagaactcctactgaagagtgggaataaggtgtcaatcactactaccccatttgaaaacacatcaatcaaaactggaccagccaggagaaacagctataagagccggatggtgaggcggagcaagaaatccaagaagaaagaaagtctcgaaaggaggagatctcttttcaaaaagctagccaagcagccttctcctttactccacaccagccgaagtttctcctgcttgaacagatccctgtcatcgggtgagagcctcccaggttcccccactcatagcttgtctccccggtctccaacaccaagctaccgctccacccctgacttcccatctggtactaattcctcccagagcagctcccctagttctagtgcccccaattccccagcagggtccgggcacatccggcccagcactctccacggtcttgcacccaaactcggcgggcagcggtaccggtccggaaggcgaaagtccgccggcaacatcccactgtccccgctggcccggacgccctctccaaccccgcaacccacctccccgcagcggtcaccatcccctcttctgggacactcactgggcaattccaagatcgcgcaagcctttcccagcaagatgcactccccgcccaccatcgtcagacacatcgtgaggcccaagagtgcggagccccccaggtccccgctgctcaagcgcgtgcagtccgaggagaagctgtcgccctcttacggcagtgacaagaagcacctgtgctcccgcaagcacagcctggaggtgacccaagaggaggtgcagcgggagcagtcccagcgggaggcgccgctgcagagcctggatgagaacgtgtgcgacgtgccgccgctcagccgcgcccggccagtggagcaaggctgcctgaaacgcccagtctcccggaaggtgggccgccaggagtctgtggacgacctggaccgcgacaagctgaaggccaaggtggtggtgaagaaagcagacggcttcccagagaaacaggaatcccaccagaaatcccatggacccgggagtgatttggaaaactttgctctgtttaagctggaagagagagagaagaaagtctatccgaaggctgtggaaaggtcaagtacttttgaaaacaaagcgtctatgcaggaggcgccaccgctgggcagcctgctgaaggatgctcttcacaagcaggccagcgtgcgcgccagcgagggtgcgatgtcggatggcccggtgcctgcggagcaccgccagggtggcggggacttcagacgggcccccgctcctggcaccctccaggatggtctctgccactccctcgacaggggcatctctgggaagggggaaggcacggagaagtcctcccaggccaaggagcttctccgatgtgaaaagttagacagcaagctggccaacatcgattacctccgaaagaaaatgtcacttgaggacaaagaggacaacctctgccctgtgctgaagcccaagatgacagctggctcccacgaatgcctgccagggaacccagtccgacccacgggtgggcagcaggagcccccgccggcttctgagagccgagcttttgtcagcagcacccatgcagctcagatgagtgccgtctcttttgttcccctcaaggccttaacaggccgggtggacagtggaacggagaagcctggcttggttgctcctgagtcccctgttaggaagagcccctccgagtataagctggaaggtaggtctgtctcatgcctgaagccgatcgagggcactctggacattgctctcctgtccggacctcaggcctccaagacagaactgccttccccagagtctgcacagagccccagcccaagtggtgacgtgagggcctctgtgccaccagttctccccagcagcagtgggaaaaagaacgataccaccagtgcaagagagctttctccttccagcttaaagatgaataaatcctacctgctggagccttggttcctgccccccagccgaggtctccagaattcaccagcagtttccctgcctgacccagagttcaagagggacaggaaaggtccccatcctactgccaggagccctggaacagtcatggaaagcaatccccaacagagagagggcagctcccctaaacaccaagaccacaccactgaccccaagcttctgacctgcctggggcagaacctccacagccctgacctggccaggccacgctgcccgctcccacctgaagcttccccctcaagggagaagccaggcctgagggaatcgtctgaaagaggccctcccacagccagaagcgagcgctctgctgcgagggctgacacatgcagagagccctccatggaactgtgctttccagaaactgcgaaaaccagtgacaactccaaaaatctcctctctgtgggaaggacccacccagatttctatacacagacccaggccatggagaaagcatgggcgccgggtgggaaaacgaaccacaaagatggcccaggtgaggcgaggcccccgcccagagacaactcctctctgcactcagctggaattccctgtgagaaggagctgggcaaggtgaggcgtggcgtggaacccaagcccgaagcgcttcttgccaggcggtctctgcagccacctggaattgagagtgagaagagtgaaaagctctccagtttcccatctttgcagaaagatggtgccaaggaacctgaaaggaaggagcagcctctacaaaggcatcccagcagcatccctccgccccctctgacggccaaagacctgtccagcccggctgccaggcagcattgcagttccccaagccacgcttctggcagagagccgggggccaagcccagcactgcagagcccagctcgagcccccaggaccctcccaagcctgttgctgcgcacagtgaaagcagcagccacaagccccggcctggccctgacccgggccctccaaagactaagcaccccgaccggtccctctcctctcagaaaccaagtgtcggggccacaaagggcaaagagcctgccactcagtccctcggtggctctagcagagaggggaagggccacagtaagagtgggccggatgtgtttcctgctaccccaggctcccagaacaaagccagcgatgggattggccagggagaaggtgggccctctgtcccactgcacactgacagggctcctctagacgccaagccacaacccaccagtggtgggcggcccctggaggtgctggagaagcctgtgcatttgccaaggccgggacacccagggcctagtgagccagcggaccagaaactgtccgctgttggtgaaaagcaaaccctgtctccaaagcaccccaaaccatccactgtgaaagattgccccaccctgtgcaaacagacagacaacagacagacagacaaaagcccgagtcagccggccgccaacaccgacagaagggcggaagggaagaaatgcactgaagcactttatgctccagcagagggcgacaagctcgaggccggcctttcctttgtgcatagcgagaaccggttgaaaggcgcggagcggccagccgcgggggtggggaagggcttccctgaggccagagggaaagggcccggtccccagaagccaccgacggaggcagacaagcccaatggcatgaaacggtccccctcagccactgggcagagttctttccgatccacggccctcccggaaaagtctctgagctgctcctccagcttccctgaaaccagggccggagttagagaggcctctgcagccagcagcgacacctcttctgccaaggccgccgggggcatgctggagcttccagcccccagcaacagggaccataggaaggctcagcctgccggggagggccgaacccacatgacaaagagtgactccctgccctccttccgggtctccaccctgcctctggagtcacaccaccccgacccaaacaccatgggcggggccagccaccgggacagggctctctcggtgactgccaccgtaggggaaaccaaagggaaggaccctgccccagcccagcctcccccagctaggaaacagaacgtgggcagagacgtgaccaagccatccccagccccaaacactgaccgccccatctctctttctaatgagaaggactttgtggtacggcagaggcgggggaaagagagtttgcgtagcagccctcacaaaaaggccttgtaacggggagggcccaggggcaggactgtggagacccgtcctgaacgggcgactgtgtcttgactacctttcaaaaccagcactgtgtgggaatgtccgccaggcagagctcggagcctcattgagacaggggagagagaaagacaaagaggggaccttcttccagatgccttcccagttgtaaccggtaaaactgttaccagatagtgtatggtcggacttaggtccccaggtt

SEQ ID NO: 414756 - DNA, 5969 bp, Homo sapiens
ttagagtgcctggaatttgatccggaagaattttactacctattggaagcagcagaaggccatgccaaagaaggacagggtattaaaaccgacattcccaggtacatcattagccaactgggactcaataaggatcccttggaagaaatggctcatttgggaaactacgatagtgggacagcagaaacaccagaaacagatgaatcagtgagtagctctaatgcctccctgaaacttcgaaggaaacctcgggaaagtgattttgaaacgattaaattgattagcaatggagcctatggggcagtctactttgttcggcataaagaatcccggcagaggtttgccatgaagaagattaataaacagaacctcatccttcgaaaccagatccagcaggcctttgtggagcgggatatcctgacttttgcagaaaacccctttgttgtcagcatgtattgctcctttgaaacaaggcgccacttgtgcatggtcatggaatatgtggaagggggagactgtgctactttaatgaaaaacatgggtcctctccctgttgatatggccagaatgtactttgctgagacggtcttggccttggaatatttacataattatggaattgtacacagggatttgaaaccagacaacttgttggttacctccatggggcacataaagctgacagattttggattatctaaggtgggactaatgagcatgactaccaacctttacgagggtcatattgagaaggatgctagagagttcctggataaacaggtctgtggcacacctgaatacattgcaccagaagtgattctgaggcagggttatggaaagccggtggactggtgggccatggggattatcctctatgaatttctggttggatgcgtgccattctttggggatactccagaggagctatttggacaagtcatcagtgatgagatcaactggcctgagaaggatgaggcacccccacctgatgcccaggatctgattaccttactcctcaggcagaatcccctggagaggctgggaacaggtggtgcatatgaagtcaaacagcatcgattcttccgttctttagactggaacagtttgctgagacagaaggcagaatttattccccaactggaatctgaggatgacacaagttattttgatactcggtctgagaagtatcatcatatggaaacggaggaagaagatgacacaaatgatgaagactttaatgtggaaataaggcagttttcttcatgttcacacaggttttcaaaagttttcagcagtatagatcgaatcactcagaattcagcagaagagaaggaagactctgtggacaaaaccaaaagcaccaccttgccatccacagaaacactgagctggagttcagaatattctgaaatgcaacagctatcaacatccaactcttcagatactgaaagcaacagacataaactcagttctggcctacttcccaaactggctatttcaacagagggagagcaagatgaagctgcctcctgccctggagacccccatgaggagccaggaaagccagcccttcctcctgaagagtgtgcccaggaggagcctgaggtcaccaccccagccagcaccatcagcagctccaccctgtcagttggcagtttttcagagcacttggatcagataaatggacgaagcgagtgtgtggacagtacagataattcctcaaagccatccagtgaacccgcttctcacatggctcggcagcgattagaaagcacagaaaaaaagaaaatctcggggaaagtcacaaagtccctctctgccagtgctctttccctcatgatcccaggagatatgtttgctgtttcccctctgggaagtccaatgtctccccattccctgtcctcggacccttcttcttcacgagattcctctcccagccgagattcctcagcagcttctgccagtccacatcagccgattgtgatccacagttcggggaagaactacggctttaccatccgagccatccgggtgtatgtgggagacagtgacatctatacagtgcaccatatcgtctggaatgtagaagaaggaagtccggcatgccaggcaggactgaaggctggagatcttatcactcacatcaatggagaaccagtgcatggacttgtccacacagaagttatagaactcctactgaagagtgggaataaggtgtcaatcactactaccccatttgaaaacacatcaatcaaaactggaccagccaggagaaacagctataagagccggatggtgaggcggagcaagaaatccaagaagaaagaaagtctcgaaaggaggagatctcttttcaaaaagctagccaagcagccttctcctttactccacaccagccgaagtttctcctgcttgaacagatccctgtcatcgggtgagagcctcccaggttcccccactcatagcttgtctccccggtctccaacaccaagctaccgctccacccctgacttcccatctggtactaattcctcccagagcagctcccctagttctagtgcccccaattccccagcagggtccgggcacatccggcccagcactctccacggtcttgcacccaaactcggcgggcagcggtaccggtccggaaggcgaaagtccgccggcaacatcccactgtccccgctggcccggacgccctctccaaccccgcaacccacctccccgcagcggtcaccatcccctcttctgggacactcactgggcaattccaagatcgcgcaagcctttcccagcaagatgcactccccgcccaccatcgtcagacacatcgtgaggcccaagagtgcggagccccccaggtccccgctgctcaagcgcgtgcagtccgaggagaagctgtcgccctcttacggcagtgacaagaagcacctgtgctcccgcaagcacagcctggaggtgacccaagaggaggtgcagcgggagcagtcccagcgggaggcgccgctgcagagcctggatgagaacgtgtgcgacgtgccgccgctcagccgcgcccggccagtggagcaaggctgcctgaaacgcccagtctcccggaaggtgggccgccaggagtctgtggacgacctggaccgcgacaagctgaaggccaaggtggtggtgaagaaagcagacggcttcccagagaaacaggaatcccaccagaaatcccatggacccgggagtgatttggaaaactttgctctgtttaagctggaagagagagagaagaaagtctatccgaaggctgtggaaaggtcaagtacttttgaaaacaaagcgtctatgcaggaggcgccaccgctgggcagcctgctgaaggatgctcttcacaagcaggccagcgtgcgcgccagcgagggtgcgatgtcggatggcccggtgcctgcggagcaccgccagggtggcggggacttcagacgggcccccgctcctggcaccctccaggatggtctctgccactccctcgacaggggcatctctgggaagggggaaggcacggagaagtcctcccaggccaaggagcttctccgatgtgaaaagttagacagcaagctggccaacatcgattacctccgaaagaaaatgtcacttgaggacaaagaggacaacctctgccctgtgctgaagcccaagatgacagctggctcccacgaatgcctgccagggaacccagtccgacccacgggtgggcagcaggagcccccgccggcttctgagagccgagcttttgtcagcagcacccatgcagctcagatgagtgccgtctcttttgttcccctcaaggccttaacaggccgggtggacagtggaacggagaagcctggcttggttgctcctgagtcccctgttaggaagagcccctccgagtataagctggaaggtaggtctgtctcatgcctgaagccgatcgagggcactctggacattgctctcctgtccggacctcaggcctccaagacagaactgccttccccagagtctgcacagagccccagcccaagtggtgacgtgagggcctctgtgccaccagttctccccagcagcagtgggaaaaagaacgataccaccagtgcaagagagctttctccttccagcttaaagatgaataaatcctacctgctggagccttggttcctgccccccagccgaggtctccagaattcaccagcagtttccctgcctgacccagagttcaagagggacaggaaaggtccccatcctactgccaggagccctggaacagtcatggaaagcaatccccaacagagagagggcagctcccctaaacaccaagaccacaccactgaccccaagcttctgacctgcctggggcagaacctccacagccctgacctggccaggccacgctgcccgctcccacctgaagcttccccctcaagggagaagccaggcctgagggaatcgtctgaaagaggccctcccacagccagaagcgagcgctctgctgcgagggctgacacatgcagagagccctccatggaactgtgctttccagaaactgcgaaaaccagtgacaactccaaaaatctcctctctgtgggaaggacccacccagatttctatacacagacccaggccatggagaaagcatgggcgccgggtgggaaaacgaaccacaaagatggcccaggtgaggcgaggcccccgcccagagacaactcctctctgcactcagctggaattccctgtgagaaggagctgggcaaggtgaggcgtggcgtggaacccaagcccgaagcgcttcttgccaggcggtctctgcagccacctggaattgagagtgagaagagtgaaaagctctccagtttcccatctttgcagaaagatggtgccaaggaacctgaaaggaaggagcagcctctacaaaggcatcccagcagcatccctccgccccctctgacggccaaagacctgtccagcccggctgccaggcagcattgcagttccccaagccacgcttctggcagagagccgggggccaagcccagcactgcagagcccagctcgagcccccaggaccctcccaagcctgttgctgcgcacagtgaaagcagcagccacaagccccggcctgccaccgacggaggcagacaagcccaatggcatgaaacggtccccctcagccactgggcagagttctttccgatccacggccctcccggaaaagtctctgagctgctcctccagcttccctgaaaccagggccggagttagagaggcctctgcagccagcagcgacacctcttctgccaaggccgccgggggcatgctggagcttccagcccccagcaacagggaccataggaaggctcagcctgccggggagggccgaacccacatgacaaagagtgactccctgccctccttccgggtctccaccctgcctctggagtcacaccaccccgacccaaacaccatgggcggggccagccaccgggacagggctctctcggtgactgccaccgtaggggaaaccaaagggaaggaccctgccccagcccagcctcccccagctaggaaacagaacgtgggcagagacgtgaccaagccatccccagccccaaacactgaccgccccatctctctttctaatgagaaggactttgtggtacggcagaggcgggggaaagagagtttgcgtagcagccctcacaaaaaggccttgtaacggggagggcccaggggcaggactgtggagacccgtcctgaacgggcgactgtgtcttgactacctttcaaaaccagcactgtgtgggaatgtccgccaggcagagctcggagcctcattgagacaggggagagagaaagacaaagaggggaccttcttccagatgccttcccagttgtaaccggtaaaactgttaccagatagtgtatggtcggacttaggtccccaggtt

SEQ ID NO: 414757 - DNA, 6604 bp, Homo sapiens
ttagagtgcctggaatttgatccggaagaattttactacctattggaagcagcagaaggccatgccaaagaaggacagggtattaaaaccgacattcccaggtacatcattagccaactgggactcaataaggatcccttggaagaaatggctcatttgggaaactacgatagtgggacagcagaaacaccagaaacagatgaatcagtgagtagctctaatgcctccctgaaacttcgaaggaaacctcgggaaagtgattttgaaacgattaaattgattagcaatggagcctatggggcagtctactttgttcggcataaagaatcccggcagaggtttgccatgaagaagattaataaacagaacctcatccttcgaaaccagatccagcaggcctttgtggagcgggatatcctgacttttgcagaaaacccctttgttgtcagcatgtattgctcctttgaaacaaggcgccacttgtgcatggtcatggaatatgtggaagggggagactgtgctactttaatgaaaaacatgggtcctctccctgttgatatggccagaatgtactttgctgagacggtcttggccttggaatatttacataattatggaattgtacacagggatttgaaaccagacaacttgttggttacctccatggggcacataaagctgacagattttggattatctaaggtgggactaatgagcatgactaccaacctttacgagggtcatattgagaaggatgctagagagttcctggataaacaggtctgtggcacacctgaatacattgcaccagaagtgattctgaggcagggttatggaaagccggtggactggtgggccatggggattatcctctatgaatttctggttggatgcgtgccattctttggggatactccagaggagctatttggacaagtcatcagtgatgagatcaactggcctgagaaggatgaggcacccccacctgatgcccaggatctgattaccttactcctcaggcagaatcccctggagaggctgggaacaggtggtgcatatgaagtcaaacagcatcgattcttccgttctttagactggaacagtttgctgagacagaaggcagaatttattccccaactggaatctgaggatgacacaagttattttgatactcggtctgagaagtatcatcatatggaaacggaggaagaagatgacacaaatgatgaagactttaatgtggaaataaggcagttttcttcatgttcacacaggttttcaaaagttttcagcagtatagatcgaatcactcagaattcagcagaagagaaggaagactctgtggacaaaaccaaaagcaccaccttgccatccacagaaacactgagctggagttcagaatattctgaaatgcaacagctatcaacatccaactcttcagatactgaaagcaacagacataaactcagttctggcctacttcccaaactggctatttcaacagagggagagcaagatgaagctgcctcctgccctggagacccccatgaggagccaggaaagccagcccttcctcctgaagagtgtgcccaggaggagcctgaggtcaccaccccagccagcaccatcagcagctccaccctgtcagttggcagtttttcagagcacttggatcagataaatggacgaagcgagtgtgtggacagtacagataattcctcaaagccatccagtgaacccgcttctcacatggctcggcagcgattagaaagcacagaaaaaaagaaaatctcggggaaagtcacaaagtccctctctgccagtgctctttccctcatgatcccaggagatatgtttgctgtttcccctctgggaagtccaatgtctccccattccctgtcctcggacccttcttcttcacgagattcctctcccagccgagattcctcagcagcttctgccagtccacatcagccgattgtgatccacagttcggggaagaactacggctttaccatccgagccatccgggtgtatgtgggagacagtgacatctatacagtgcaccatatcgtctggaatgtagaagaaggaagtccggcatgccaggcaggactgaaggctggagatcttatcactcacatcaatggagaaccagtgcatggacttgtccacacagaagttatagaactcctactgaagagtgggaataaggtgtcaatcactactaccccatttgaaaacacatcaatcaaaactggaccagccaggagaaacagctataagagccggatggtgaggcggagcaagaaatccaagaagaaagaaagtctcgaaaggaggagatctcttttcaaaaagctagccaagcagccttctcctttactccacaccagccgaagtttctcctgcttgaacagatccctgtcatcgggtgagagcctcccaggttcccccactcatagcttgtctccccggtctccaacaccaagctaccgctccacccctgacttcccatctggtactaattcctcccagagcagctcccctagttctagtgcccccaattccccagcagggtccgggcacatccggcccagcactctccacggtcttgcacccaaactcggcgggcagcggtaccggtccggaaggcgaaagtccgccggcaacatcccactgtccccgctggcccggacgccctctccaaccccgcaacccacctccccgcagcggtcaccatcccctcttctgggacactcactgggcaattccaagatcgcgcaagcctttcccagcaagatgcactccccgcccaccatcgtcagacacatcgtgaggcccaagagtgcggagccccccaggtccccgctgctcaagcgcgtgcagtccgaggagaagctgtcgccctcttacggcagtgacaagaagcacctgtgctcccgcaagcacagcctggaggtgacccaagaggaggtgcagcgggagcagtcccagcgggaggcgccgctgcagagcctggatgagaacgtgtgcgacgtgccgccgctcagccgcgcccggccagtggagcaaggctgcctgaaacgcccagtctcccggaaggtgggccgccaggagtctgtggacgacctggaccgcgacaagctgaaggccaaggtggtggtgaagaaagcagacggcttcccagagaaacaggaatcccaccagaaatcccatggacccgggagtgatttggaaaactttgctctgtttaagctggaagagagagagaagaaagtctatccgaaggctgtggaaaggtcaagtacttttgaaaacaaagcgtctatgcaggaggcgccaccgctgggcagcctgctgaaggatgctcttcacaagcaggccagcgtgcgcgccagcgagggtgcgatgtcggatggcccggtgcctgcggagcaccgccagggtggcggggacttcagacgggcccccgctcctggcaccctccaggatggtctctgccactccctcgacaggggcatctctgggaagggggaaggcacggagaagtcctcccaggccaaggagcttctccgatgtgaaaagttagacagcaagctggccaacatcgattacctccgaaagaaaatgtcacttgaggacaaagaggacaacctctgccctgtgctgaagcccaagatgacagctggctcccacgaatgcctgccagggaacccagtccgacccacgggtgggcagcaggagcccccgccggcttctgagagccgagcttttgtcagcagcacccatgcagctcagatgagtgccgtctcttttgttcccctcaaggccttaacaggccgggtggacagtggaacggagaagcctggcttggttgctcctgagtcccctgttaggaagagcccctccgagtataagctggaaggtaggtctgtctcatgcctgaagccgatcgagggcactctggacattgctctcctgtccggacctcaggcctccaagacagaactgccttccccagagtctgcacagagccccagcccaagtggtgacgtgagggcctctgtgccaccagttctccccagcagcagtgggaaaaagaacgataccaccagtgcaagagagctttctccttccagcttaaagatgaataaatcctacctgctggagccttggttcctgccccccagccgaggtctccagaattcaccagcagtttccctgcctgacccagagttcaagagggacaggaaaggtccccatcctactgccaggagccctggaacagtcatggaaagcaatccccaacagagagagggcagctcccctaaacaccaagaccacaccactgaccccaagcttctgacctgcctggggcagaacctccacagccctgacctggccaggccacgctgcccgctcccacctgaagcttccccctcaagggagaagccaggcctgagggaatcgtctgaaagaggccctcccacagccagaagcgagcgctctgctgcgagggctgacacatgcagagagccctccatggaactgtgctttccagaaactgcgaaaaccagtgacaactccaaaaatctcctctctgtgggaaggacccacccagatttctatacacagacccaggccatggagaaagcatgggcgccgggtgggaaaacgaaccacaaagatggcccaggtgaggcgaggcccccgcccagagacaactcctctctgcactcagctggaattccctgtgagaaggagctgggcaaggtgaggcgtggcgtggaacccaagcccgaagcgcttcttgccaggcggtctctgcagccacctggaattgagagtgagaagagtgaaaagctctccagtttcccatctttgcagaaagatggtgccaaggaacctgaaaggaaggagcagcctctacaaaggcatcccagcagcatccctccgccccctctgacggccaaagacctgtccagcccggctgccaggcagcattgcagttccccaagccacgcttctggcagagagccgggggccaagcccagcactgcagagcccagctcgagcccccaggaccctcccaagcctgttgctgcgcacagtgaaagcagcagccacaagccccggcctggccctgacccgggccctccaaagactaagcaccccgaccggtccctctcctctcagaaaccaagtgtcggggccacaaagggcaaagagcctgccactcagtccctcggtggctctagcagagaggggaagggccacagtaagagtgggccggatgtgtttcctgctaccccaggctcccagaacaaagccagcgatgggattggccagggagaaggtgggccctctgtcccactgcacactgacagggctcctctagacgccaagccacaacccaccagtggtgggcggcccctggaggtgctggagaagcctgtgcatttgccaaggccgggacacccagggcctagtgagccagcggaccagaaactgtccgctgttggtgaaaagcaaaccctgtctccaaagcaccccaaaccatccactgtgaaagattgccccaccctgtgcaaacagacagacaacagacagacagacaaaagcccgagtcagccggccgccaacaccgacagaagggcggaagggaagaaatgcactgaagcactttatgctccagcagagggcgacaagctcgaggccggcctttcctttgtgcatagcgagaaccggttgaaaggcgcggagcggccagccgcgggggtggggaagggcttccctgaggccagagggaaagggcccggtccccagaagccaccgacggaggcagacaagcccaatggcatgaaacggtccccctcagccactgggcagagttctttccgatccacggccctcccggaggcctctgcagccagcagcgacacctcttctgccaaggccgccgggggcatgctggagcttccagcccccagcaacagggaccataggaaggctcagcctgccggggagggccgaacccacatgacaaagagtgactccctgccctccttccgggtctccaccctgcctctggagtcacaccaccccgacccaaacaccatgggcggggccagccaccgggacagggctctctcggtgactgccaccgtaggggaaaccaaagggaaggaccctgccccagcccagcctcccccagctaggaaacagaacgtgggcagagacgtgaccaagccatccccagccccaaacactgaccgccccatctctctttctaatgagaaggactttgtggtacggcagaggcgggggaaagagagtttgcgtagcagccctcacaaaaaggccttgtaacggggagggcccaggggcaggactgtggagacccgtcctgaacgggcgactgtgtcttgactacctttcaaaaccagcactgtgtgggaatgtccgccaggcagagctcggagcctcattgagacaggggagagagaaagacaaagaggggaccttcttccagatgccttcccagttgtaaccggtaaaactgttaccagatagtgtatggtcggacttaggtccccaggtt

SEQ ID NO: 414758 - DNA, 1280 bp, Homo sapiens
gctgttcatgtgcttagggagcctttgcactcctcgtgtgttggcaccgagttgaaagacgcaggtgctggagaagcctgtgcatttgccaaggccgggacacccagggcctagtgagccagcggaccagaaactgtccgctgttggtgaaaagcaaaccctgtctccaaagcaccccaaaccatccactgtgaaagattgccccaccctgtgcaaacagacagacaacagacagacagacaaaagcccgagtcagccggccgccaacaccgacagaagggcggaagggaagaaatgcactgaagcactttatgctccagcagagggcgacaagctcgaggccggcctttcctttgtgcatagcgagaaccggttgaaaggcgcggagcggccagccgcgggggtggggaagggcttccctgaggccagagggaaagggcccggtccccagaagccaccgacggaggcagacaagcccaatggcatgaaacggtccccctcagccactgggcagagttctttccgatccacggccctcccggaaaagtctctgagctgctcctccagcttccctgaaaccagggccggagttagagaggcctctgcagccagcagcgacacctcttctgccaaggccgccgggggcatgctggagcttccagcccccagcaacagggaccataggaaggctcagcctgccggggagggccgaacccacatgacaaagagtgactccctgccctccttccgggtctccaccctgcctctggagtcacaccaccccgacccaaacaccatgggcggggccagccaccgggacagggctctctcggtgactgccaccgtaggggaaaccaaagggaaggaccctgccccagcccagcctcccccagctaggaaacagaacgtgggcagagacgtgaccaagccatccccagccccaaacactgaccgccccatctctctttctaatgagaaggactttgtggtacggcagaggcgggggaaagagagtttgcgtagcagccctcacaaaaaggccttgtaacggggagggcccaggggcaggactgtggagacccgtcctgaacgggcgactgtgtcttgactacctttcaaaaccagcactgtgtgggaatgtccgccaggcagagctcggagcctcattgagacaggggagagagaaagacaaagaggggaccttcttccagatgccttcccagttgtaaccggtaaaactgttaccagatagtgtatggtcggacttaggtccccaggtt

SEQ ID NO: 414759 - DNA, 355 bp, Homo sapiens
catatggaaacggaggaagaagatgacacaaatgatgaagactttaatgtggaaataaggcagttttcttcatgttcacacaggttttcaaaagtaagtgaaatgtggcataaacatacagagtctctctgggaggatctcccgctggccagatagtatccccgaacagctggacacttaccgttttccagggtttgaggtctcctatgcttaaacttccttttgttgaagaaaagtgacctcctcaacttatagtctgtccctatcccctaggcctttagactgccattttaccttctctctttcctgtgagacaacagagattcagatagctgagaccttgggcttacctgag

SEQ ID NO: 414760 - DNA, 317 bp, Homo sapiens
aatagatgcctcttccatctcttcctcctccacgtcacctttctcaaagcaatcacatgttgttaatgttcgcctgacaccgtctggacttactggccacataggagtatgttctctggcgtttactcttcctgctgtctctctcttcccgtcttcccacctctcctatcctggattttcctgaatgtgtttatcccttcttctttgtacagttggcagtttttcagagcacttggatcagataaatggacgaagcgagtgtgtggacagtacagataattcctcaaagccatccagtgaacccgcttctcacatgg

SEQ ID NO: 414761 - DNA, 5768 bp, Homo sapiens
ttagagtgcctggaatttgatccggaagaattttactacctattggaagcagcagaaggccatgccaaagaaggacagggtattaaaaccgacattcccaggtacatcattagccaactgggactcaataaggatcccttggaagaaatggctcatttgggaaactacgatagtgggacagcagaaacaccagaaacagatgaatcagtgagtagctctaatgcctccctgaaacttcgaaggaaacctcgggaaagtgattttgaaacgattaaattgattagcaatggagcctatggggcagtctactttgttcggcataaagaatcccggcagaggtttgccatgaagaagattaataaacagaacctcatccttcgaaaccagatccagcaggcctttgtggagcgggatatcctgacttttgcagaaaacccctttgttgtcagcatgtattgctcctttgaaacaaggcgccacttgtgcatggtcatggaatatgtggaagggggagactgtgctactttaatgaaaaacatgggtcctctccctgttgatatggccagaatgtactttgctgagacggtcttggccttggaatatttacataattatggaattgtacacagggatttgaaaccagacaacttgttggttacctccatggggcacataaagctgacagattttggattatctaaggtgggactaatgagcatgactaccaacctttacgagggtcatattgagaaggatgctagagagttcctggataaacaggtctgtggcacacctgaatacattgcaccagaagtgattctgaggcagggttatggaaagccggtggactggtgggccatggggattatcctctatgaatttctggttggatgcgtgccattctttggggatactccagaggagctatttggacaagtcatcagtgatgagatcaactggcctgagaaggatgaggcacccccacctgatgcccaggatctgattaccttactcctcaggcagaatcccctggagaggctgggaacaggtggtgcatatgaagtcaaacagcatcgattcttccgttctttagactggaacagtttgctgagacagaaggcagaatttattccccaactggaatctgaggatgacacaagttattttgatactcggtctgagaagtatcatcatatggaaacggaggaagaagatgacacaaatgatgaagactttaatgtggaaataaggcagttttcttcatgttcacacaggttttcaaaagttttcagcagtatagatcgaatcactcagaattcagcagaagagaaggaagactctgtggacaaaaccaaaagcaccaccttgccatccacagaaacactgagctggagttcagaatattctgaaatgcaacagctatcaacatccaactcttcagatactgaaagcaacagacataaactcagttctggcctacttcccaaactggctatttcaacagagggagagcaagatgaagctgcctcctgccctggagacccccatgaggagccaggaaagccagcccttcctcctgaagagtgtgcccaggaggagcctgaggtcaccaccccagccagcaccatcagcagctccaccctgtcagatatgtttgctgtttcccctctgggaagtccaatgtctccccattccctgtcctcggacccttcttcttcacgagattcctctcccagccgagattcctcagcagcttctgccagtccacatcagccgattgtgatccacagttcggggaagaactacggctttaccatccgagccatccgggtgtatgtgggagacagtgacatctatacagtgcaccatatcgtctggaatgtagaagaaggaagtccggcatgccaggcaggactgaaggctggagatcttatcactcacatcaatggagaaccagtgcatggacttgtccacacagaagttatagaactcctactgaagagtgggaataaggtgtcaatcactactaccccatttgaaaacacatcaatcaaaactggaccagccaggagaaacagctataagagccggatggtgaggcggagcaagaaatccaagaagaaagaaagtctcgaaaggaggagatctcttttcaaaaagctagccaagcagccttctcctttactccacaccagccgaagtttctcctgcttgaacagatccctgtcatcgggtgagagcctcccaggttcccccactcatagcttgtctccccggtctccaacaccaagctaccgctccacccctgacttcccatctggtactaattcctcccagagcagctcccctagttctagtgcccccaattccccagcagggtccgggcacatccggcccagcactctccacggtcttgcacccaaactcggcgggcagcggtaccggtccggaaggcgaaagtccgccggcaacatcccactgtccccgctggcccggacgccctctccaaccccgcaacccacctccccgcagcggtcaccatcccctcttctgggacactcactgggcaattccaagatcgcgcaagcctttcccagcaagatgcactccccgcccaccatcgtcagacacatcgtgaggcccaagagtgcggagccccccaggtccccgctgctcaagcgcgtgcagtccgaggagaagctgtcgccctcttacggcagtgacaagaagcacctgtgctcccgcaagcacagcctggaggtgacccaagaggaggtgcagcgggagcagtcccagcgggaggcgccgctgcagagcctggatgagaacgtgtgcgacgtgccgccgctcagccgcgcccggccagtggagcaaggctgcctgaaacgcccagtctcccggaaggtgggccgccaggagtctgtggacgacctggaccgcgacaagctgaaggccaaggtggtggtgaagaaagcagacggcttcccagagaaacaggaatcccaccagaaatcccatggacccgggagtgatttggaaaactttgctctgtttaagctggaagagagagagaagaaagtctatccgaaggctgtggaaaggtcaagtacttttgaaaacaaagcgtctatgcaggaggcgccaccgctgggcagcctgctgaaggatgctcttcacaagcaggccagcgtgcgcgccagcgagggtgcgatgtcggatggcccggtgcctgcggagcaccgccagggtggcggggacttcagacgggcccccgctcctggcaccctccaggatggtctctgccactccctcgacaggggcatctctgggaagggggaaggcacggagaagtcctcccaggccaaggagcttctccgatgtgaaaagttagacagcaagctggccaacatcgattacctccgaaagaaaatgtcacttgaggacaaagaggacaacctctgccctgtgctgaagcccaagatgacagctggctcccacgaatgcctgccagggaacccagtccgacccacgggtgggcagcaggagcccccgccggcttctgagagccgagcttttgtcagcagcacccatgcagctcagatgagtgccgtctcttttgttcccctcaaggccttaacaggccgggtggacagtggaacggagaagcctggcttggttgctcctgagtcccctgttaggaagagcccctccgagtataagctggaaggtaggtctgtctcatgcctgaagccgatcgagggcactctggacattgctctcctgtccggacctcaggcctccaagacagaactgccttccccagagtctgcacagagccccagcccaagtggtgacgtgagggcctctgtgccaccagttctccccagcagcagtgggaaaaagaacgataccaccagtgcaagagagctttctccttccagcttaaagatgaataaatcctacctgctggagccttggttcctgccccccagccgaggtctccagaattcaccagcagtttccctgcctgacccagagttcaagagggacaggaaaggtccccatcctactgccaggagccctggaacagtcatggaaagcaatccccaacagagagagggcagctcccctaaacaccaagaccacaccactgaccccaagcttctgacctgcctggggcagaacctccacagccctgacctggccaggccacgctgcccgctcccacctgaagcttccccctcaagggagaagccaggcctgagggaatcgtctgaaagaggccctcccacagccagaagcgagcgctctgctgcgagggctgacacatgcagagagccctccatggaactgtgctttccagaaactgcgaaaaccagtgacaactccaaaaatctcctctctgtgggaaggacccacccagatttctatacacagacccaggccatggagaaagcatgggcgccgggtgggaaaacgaaccacaaagatggcccaggtgaggcgaggcccccgcccagagacaactcctctctgcactcagctggaattccctgtgagaaggagctgggcaaggtgaggcgtggcgtggaacccaagcccgaagcgcttcttgccaggcggtctctgcagccacctggaattgagagtgagaagagtgaaaagctctccagtttcccatctttgcagaaagatggtgccaaggaacctgaaaggaaggagcagcctctacaaaggcatcccagcagcatccctccgccccctctgacggccaaagacctgtccagcccggctgccaggcagcattgcagttccccaagccacgcttctggcagagagccgggggccaagcccagcactgcagagcccagctcgagcccccaggaccctcccaagcctgttgctgcgcacagtgaaagcagcagccacaagccccggcctgccaccgacggaggcagacaagcccaatggcatgaaacggtccccctcagccactgggcagagttctttccgatccacggccctcccggaaaagtctctgagctgctcctccagcttccctgaaaccagggccggagttagagaggcctctgcagccagcagcgacacctcttctgccaaggccgccgggggcatgctggagcttccagcccccagcaacagggaccataggaaggctcagcctgccggggagggccgaacccacatgacaaagagtgactccctgccctccttccgggtctccaccctgcctctggagtcacaccaccccgacccaaacaccatgggcggggccagccaccgggacagggctctctcggtgactgccaccgtaggggaaaccaaagggaaggaccctgccccagcccagcctcccccagctaggaaacagaacgtgggcagagacgtgaccaagccatccccagccccaaacactgaccgccccatctctctttctaatgagaaggactttgtggtacggcagaggcgggggaaagagagtttgcgtagcagccctcacaaaaaggccttgtaacggggagggcccaggggcaggactgtggagacccgtcctgaacgggcgactgtgtcttgactacctttcaaaaccagcactgtgtgggaatgtccgccaggcagagctcggagcctcattgagacaggggagagagaaagacaaagaggggaccttcttccagatgccttcccagttgtaaccggtaaaactgttaccagatagtgtatggtcggacttaggtccccaggtt

SEQ ID NO: 414762 - DNA, 2143 bp, Homo sapiens
  misc_feature (22)..(22): n is a, c, g, or t
agctcggtttcccttttggggnctttgctggaacggagaagcctggcttggttgctcctgagtcccctgttaggaagagcccctccgagtataagctggaaggtaggtctgtctcatgcctgaagccgatcgagggcactctggacattgctctcctgtccggacctcaggcctccaagacagaactgccttccccagagtctgcacagagccccagcccaagtggtgacgtgagggcctctgtgccaccagttctccccagcagcagtgggaaaaagaacgataccaccagtgcaagagagctttctccttccagcttaaagatgaataaatcctacctgctggagccttggttcctgccccccagccgaggtctccagaattcaccagcagtttccctgcctgacccagagttcaagagggacaggaaaggtccccatcctactgccaggagccctggaacagtcatggaaagcaatccccaacagagagagggcagctcccctaaacaccaagaccacaccactgaccccaagcttctgacctgcctggggcagaacctccacagccctgacctggccaggccacgctgcccgctcccacctgaagcttccccctcaagggagaagccaggcctgagggaatcgtctgaaagaggccctcccacagccagaagcgagcgctctgctgcgagggctgacacatgcagagagccctccatggaactgtgctttccagaaactgcgaaaaccagtgacaactccaaaaatctcctctctgtgggaaggacccacccagatttctatacacagacccaggccatggagaaagcatgggcgccgggtgggaaaacgaaccacaaagatggcccaggtgaggcgaggcccccgcccagagacaactcctctctgcactcagctggaattccctgtgagaaggagctgggcaaggtgaggcgtggcgtggaacccaagcccgaagcgcttcttgccaggcggtctctgcagccacctggaattgagagtgagaagagtgaaaagctctccagtttcccatctttgcagaaagatggtgccaaggaacctgaaaggaaggagcagcctctacaaaggcatcccagcagcatccctccgccccctctgacggccaaagacctgtccagcccggctgccaggcagcattgcagttccccaagccacgcttctggcagagagccgggggccaagcccagcactgcagagcccagctcgagcccccaggaccctcccaagcctgttgctgcgcacagtgaaagcagcagccacaagccccggcctgccaccgacggaggcagacaagcccaatggcatgaaacggtccccctcagccactgggcagagttctttccgatccacggccctcccggaaaagtctctgagctgctcctccagcttccctgaaaccagggccggagttagagaggcctctgcagccagcagcgacacctcttctgccaaggccgccgggggcatgctggagcttccagcccccagcaacagggaccataggaaggctcagcctgccggggagggccgaacccacatgacaaagagtgactccctgccctccttccgggtctccaccctgcctctggagtcacaccaccccgacccaaacaccatgggcggggccagccaccgggacagggctctctcggtgactgccaccgtaggggaaaccaaagggaaggaccctgccccagcccagcctcccccagctaggaaacagaacgtgggcagagacgtgaccaagccatccccagccccaaacactgaccgccccatctctctttctaatgagaaggactttgtggtacggcagaggcgggggaaagagagtttgcgtagcagccctcacaaaaaggccttgtaacggggagggcccaggggcaggactgtggagacccgtcctgaacgggcgactgtgtcttgactacctttcaaaaccagcactgtgtgggaatgtccgccaggcagagctcggagcctcattgagacaggggagagagaaagacaaagaggggaccttcttccagatgccttcccagttgtaaccggtaaaactgttaccagatagtgtatggtcggacttaggtccccaggtt

SEQ ID NO: 414763 - DNA, 5905 bp, Homo sapiens
ttagagtgcctggaatttgatccggaagaattttactacctattggaagcagcagaaggccatgccaaagaaggacagggtattaaaaccgacattcccaggtacatcattagccaactgggactcaataaggatcccttggaagaaatggctcatttgggaaactacgatagtgggacagcagaaacaccagaaacagatgaatcagtgagtagctctaatgcctccctgaaacttcgaaggaaacctcgggaaagtgattttgaaacgattaaattgattagcaatggagcctatggggcagtctactttgttcggcataaagaatcccggcagaggtttgccatgaagaagattaataaacagaacctcatccttcgaaaccagatccagcaggcctttgtggagcgggatatcctgacttttgcagaaaacccctttgttgtcagcatgtattgctcctttgaaacaaggcgccacttgtgcatggtcatggaatatgtggaagggggagactgtgctactttaatgaaaaacatgggtcctctccctgttgatatggccagaatgtactttgctgagacggtcttggccttggaatatttacataattatggaattgtacacagggatttgaaaccagacaacttgttggttacctccatggggcacataaagctgacagattttggattatctaaggtgggactaatgagcatgactaccaacctttacgagggtcatattgagaaggatgctagagagttcctggataaacaggtctgtggcacacctgaatacattgcaccagaagtgattctgaggcagggttatggaaagccggtggactggtgggccatggggattatcctctatgaatttctggttggatgcgtgccattctttggggatactccagaggagctatttggacaagtcatcagtgatgagatcaactggcctgagaaggatgaggcacccccacctgatgcccaggatctgattaccttactcctcaggcagaatcccctggagaggctgggaacaggtggtgcatatgaagtcaaacagcatcgattcttccgttctttagactggaacagtttgctgagacagaaggcagaatttattccccaactggaatctgaggatgacacaagttattttgatactcggtctgagaagtatcatcatatggaaacggaggaagaagatgacacaaatgatgaagactttaatgtggaaataaggcagttttcttcatgttcacacaggttttcaaaagttttcagcagtatagatcgaatcactcagaattcagcagaagagaaggaagactctgtggacaaaaccaaaagcaccaccttgccatccacagaaacactgagctggagttcagaatattctgaaatgcaacagctatcaacatccaactcttcagatactgaaagcaacagacataaactcagttctggcctacttcccaaactggctatttcaacagagggagagcaagatgaagctgcctcctgccctggagacccccatgaggagccaggaaagccagcccttcctcctgaagagtgtgcccaggaggagcctgaggtcaccaccccagccagcaccatcagcagctccaccctgtcagttggcagtttttcagagcacttggatcagataaatggacgaagcgagtgtgtggacagtacagataattcctcaaagccatccagtgaacccgcttctcacatggctcggcagcgattagaaagcacagaaaaaaagaaaatctcggggaaagtcacaaagtccctctctgccagtgctctttccctcatgatcccaggagatatgtttgctgtttcccctctgggaagtccaatgtctccccattccctgtcctcggacccttcttcttcacgagattcctctcccagccgagattcctcagcagcttctgccagtccacatcagccgattgtgatccacagttcggggaagaactacggctttaccatccgagccatccgggtgtatgtgggagacagtgacatctatacagtgcaccatatcgtctggaatgtagaagaaggaagtccggcatgccaggcaggactgaaggctggagatcttatcactcacatcaatggagaaccagtgcatggacttgtccacacagaagttatagaactcctactgaagagtgggaataaggtgtcaatcactactaccccatttgaaaacacatcaatcaaaactggaccagccaggagaaacagctataagagccggatggtgaggcggagcaagaaatccaagaagaaagaaagtctcgaaaggaggagatctcttttcaaaaagctagccaagcagccttctcctttactccacaccagccgaagtttctcctgcttgaacagatccctgtcatcgggtgagagcctcccaggttcccccactcatagcttgtctccccggtctccaacaccaagctaccgctccacccctgacttcccatctggtactaattcctcccagagcagctcccctagttctagtgcccccaattccccagcagggtccgggcacatccggcccagcactctccacggtcttgcacccaaactcggcgggcagcggtaccggtccggaaggcgaaagtccgccggcaacatcccactgtccccgctggcccggacgccctctccaaccccgcaacccacctccccgcagcggtcaccatcccctcttctgggacactcactgggcaattccaagatcgcgcaagcctttcccagcaagatgcactccccgcccaccatcgtcagacacatcgtgaggcccaagagtgcggagccccccaggtccccgctgctcaagcgcgtgcagtccgaggagaagctgtcgccctcttacggcagtgacaagaagcacctgtgctcccgcaagcacagcctggaggtgacccaagaggaggtgcagcgggagcagtcccagcgggaggcgccgctgcagagcctggatgagaacgtgtgcgacgtgccgccgctcagccgcgcccggccagtggagcaaggctgcctgaaacgcccagtctcccggaaggtgggccgccaggagtctgtggacgacctggaccgcgacaagctgaaggccaaggtggtggtgaagaaagcagacggcttcccagagaaacaggaatcccaccagaaatcccatggacccgggagtgatttggaaaactttgctctgtttaagctggaagagagagagaagaaagtctatccgaaggctgtggaaaggtcaagtacttttgaaaacaaagcgtctatgcaggaggcgccaccgctgggcagcctgctgaaggatgctcttcacaagcaggccagcgtgcgcgccagcgagggtgcgatgtcggatggcccggtgcctgcggagcaccgccagggtggcggggacttcagacgggcccccgctcctggcaccctccaggatggtctctgccactccctcgacaggggcatctctgggaagggggaaggcacggagaagtcctcccaggccaaggagcttctccgatgtgaaaagttagacagcaagctggccaacatcgattacctccgaaagaaaatgtcacttgaggacaaagaggacaacctctgccctgtgctgaagcccaagatgacagctggctcccacgaatgcctgccagggaacccagtccgacccacgggtgggcagcaggagcccccgccggcttctgagagccgagcttttgtcagcagcacccatgcagctcagatgagtgccgtctcttttgttcccctcaaggccttaacaggccgggtggacagtggaacggagaagcctggcttggttgctcctgagtcccctgttaggaagagcccctccgagtataagctggaaggtaggtctgtctcatgcctgaagccgatcgagggcactctggacattgctctcctgtccggacctcaggcctccaagacagaactgccttccccagagtctgcacagagccccagcccaagtggtgacgtgagggcctctgtgccaccagttctccccagcagcagtgggaaaaagaacgataccaccagtgcaagagagctttctccttccagcttaaagatgaataaatcctacctgctggagccttggttcctgccccccagccgaggtctccagaattcaccagcagtttccctgcctgacccagagttcaagagggacaggaaaggtccccatcctactgccaggagccctggaacagtcatggaaagcaatccccaacagagagagggcagctcccctaaacaccaagaccacaccactgaccccaagcttctgacctgcctggggcagaacctccacagccctgacctggccaggccacgctgcccgctcccacctgaagcttccccctcaagggagaagccaggcctgagggaatcgtctgaaagaggccctcccacagccagaagcgagcgctctgctgcgagggctgacacatgcagagagccctccatggaactgtgctttccagaaactgcgaaaaccagtgacaactccaaaaatctcctctctgtgggaaggacccacccagatttctatacacagacccaggccatggagaaagcatgggcgccgggtgggaaaacgaaccacaaagatggcccaggtgaggcgaggcccccgcccagagacaactcctctctgcactcagctggaattccctgtgagaaggagctgggcaaggtgaggcgtggcgtggaacccaagcccgaagcgcttcttgccaggcggtctctgcagccacctggaattgagagtgagaagagtgaaaagctctccagtttcccatctttgcagaaagatggtgccaaggaacctgaaaggaaggagcagcctctacaaaggcatcccagcagcatccctccgccccctctgacggccaaagacctgtccagcccggctgccaggcagcattgcagttccccaagccacgcttctggcagagagccgggggccaagcccagcactgcagagcccagctcgagcccccaggaccctcccaagcctgttgctgcgcacagtgaaagcagcagccacaagccccggcctggccctgacccgggccctccaaagactaagcaccccgaccggtccctctcctctcagaaaccaagtgtcggggccacaaagggcaaagagcctgccactcagtccctcggtggctctagcagagaggggaagggccacagtaagagtgggccggatgtgtttcctgctaccccaggctcccagaacaaagccagcgatgggattggccagggagaaggtgggccctctgtcccactgcacactgacagggctcctctagacgccaagccacaacccaccagtggtgggcggcccctggaggtgctggagaagcctgtgcatttgccaaggccgggacacccagggcctagtgagccagcggaccagaaactgtccgctgttggtgaaaagcaaaccctgtctccaaagcaccccaaaccatccactgtgaaagatcgccccatctctctttctaatgagaaggactttgtggtacggcagaggcgggggaaagagagtttgcgtagcagccctcacaaaaaggccttgtaacggggagggcccaggggcaggactgtggagacccgtcctgaacgggcgactgtgtcttgactacctttcaaaaccagcactgtgtgggaatgtccgccaggcagagctcggagcctcattgagacaggggagagagaaagacaaagaggggaccttcttccagatgccttcccagttgtaaccggtaaaactgttaccagatagtgtatggtcggacttaggtccccaggtt

SEQ ID NO: 414764 - DNA, 2462 bp, Homo sapiens
  misc_feature (1)..(1): n is a, c, g, or t
  misc_feature (3)..(3): n is a, c, g, or t
ngnaacgtagctttttatagtttttgatccatgtcataaatttggctatgacaaaggggatattccgtctttaactctctggcaagaacattagctattttccagccctaaaaagtttggtccttagtgttctttgtaatgcaccaaagggccagatttctatcttcagaaggacaggctgtgtttgggtatatgtacatacattcacctgtatttgtgagtgtgtagtcaatgtgtgtgggttgattgtgagtagttttctttgaacttttagagaaagaaaaatattacaaatcccaagtcccagattgtagcatcattgtcagaattccaaaaattgcaaagctgaatgaatgaggaagataacagccttacaaaacacaatgacttggttactaaatgcccctttccactggatgttgttagaaaaagtatattttatcctattttgtttcgcttagcgtaattataaattttcaaattttaagggtgagaaggaatgaccaacagggaaagtaatcctctcattagctcagagcaatgaattttggctttgaaacttacattttaaaagagggttatccttgttcagaattttcatgtaaagtcctttttttgtaaaatacctacatatacgtgtgggtgtatacagcccctcccccacatacacacacacatacatatatatgtgacaagtattaacatcagtgccagacttgaacattttatccctaatgccttctctcaactctgccagtgagtgagtgtttgttttgttttttcttcaacagtattgaaaggaaaaggaattttttgaattagataactataaggaaatttactaaaggaataatgttttattgctataatggaagtacataattataaccataatgttttaagtttattcctgattttttggcattcttcgacaacaaaaacttttaaacttaaaataagctaatagatttatgtttcttcaatttaaatttcagtgtgtatccaatgttttagagcagtgattgaaaagaaagaactgtaattacaggaaaaataattcaccaccagaacaccttaatttttttttttttttttttttttgcgacagagtcttgctctgtcgccaagccagagtgcagtggtgtgatctcagttcactgcaagctccgcctcctcgtttcaagtgatcctcctgcctcagcttcctgagtaggtgggattacaagcatgcaccaccatgcccagctaatttttatatttttagtaactagtagttctttaactttcatgaacacaatcatcacttagtggtggtgagtgacttgttaaatatccaagtttcttgatgcagagactcagtaggtctggaatgcggcccaggaatgtaaatttaaaatataactttctccttttcccactgatgccattggtccttttctcaattttgagaaaacactgctttagatcttatgaaaaaatgtcttggacaaagggagttagacttattcatgccccagttcgtttccttgttagggagtatcttcacacactcatagaaaatgtgtgctcctttcaaagaccatggagccctcttcaatgcaagtattcctgtgttgacttgacaagcaactggagaaaatgttataaaaaattttaaatatcagagggatgattaaattaagttagcttcaaggtcacttccaactttgacctttattccatgaatcctgtatatgttcagtattaattctttttttttaaagtaaatatcagaaaagggaaaggggatgataaagcagtgagttgtctgttttgtgtctttgattttcttaaacaacatatggttgaggactaacattagacacctgtgtgtagtggcctctgattgcttggggttgaaataagctgtctcttcaatcattgcatgcattttttagtatataggtactctagcaaaatatgtattcttttagaatgcacacatttttagtttacatacatagcatggtattatatatcacattctgttctgtactttccattgaccattatgactttaaaatcaatttacattgcaatgcataattgaatctgcagcatctacctgctccacaatctccataaagcgcatcctttacattgtacctatttgttctccaagagatgaaggggtttccaggttccctccaattcctcaccagcaaaaaagatgctaagatgaacatcctcttacatatctcctgatggacctgcacacatcaatttccaggcatataaaaacaaactttaacaaagagaaatctattggggtttcaaattttctgtgtctcttagaaacactgaaaagtcgatttatgataaccttatggaaaatgtagcttactccttgaaataattggtattaatagaattcacccattctcccctgtagcactttctagagtcagaacctgatttaaaca

SEQ ID NO: 414765 - DNA, 461 bp, Homo sapiens
aaagtaacacgactttcaaatatgtgggttctgacatcaattcagtacctaatttccactctctccactttgactgccagtgcccatagtaagggaaaccagctcttggaataggaaataatgggggcagtttttcttcccacaagatcttaggttacattgatcatcacttgagattgcatgaatgttcttgctgtaatggcaaaaacatagacttaggaaagagaaaggagggggtgtctaccatcaggaatagtaatagccctccaaaggcagtgtggtctcccagctatgcagagaccaagaataaccagcaggcaggaatatggcagtggtgacaggctggatagagctttctccaaccaaaagatggggctccttcatgggcaatgtgcttttccctcttctggcacctcaacaactgaagagagtgggtgccactaaatgcactggcaataagg

SEQ ID NO: 414766 - DNA, 898 bp, Homo sapiens
  misc_feature (23)..(23): n is a, c, g, or t
  misc_feature (33)..(33): n is a, c, g, or t
  misc_feature (36)..(36): n is a, c, g, or t
gtgaagaaagtgggtctcatatncatgactggngangcataaagataatctctgttacctgattgcttgagccaggaagtcaaggcttcagtgagccgacatcactccattgcactccagcctgggcagcagagtgagactctgtctcaaataaataaataaacaaataaaagaaaagacaaatattaaattgtttagtggacacaggagacaacattgttctatttgattatctactgcccagtcagcttccttgggcactcaaccaacaggtaacagagattatctttatgcttcaccagtcatatatatgagacccactttcttcacacccctgccaatatattggatattgtcagactgtagatatttttgccaatcttaaagatgaaaatggtagagaattacttttttctgtgaatttttctgactactgttggattcgagtggttttcatatgctattagccatatgggttttcttttatggagagagaattccaggaatgcaagattggttaaaggaaaaaagtctatcagtgaatgttgccctgttaataatgaattaagcaaaaaaaaaaaaaaaaaaaatcttctcattagatgtagaaaaacatgcaataaaattcagtatacttccagcatagaaactcttattaaactaaaaaatagaagagggaagtaagtattgttgaccaaaacccattcaccctatctgaaactttatatttaatggtaaaattaaaatacattctctttaatgtcaggaattgtctttggatgtcctagtcaatatttcaagacatgagcattcaataagatgtattagaaattaaaaggaaaataaaataattgaaataataaagagttcacttatattgctcagtacaaggtcagta

SEQ ID NO: 414767 - DNA, 2619 bp, Homo sapiens
gacagtcattcagatgtttggcattgttgtagcagggctactgccagtgtgggggaaaatgctataaatccacttctttgattgccatggatttgaaagaaccatttgcccaacagcatgattcgcctctgaaagtctaaaaataattttcaatttttccatgaaggtgtgtggagggtagacacacagcctacgcataggtctgcatgacatgttttttctttttctttctttttttttttttttttttttttagacggagctttgctctttgttgcccaggctggagtgcagtggtgcaatcttagctcactgcaacctctgcctcccggtttttcaagcgattcttctgtctcagcctcccaagtagctggaattacaggagcccgccaccttgcccagctaatttttgtatttttagtagagacggggtttcaccatgttggccaggctggtcttgaactcctgacctcgtgatccacctgcctcggcttcccaaagtgctgggattacaggaatgagccactgtgccagctgacacgttttttcttttgtgtgaattttatgttctagttttgggacaagggtaatcagttcttgactagtgaacaaatgagagaacatttaccccttactcattttacacatgcaggtcagcagaagccctagagttggttggcacagtcgcagttgactgagcatagaggaaacaggtctttttacattctctctcatcactggagctcagttgaactctaagaccttagcactcaaagagtctgaaaagaaatgagggagaggctaaatttaagctctccactcccacagaaaggacagggcaccctacaatctaaaagccagtgaggcagcctatcatctgtttcacatctgttctgaaagggatagtttaatgcaagaagtaagaggcctgtagtgactgtaaactcatgaaatgtgcacattggttatctgtgcacatttccacttgcaccataacataagaaagcgtacatggagtgtaattacttccagaagccccgtctaaccaacctattcagatgtggcacactttctgtcataaatgagagaccacacgtagagctcggtcaccaaggaatgcccaacatccctttacctctcacaatgagcagccacgctcaccgggaagcagtgtggggacttcagtggggtgtcccttagtggagaacacctttcatcatttttatagagacaattcccttgagaatgtaggcttttcatcttaggaacaattaggaagaatctccagctgggagtgttcttatgtatacagaaacaatgggtcgcattggttcatacttaggtgatattaggtttggctatattgatgtttggtgccacttaccttctagattttcccaaaagttgggtcattgctatgggaaattggggcctgcagatgggggagaaatgatcattattggtgcagggaaggggttcaggcagagctggagtctgaggctcagtgtgagaaagcactggcagttttctagtagagtcaggtcctgggctcctctcctcacccactgtgtcccgaactgaggccagctgtgatcggcaaattgcttatctctaggtagtttaaagaaaacgtaagagtttggggggtggtgggagaataactgtagaaagaccctaaactcttctctcccccagcaaattatcttgtataatgtttaaaaacccaaaggccagatctccccttttaacgtgaatcagaaggaggatggcaattggaccaagggcagagtggccacacttgaaacacattataaaatgggaatatatttcagggaaccccacccccacacttccactccacctcacacctgttggtcctgctttgtgggtgattgattgatacccaaggactgccccacctttaaattcctgcaatttatgctgcaaccaacatcttagtgtttgctctctccgggaagaggccaggtgggggagaacatacggtccagagcctgagatcgcctggctggggtgcaggcaagcaggaacccagtctagatagaatgcagtgttctctaaagctatggatggtttcagtgaaatgtctgtgtctgacaatcgtcacgcaagagtacttactgtcttcccttgtacatacattgtctgtgtttagcttttcctagtattgtgaggtttcaaataggggttccatgtaaatactctttctgctactgaaatgccggcccccttgagtatgcatcacccccacagatggttttgcctttctctatgctaacactttttgagccactgacgtgcagatcggtggttagtttcttgggcttttattttgcaattttatatatatacacatattattatatatatatatatatttatgggttggttttgtatagttttctgtttgaatctctgagcaccaaagctgccctttgattttcacgagaactttccaaagccacttcctgagccctcctgctgctttggtgtctgacggtgatgctgcggtggcatctctgcccgtgaatttctgtatgtgtgtgctgttacctcacctgcagacatgaccctagtaaatctaacgtgcttggcttccca

SEQ ID NO: 414768 - DNA, 436 bp, Homo sapiens
actggtatatggatgtgtgggaaatacttccgtaataatgaactgtgctgagttcgtggagcattaaaaagtgcttcggttcaagctattctattccaccttttcaaaaggtgggttcttccctgaaccattgcatagtgagaagtttagtatctacaaaaggtgtggtgtttcgtggttttgcatcttgtttgatcttcacactggacagtagcaactataaattttaaaaagttttctttctaaaattactctggaagcttacatgcagatgaccattgctctgctccaccacctttgctggccccctacagcctctgcaatgctctctccattcattagccattcattaggctcctcccaccctgacttcacccatttaattgttcccctctctaaaggtccatttaaaatgtgatcttctctctcatactgc

SEQ ID NO: 414769 - DNA, 1716 bp, Homo sapiens
gagctccgcccccaagcgggcgccccaggctggtgccggccgcgtccctggccagccggagcaagcctgactcgtgcagccgccggccgcgtcctggccaggcggagcgagcctcactcccgcagccgccagtctggttccaggctcccgcaggtttcgggggccgaggcggaccgacaggcgccagccaatcgcgagcacggagccggcctgggggcggggtggtacccgctccgccaatcgggtgggggcggagccagacgccgggggcggacgggaggaccggaggaccgaggacagaaagattggtggacaggagcagcggccggtggggagggcgctcggcggcggcctgcggccatggccaccgtgatggcagcgacggcggcggagcgggcggtgctggaggaggagttccgctggctgctgcacgacgaggtgcacgctgtgttgaagcagctgcaggacatcctcaaggaggcctctctgcgcttcactctgccgggctccggcactgaggggcccgccaagcaagagaacttcatcctaggcagctgtggcacagaccaggtgaagggtgtgctgactctgcagggggatgccctcagccaggcggatgtgaacctgaagatgccccggaacaaccagctgctgcacttcgccttccgggaggacaagcagtggaagctgcagcagatccaggatgccagaaaccatgtgagccaagccatttacctgcttaccagccgggaccagagctaccagttcaagacgggcgctgaggtcctcaagctgatggacgcagtgatgctgcagctgaccagagcccgaaaccggctcaccacccccgccaccctcaccctccccgagatcgccgccagcggcctcacgcggatgttcgcccctgccctgccgtccgacctgctggtcaacgtctacatcaacctcaacaagctctgcctcacggtgtaccagctgcatgccctgcagcccaactccaccaagaacttccgcccagctgggggcgcggtgctgcatagccctggggccatgttcgagtggggctctcagcgcctggaggtgagccacgtgcacaaagtggagtgcgtgatcccctggctcaacgacgccctggtctacttcaccgtctccctgcagctctgccagcagctcaaggacaagatctccgtgttctccagctactggagctacagacccttctgatcacagcacccaggagcttgtctccaggaaggcggccccgtcccctactcatacccaccacagagcaccagccagtgccaacgccaggctgctatttatctccctatcccaccccctaccccacctaacacatttgcactgccgggaatggacactggaagtgccaggaggaaggaaggctggtttggtggggtagtggggaggtcagggaggcggggccaagggtgtcccacattcccaacaccgccctctgatcaccatgggaatctttggactcaggacagggccaggcgcagggctctccctcctctccccttcgctgtcccctccccctggagggcatggtgtcggggggtggcactgagctatgagtcccggggatggtgaggaacgccacagacagagccaccctaggagtgagtatagtgctggtgactgtgtttcatagccccagtccagggctgtctaagaaataaagatcatcagactcca

SEQ ID NO: 414770 - DNA, 813 bp, Homo sapiens
  misc_feature (562)..(562): n is a, c, g, or t
  misc_feature (566)..(566): n is a, c, g, or t
  misc_feature (588)..(588): n is a, c, g, or t
  misc_feature (607)..(607): n is a, c, g, or t
  misc_feature (609)..(609): n is a, c, g, or t
  misc_feature (616)..(616): n is a, c, g, or t
  misc_feature (638)..(638): n is a, c, g, or t
  misc_feature (648)..(648): n is a, c, g, or t
  misc_feature (670)..(670): n is a, c, g, or t
  misc_feature (673)..(673): n is a, c, g, or t
  misc_feature (676)..(676): n is a, c, g, or t
  misc_feature (687)..(688): n is a, c, g, or t
  misc_feature (701)..(701): n is a, c, g, or t
  misc_feature (704)..(704): n is a, c, g, or t
  misc_feature (710)..(710): n is a, c, g, or t
  misc_feature (713)..(713): n is a, c, g, or t
  misc_feature (717)..(717): n is a, c, g, or t
  misc_feature (728)..(728): n is a, c, g, or t
  misc_feature (737)..(737): n is a, c, g, or t
  misc_feature (741)..(742): n is a, c, g, or t
  misc_feature (747)..(748): n is a, c, g, or t
  misc_feature (766)..(766): n is a, c, g, or t
  misc_feature (777)..(777): n is a, c, g, or t
  misc_feature (786)..(786): n is a, c, g, or t
gagctccgcccccaagcgggcgccccaggctggtgccggccgcgtccctggccagccggagcaagcctgactcgtgcagccgccggccgcgtcctggccaggcggagcgagcctcactcccgcagccgccagtctggttccaggctcccgcaggtttcgggggccgaggcggaccgacaggcgccagccaatcgcgagcacggagccggcctgggggcggggtggtacccgctccgccaatcgggtgggggcggagccagacgccgggggcggacgggaggaccggaggaccgaggacagaaagattggtggacaggagcagcggccggtggggagggcgctcggcggcggcctgcggccatggccaccgtgatggcagcgacggcggcggagcgggcggtgctggaggaggagttccgctggctgctgcacgacgaggtgcacgctgtgttgaagcagctgcaggacatcctcaaggaggcctctctgcgcttcactctgccgggctccggcactgaggggcccgccaagcaagagaacttcatcctaggcagctgtggtncatntttttcacataccattttaatntttttcttactcttcattntntattccntcatctcattcttattttaacnttaatattcnccttaacaaccatttttttcanttntcnttcctttattnnaatcattttaatnttnttcatnttnattnttccatatacnattttatcnaatnnatttnntttcttaccatcctttancatatttaccntttcaatantttttcttatttcctcaatttttttta

SEQ ID NO: 414771 - DNA, 1737 bp, Homo sapiens
gagctccgcccccaagcgggcgccccaggctggtgccggccgcgtccctggccagccggagcaagcctgactcgtgcagccgccggccgcgtcctggccaggcggagcgagcctcactcccgcagccgccagtctggttccaggctcccgcaggtttcgggggccgaggcggaccgacaggcgccagccaatcgcgagcacggagccggcctgggggcggggtggtacccgctccgccaatcgggtgggggcggagccagacgccgggggcggacgggaggaccggaggaccgaggacagaaagattggtggacaggagcagcggccggtggggagggcgctcggcggcggcctgcggccatggccaccgtgatggcagcgacggcggcggagcgggcggtgctggaggaggagttccgctggctgctgcacgacgaggtgcacgctgtgttgaagcagctgcaggacatcctcaaggaggcctctctgcgcttcactctgccgggctccggcactgaggggcccgccaagcaagagaacttcatcctaggcagctgtggcacagaccaggtgaagggtgtgctgactctgcagggggatgccctcagccaggcggatgtgaacctgaagatgccccggaacaaccagctgctgcacttcgccttccgggaggacaagcagtggaagctgcagcagatccaggatgccagaaaccatgtgagccaagccatttacctgcttaccagccgggaccagagctaccagttcaagacgggcgctgaggtcctcaagctgatggacgcagtgatgctgcagctgaccagagcccgaaaccggctcaccacccccgccaccctcaccctccccgagatcgccgccagcggcctcacgcggatgttcgcccctgccctgccgtccgacctgctggtcaacgtctacatcaacctcaacaagctctgcctcacggtgtaccagctgcatgccctgcagcccaactccaccaagaacttccgcccagctgggggcgcggtgctgcatagccctggggccatgttggaccctctcactgcccacagcgagtggggctctcagcgcctggaggtgagccacgtgcacaaagtggagtgcgtgatcccctggctcaacgacgccctggtctacttcaccgtctccctgcagctctgccagcagctcaaggacaagatctccgtgttctccagctactggagctacagacccttctgatcacagcacccaggagcttgtctccaggaaggcggccccgtcccctactcatacccaccacagagcaccagccagtgccaacgccaggctgctatttatctccctatcccaccccctaccccacctaacacatttgcactgccgggaatggacactggaagtgccaggaggaaggaaggctggtttggtggggtagtggggaggtcagggaggcggggccaagggtgtcccacattcccaacaccgccctctgatcaccatgggaatctttggactcaggacagggccaggcgcagggctctccctcctctccccttcgctgtcccctccccctggagggcatggtgtcggggggtggcactgagctatgagtcccggggatggtgaggaacgccacagacagagccaccctaggagtgagtatagtgctggtgactgtgtttcatagccccagtccagggctgtctaagaaataaagatcatcagactcca

SEQ ID NO: 414772 - DNA, 2587 bp, Homo sapiens
gagctccgcccccaagcgggcgccccaggctggtgccggccgcgtccctggccagccggagcaagcctgactcgtgcagccgccggccgcgtcctggccaggcggagcgagcctcactcccgcagccgccagtctggttccaggctcccgcaggtttcgggggccgaggcggaccgacaggcgccagccaatcgcgagcacggagccggcctgggggcggggtggtacccgctccgccaatcgggtgggggcggagccagacgccgggggcggacgggaggaccggaggaccgaggacagaaagattggtggacaggagcagcggccggtggggagggcgctcggcggcggcctgcggccatggccaccgtgatggcagcgacggcggcggagcgggcggtgctggaggaggagttccgctggctgctgcacgacgaggtgcacgctgtgttgaagcagctgcaggacatcctcaaggaggcctctctgcgcttcactctgccgggctccggcactgaggggcccgccaagcaagagaacttcatcctaggcagctgtgggggtgagcctgggctaggcggaaaccggggaaatgggtaccttggggggtaggaggcatggccatagccctgtcctgcagaccagctggttgtgcgatgggacaggaggggcagcccgccgggagggagggctgggtggtgggggggtgaccacaggcaccgctctgacgccacatgttacagcacagaccaggtgaagggtgtgctgactctgcagggggatgccctcagccaggcggtgagtcccccggccctgtcccctcccatcctgccaatggggaagagcatgggagctcccactttctctctgtacaagccctgcgactctgggcgggacccttgatctctctggcctcagttttctcctttggaaaatgacagcaaccctcacaccttctcccgggatcggtgtgcagattcagtaagaggtgcaggagaggggttctttgcacacggcctggcctggcgtccggaccagtgaaacatgggcattggtggattaggctggccacacatcacagttgaatcagccaatgcctgaactccagtctgcacccgactctgtgccaggcaccaaggcgtggggggaggcccccctcctgggctccatctgttgccctttgtagacactagatgcaccccgttcgcacagagcctcacagaggctgcctttcctcttccccttcccctttcttcacctctttccatttcacttctttgtggctcttcttgggcctggtttcctgtttcctgacctccctgttcaacccccaaacggccaaggcattgggagaccctctgccctatacagcggccaaggcctgaaccaccacacaccccatttctgccctgggcttaagggctcagagtggctgtggcaggaggtgcccccccactgcccagctcaccccactcttgcctgtcaggatgtgaacctgaagatgccccggaacaaccagctgctgcacttcgccttccgggaggacaagcagtggaagctgcagcagatccaggatgccagaaaccatgtgagccaagccatttacctgcttaccagccgggaccagagctaccagttcaagacgggcgctgaggtcctcaagctgatggacgcagtgatgctgcagctgaccagagcccgaaaccggctcaccacccccgccaccctcaccctccccgagatcgccgccagcggcctcacgcggatgttcgcccctgccctgccgtccgacctgctggtcaacgtctacatcaacctcaacaagctctgcctcacggtgtaccagctgcatgccctgcagcccaactccaccaagaacttccgcccagctgggggcgcggtgctgcatagccctggggccatgttcgagtggggctctcagcgcctggaggtgagccacgtgcacaaagtggagtgcgtgatcccctggctcaacgacgccctggtctacttcaccgtctccctgcagctctgccagcagctcaaggacaagatctccgtgttctccagctactggagctacagacccttctgatcacagcacccaggagcttgtctccaggaaggcggccccgtcccctactcatacccaccacagagcaccagccagtgccaacgccaggctgctatttatctccctatcccaccccctaccccacctaacacatttgcactgccgggaatggacactggaagtgccaggaggaaggaaggctggtttggtggggtagtggggaggtcagggaggcggggccaagggtgtcccacattcccaacaccgccctctgatcaccatgggaatctttggactcaggacagggccaggcgcagggctctccctcctctccccttcgctgtcccctccccctggagggcatggtgtcggggggtggcactgagctatgagtcccggggatggtgaggaacgccacagacagagccaccctaggagtgagtatagtgctggtgactgtgtttcatagccccagtccagggctgtctaagaaataaagatcatcagactcca

SEQ ID NO: 414773 - DNA, 3128 bp, Homo sapiens
gagctccgcccccaagcgggcgccccaggctggtgccggccgcgtccctggccagccggagcaagcctgactcgtgcagccgccggccgcgtcctggccaggcggagcgagcctcactcccgcagccgccagtctggttccaggctcccgcaggtttcgggggccgaggcggaccgacaggcgccagccaatcgcgagcacggagccggcctgggggcggggtggtacccgctccgccaatcgggtgggggcggagccagacgccgggggcggacgggaggaccggaggaccgaggacagaaagattggtggacaggagcagcggccggtggggagggcgctcggcggcggcctgcggccatggccaccgtgatggcagcgacggcggcggagcgggcggtgctggtaaggcgcgcgggccagcgggcgggccggcggggcggcggggccgggcgcgaccgccgggtctgtcccgcaggaggaggagttccgctggctgctgcacgacgaggtgcacgctgtgttgaagcagctgcaggacatcctcaaggtaacgacccgcgccctgccccgccgggcgtggcggccctccctcctcatttccctggctccacctggggccgcgcggctgcgtcctgagcgcctacagtgtgcggctgccgcggctttcaggcagggccccgcctccgcgaactcgagccgacctcattatataagtacctgtgtgcgggcaggggcgggtcccgacgagggtgctagcaagggcctgagtcccgcccggcctcgggtcggggaaggccgccttgggagcagcggcatccaatctgggagccgaagaattctgcctctgcctggcagtgtgacttcagccaagtcactgaacctccctgggcctcccttttctcattggcaaaagggagataacagtacccgcttcgcgaggctggggtgtagataaatgagccaggcagctcacagaagtaaccggcgtagtgcttgctgtggcccaggaccgcgggaggcctctctgcgcttcactctgccgggctccggcactgaggggcccgccaagcaagagaacttcatcctaggcagctgtgggggtgagcctgggctaggcggaaaccggggaaatgggtaccttggggggtaggaggcatggccatagccctgtcctgcagaccagctggttgtgcgatgggacaggaggggcagcccgccgggagggagggctgggtggtgggggggtgaccacaggcaccgctctgacgccacatgttacagcacagaccaggtgaagggtgtgctgactctgcagggggatgccctcagccaggcggtgagtcccccggccctgtcccctcccatcctgccaatggggaagagcatgggagctcccactttctctctgtacaagccctgcgactctgggcgggacccttgatctctctggcctcagttttctcctttggaaaatgacagcaaccctcacaccttctcccgggatcggtgtgcagattcagtaagaggtgcaggagaggggttctttgcacacggcctggcctggcgtccggaccagtgaaacatgggcattggtggattaggctggccacacatcacagttgaatcagccaatgcctgaactccagtctgcacccgactctgtgccaggcaccaaggcgtggggggaggcccccctcctgggctccatctgttgccctttgtagacactagatgcaccccgttcgcacagagcctcacagaggctgcctttcctcttccccttcccctttcttcacctctttccatttcacttctttgtggctcttcttgggcctggtttcctgtttcctgacctccctgttcaacccccaaacggccaaggcattgggagaccctctgccctatacagcggccaaggcctgaaccaccacacaccccatttctgccctgggcttaagggctcagagtggctgtggcaggaggtgcccccccactgcccagctcaccccactcttgcctgtcaggatgtgaacctgaagatgccccggaacaaccagctgctgcacttcgccttccgggaggacaagcagtggaagctgcagcagatccaggatgccagaaaccatgtgagccaagccatttacctgcttaccagccgggaccagagctaccagttcaagacgggcgctgaggtcctcaagctgatggacgcagtgatgctgcagctgaccagagcccgaaaccggctcaccacccccgccaccctcaccctccccgagatcgccgccagcggcctcacgcggatgttcgcccctgccctgccgtccgacctgctggtcaacgtctacatcaacctcaacaagctctgcctcacggtgtaccagctgcatgccctgcagcccaactccaccaagaacttccgcccagctgggggcgcggtgctgcatagccctggggccatgttcgagtggggctctcagcgcctggaggtgagccacgtgcacaaagtggagtgcgtgatcccctggctcaacgacgccctggtctacttcaccgtctccctgcagctctgccagcagctcaaggacaagatctccgtgttctccagctactggagctacagacccttctgatcacagcacccaggagcttgtctccaggaaggcggccccgtcccctactcatacccaccacagagcaccagccagtgccaacgccaggctgctatttatctccctatcccaccccctaccccacctaacacatttgcactgccgggaatggacactggaagtgccaggaggaaggaaggctggtttggtggggtagtggggaggtcagggaggcggggccaagggtgtcccacattcccaacaccgccctctgatcaccatgggaatctttggactcaggacagggccaggcgcagggctctccctcctctccccttcgctgtcccctccccctggagggcatggtgtcggggggtggcactgagctatgagtcccggggatggtgaggaacgccacagacagagccaccctaggagtgagtatagtgctggtgactgtgtttcatagccccagtccagggctgtctaagaaataaagatcatcagactcca

SEQ ID NO: 414774 - DNA, 2202 bp, Homo sapiens
gagctccgcccccaagcgggcgccccaggctggtgccggccgcgtccctggccagccggagcaagcctgactcgtgcagccgccggccgcgtcctggccaggcggagcgagcctcactcccgcagccgccagtctggttccaggctcccgcaggtttcgggggccgaggcggaccgacaggcgccagccaatcgcgagcacggagccggcctgggggcggggtggtacccgctccgccaatcgggtgggggcggagccagacgccgggggcggacgggaggaccggaggaccgaggacagaaagattggtggacaggagcagcggccggtggggagggcgctcggcggcggcctgcggccatggccaccgtgatggcagcgacggcggcggagcgggcggtgctggtaaggcgcgcgggccagcgggcgggccggcggggcggcggggccgggcgcgaccgccgggtctgtcccgcaggaggaggagttccgctggctgctgcacgacgaggtgcacgctgtgttgaagcagctgcaggacatcctcaaggtaacgacccgcgccctgccccgccgggcgtggcggccctccctcctcatttccctggctccacctggggccgcgcggctgcgtcctgagcgcctacagtgtgcggctgccgcggctttcaggcagggccccgcctccgcgaactcgagccgacctcattatataagtacctgtgtgcgggcaggggcgggtcccgacgagggtgctagcaagggcctgagtcccgcccggcctcgggtcggggaaggccgccttgggagcagcggcatccaatctgggagccgaagaattctgcctctgcctggcagtgtgacttcagccaagtcactgaacctccctgggcctcccttttctcattggcaaaagggagataacagtacccgcttcgcgaggctggggtgtagataaatgagccaggcagctcacagaagtaaccggcgtagtgcttgctgtggcccaggaccgcgggaggcctctctgcgcttcactctgccgggctccggcactgaggggcccgccaagcaagagaacttcatcctaggcagctgtgggatgtgaacctgaagatgccccggaacaaccagctgctgcacttcgccttccgggaggacaagcagtggaagctgcagcagatccaggatgccagaaaccatgtgagccaagccatttacctgcttaccagccgggaccagagctaccagttcaagacgggcgctgaggtcctcaagctgatggacgcagtgatgctgcagctgaccagagcccgaaaccggctcaccacccccgccaccctcaccctccccgagatcgccgccagcggcctcacgcggatgttcgcccctgccctgccgtccgacctgctggtcaacgtctacatcaacctcaacaagctctgcctcacggtgtaccagctgcatgccctgcagcccaactccaccaagaacttccgcccagctgggggcgcggtgctgcatagccctggggccatgttcgagtggggctctcagcgcctggaggtgagccacgtgcacaaagtggagtgcgtgatcccctggctcaacgacgccctggtctacttcaccgtctccctgcagctctgccagcagctcaaggacaagatctccgtgttctccagctactggagctacagacccttctgatcacagcacccaggagcttgtctccaggaaggcggccccgtcccctactcatacccaccacagagcaccagccagtgccaacgccaggctgctatttatctccctatcccaccccctaccccacctaacacatttgcactgccgggaatggacactggaagtgccaggaggaaggaaggctggtttggtggggtagtggggaggtcagggaggcggggccaagggtgtcccacattcccaacaccgccctctgatcaccatgggaatctttggactcaggacagggccaggcgcagggctctccctcctctccccttcgctgtcccctccccctggagggcatggtgtcggggggtggcactgagctatgagtcccggggatggtgaggaacgccacagacagagccaccctaggagtgagtatagtgctggtgactgtgtttcatagccccagtccagggctgtctaagaaataaagatcatcagactcca

SEQ ID NO: 414775 - DNA, 1436 bp, Homo sapiens
gcagccttccccgcgagcggacgcgggagggccgtctgtctcgcttgttcttatttatgccccccatttcccctgtgtctctgtgtgtctgtgttgtttgctgtgtccgttgttctcgcccgtcctgcctccgcttgaacgcaggttgcccgtctcggtggtgggcgtctaccctgggggcaggtcgctcgagggcggaggcctctctgcgcttcactctgccgggctccggcactgaggggcccgccaagcaagagaacttcatcctaggcagctgtggcacagaccaggtgaagggtgtgctgactctgcagggggatgccctcagccaggcggatgtgaacctgaagatgccccggaacaaccagctgctgcacttcgccttccgggaggacaagcagtggaagctgcagcagatccaggatgccagaaaccatgtgagccaagccatttacctgcttaccagccgggaccagagctaccagttcaagacgggcgctgaggtcctcaagctgatggacgcagtgatgctgcagctgaccagagcccgaaaccggctcaccacccccgccaccctcaccctccccgagatcgccgccagcggcctcacgcggatgttcgcccctgccctgccgtccgacctgctggtcaacgtctacatcaacctcaacaagctctgcctcacggtgtaccagctgcatgccctgcagcccaactccaccaagaacttccgcccagctgggggcgcggtgctgcatagccctggggccatgttcgagtggggctctcagcgcctggaggtgagccacgtgcacaaagtggagtgcgtgatcccctggctcaacgacgccctggtctacttcaccgtctccctgcagctctgccagcagctcaaggacaagatctccgtgttctccagctactggagctacagacccttctgatcacagcacccaggagcttgtctccaggaaggcggccccgtcccctactcatacccaccacagagcaccagccagtgccaacgccaggctgctatttatctccctatcccaccccctaccccacctaacacatttgcactgccgggaatggacactggaagtgccaggaggaaggaaggctggtttggtggggtagtggggaggtcagggaggcggggccaagggtgtcccacattcccaacaccgccctctgatcaccatgggaatctttggactcaggacagggccaggcgcagggctctccctcctctccccttcgctgtcccctccccctggagggcatggtgtcggggggtggcactgagctatgagtcccggggatggtgaggaacgccacagacagagccaccctaggagtgagtatagtgctggtgactgtgtttcatagccccagtccagggctgtctaagaaataaagatcatcagactcca

SEQ ID NO: 414776 - DNA, 1516 bp, Homo sapiens
gagctccgcccccaagcgggcgccccaggctggtgccggccgcgtccctggccagccggagcaagcctgactcgtgcagccgccggccgcgtcctggccaggcggagcgagcctcactcccgcagccgccagtctggttccaggctcccgcaggtttcgggggccgaggcggaccgacaggcgccagccaatcgcgagcacggagccggcctgggggcggggtggtacccgctccgccaatcgggtgggggcggagccagacgccgggggcggacgggaggaccggaggaccgaggacagaaagattggtggacaggagcagcggccggtggggagggcgctcggcggcggcctgcggccatggccaccgtgatggcagcgacggcggcggagcgggcggtgctggaggaggagttccgctggctgctgcacgacgaggtgcacgctgtgttgaagcagctgcaggacatcctcaaggaggcctctctgcgcttcactctgccgggctccggcactgaggggcccgccaagcaagagaacttcatcctaggcagctgtggcacagaccaggtgaagggtgtgctgactctgcagggggatgccctcagccaggcggatgtgaacctgaagatgccccggaacaaccagctgctgcacttcgccttccgggaggacaagcagtggaagctgcagcagatccaggatgccagaaaccatgtgagccaagccatttacctgcttaccagccgggaccagagctaccagttcaagacgggcgctgaggtcctcaagctgatggacgcagtgatgctgcagctgaccagagcccgaaaccggctcaccacccccgccaccctcaccctccccgagatcgccgccagcggcctcacgcggatgttcgcccctgccctgccgtccgacctgctggtcaacgtctacatcaacctcaacaagctctgcctcacggtgtaccagctgcatgccctgcagcccaactccaccaagaacttccgcccagctgggggcgcggtgctgcatagccctggggccatgttcgagtggggctctcagcgcctggaggtgagccacgtgcacaaagtggagtgcgtgatcccctggctcaacgacgccctggtctacttcaccgtctccctgcagctctgccagcagctcaaggacaagatctccgtgttctccagctactggagctacagacccttctgatcacagcacccaggagcttgtctccaggaaggcggccccgtcccctactcatacccaccacagagcaccagccagtgccaacgccaggctgctatttattctccctcctctccccttcgctgtcccctccccctggagggcatggtgtcggggggtggcactgagctatgagtcccggggatggtgaggaacgccacagacagagccaccctaggagtgagtatagtgctggtgactgtgtttcatagccccagtccagggctgtctaagaaataaagatcatcagactcca

SEQ ID NO: 414777 - DNA, 1662 bp, Homo sapiens
gagctccgcccccaagcgggcgccccaggctggtgccggccgcgtccctggccagccggagcaagcctgactcgtgcagccgccggccgcgtcctggccaggcggagcgagcctcactcccgcagccgccagtctggttccaggctcccgcaggtttcgggggccgaggcggaccgacaggcgccagccaatcgcgagcacggagccggcctgggggcggggtggtacccgctccgccaatcgggtgggggcggagccagacgccgggggcggacgggaggaccggaggaccgaggacagaaagattggtggacaggagcagcggccggtggggagggcgctcggcggcggcctgcggccatggccaccgtgatggcagcgacggcggcggagcgggcggtgctggaggaggagttccgctggctgctgcacgacgaggtgcacgctgtgttgaagcagctgcaggacatcctcaaggaggcctctctgcgcttcactctgccgggctccggcactgaggggcccgccaagcaagagaacttcatcctaggcagctgtggcacagaccaggtgaagggtgtgctgactctgcagggggatgccctcagccaggcggatgtgaacctgaagatgccccggaacaaccagctgctgcacttcgccttccgggaggacaagcagtggaagctgcagcagatccaggatgccagaaaccatgtgagccaagccatttacctgcttaccagccgggaccagagctaccagttcaagacgggcgctgaggtcctcaagctgatggacgcagtgatgctgcagctgaccagagcccgaaaccggctcaccacccccgccaccctcaccctccccgagatcgccgccagcggcctcacgcggatgttcgcccctgccctgccgtccgacctgctggtcaacgtctacatcaacctcaacaagctctgcctcacggtgtaccagctgcatgccctgcagcccaactccaccaagaacttccgcccagctgggggcgcggtgctgcatagccctggggccatgttcgagtggggctctcagcgcctggaggtgagccacgtgcacaaagtggagtgcgtgatcccctggctcaacgacgccctggtctacttcaccgtctccctgcagctctgccagcagctcaaggacaagggagcttgtctccaggaaggcggccccgtcccctactcatacccaccacagagcaccagccagtgccaacgccaggctgctatttatctccctatcccaccccctaccccacctaacacatttgcactgccgggaatggacactggaagtgccaggaggaaggaaggctggtttggtggggtagtggggaggtcagggaggcggggccaagggtgtcccacattcccaacaccgccctctgatcaccatgggaatctttggactcaggacagggccaggcgcagggctctccctcctctccccttcgctgtcccctccccctggagggcatggtgtcggggggtggcactgagctatgagtcccggggatggtgaggaacgccacagacagagccaccctaggagtgagtatagtgctggtgactgtgtttcatagccccagtccagggctgtctaagaaataaagatcatcagactcca

SEQ ID NO: 414778 - DNA, 1661 bp, Homo sapiens
gagctccgcccccaagcgggcgccccaggctggtgccggccgcgtccctggccagccggagcaagcctgactcgtgcagccgccggccgcgtcctggccaggcggagcgagcctcactcccgcagccgccagtctggttccaggctcccgcaggtttcgggggccgaggcggaccgacaggcgccagccaatcgcgagcacggagccggcctgggggcggggtggtacccgctccgccaatcgggtgggggcggagccagacgccgggggcggacgggaggaccggaggaccgaggacagaaagattggtggacaggagcagcggccggtggggagggcgctcggcggcggcctgcggccatggccaccgtgatggcagcgacggcggcggagcgggcggtgctggaggaggagttccgctggctgctgcacgacgaggtgcacgctgtgttgaagcagctgcaggacatcctcaaggaggcctctctgcgcttcactctgccgggctccggcactgaggggcccgccaagcaagagaacttcatcctaggcagctgtgggatgtgaacctgaagatgccccggaacaaccagctgctgcacttcgccttccgggaggacaagcagtggaagctgcagcagatccaggatgccagaaaccatgtgagccaagccatttacctgcttaccagccgggaccagagctaccagttcaagacgggcgctgaggtcctcaagctgatggacgcagtgatgctgcagctgaccagagcccgaaaccggctcaccacccccgccaccctcaccctccccgagatcgccgccagcggcctcacgcggatgttcgcccctgccctgccgtccgacctgctggtcaacgtctacatcaacctcaacaagctctgcctcacggtgtaccagctgcatgccctgcagcccaactccaccaagaacttccgcccagctgggggcgcggtgctgcatagccctggggccatgttcgagtggggctctcagcgcctggaggtgagccacgtgcacaaagtggagtgcgtgatcccctggctcaacgacgccctggtctacttcaccgtctccctgcagctctgccagcagctcaaggacaagatctccgtgttctccagctactggagctacagacccttctgatcacagcacccaggagcttgtctccaggaaggcggccccgtcccctactcatacccaccacagagcaccagccagtgccaacgccaggctgctatttatctccctatcccaccccctaccccacctaacacatttgcactgccgggaatggacactggaagtgccaggaggaaggaaggctggtttggtggggtagtggggaggtcagggaggcggggccaagggtgtcccacattcccaacaccgccctctgatcaccatgggaatctttggactcaggacagggccaggcgcagggctctccctcctctccccttcgctgtcccctccccctggagggcatggtgtcggggggtggcactgagctatgagtcccggggatggtgaggaacgccacagacagagccaccctaggagtgagtatagtgctggtgactgtgtttcatagccccagtccagggctgtctaagaaataaagatcatcagactcca

SEQ ID NO: 414779 - DNA, 1644 bp, Homo sapiens
gagctccgcccccaagcgggcgccccaggctggtgccggccgcgtccctggccagccggagcaagcctgactcgtgcagccgccggccgcgtcctggccaggcggagcgagcctcactcccgcagccgccagtctggttccaggctcccgcaggtttcgggggccgaggcggaccgacaggcgccagccaatcgcgagcacggagccggcctgggggcggggtggtacccgctccgccaatcgggtgggggcggagccagacgccgggggcggacgggaggaccggaggaccgaggacagaaagattggtggacaggagcagcggccggtggggagggcgctcggcggcggcctgcggccatggccaccgtgatggcagcgacggcggcggagcgggcggtgctggaggcctctctgcgcttcactctgccgggctccggcactgaggggcccgccaagcaagagaacttcatcctaggcagctgtggcacagaccaggtgaagggtgtgctgactctgcagggggatgccctcagccaggcggatgtgaacctgaagatgccccggaacaaccagctgctgcacttcgccttccgggaggacaagcagtggaagctgcagcagatccaggatgccagaaaccatgtgagccaagccatttacctgcttaccagccgggaccagagctaccagttcaagacgggcgctgaggtcctcaagctgatggacgcagtgatgctgcagctgaccagagcccgaaaccggctcaccacccccgccaccctcaccctccccgagatcgccgccagcggcctcacgcggatgttcgcccctgccctgccgtccgacctgctggtcaacgtctacatcaacctcaacaagctctgcctcacggtgtaccagctgcatgccctgcagcccaactccaccaagaacttccgcccagctgggggcgcggtgctgcatagccctggggccatgttcgagtggggctctcagcgcctggaggtgagccacgtgcacaaagtggagtgcgtgatcccctggctcaacgacgccctggtctacttcaccgtctccctgcagctctgccagcagctcaaggacaagatctccgtgttctccagctactggagctacagacccttctgatcacagcacccaggagcttgtctccaggaaggcggccccgtcccctactcatacccaccacagagcaccagccagtgccaacgccaggctgctatttatctccctatcccaccccctaccccacctaacacatttgcactgccgggaatggacactggaagtgccaggaggaaggaaggctggtttggtggggtagtggggaggtcagggaggcggggccaagggtgtcccacattcccaacaccgccctctgatcaccatgggaatctttggactcaggacagggccaggcgcagggctctccctcctctccccttcgctgtcccctccccctggagggcatggtgtcggggggtggcactgagctatgagtcccggggatggtgaggaacgccacagacagagccaccctaggagtgagtatagtgctggtgactgtgtttcatagccccagtccagggctgtctaagaaataaagatcatcagactcca

SEQ ID NO: 414780 - DNA, 1313 bp, Homo sapiens
ggggcttctggaaggagcactgggccgggcctgagtgggcgctaccagctcccctccttccctctgttccacaggaggcctctctgcgcttcactctgccgggctccggcactgaggggcccgccaagcaagagaacttcatcctaggcagctgtggcacagaccaggtgaagggtgtgctgactctgcagggggatgccctcagccaggcggatgtgaacctgaagatgccccggaacaaccagctgctgcacttcgccttccgggaggacaagcagtggaagctgcagcagatccaggatgccagaaaccatgtgagccaagccatttacctgcttaccagccgggaccagagctaccagttcaagacgggcgctgaggtcctcaagctgatggacgcagtgatgctgcagctgaccagagcccgaaaccggctcaccacccccgccaccctcaccctccccgagatcgccgccagcggcctcacgcggatgttcgcccctgccctgccgtccgacctgctggtcaacgtctacatcaacctcaacaagctctgcctcacggtgtaccagctgcatgccctgcagcccaactccaccaagaacttccgcccagctgggggcgcggtgctgcatagccctggggccatgttcgagtggggctctcagcgcctggaggtgagccacgtgcacaaagtggagtgcgtgatcccctggctcaacgacgccctggtctacttcaccgtctccctgcagctctgccagcagctcaaggacaagatctccgtgttctccagctactggagctacagacccttctgatcacagcacccaggagcttgtctccaggaaggcggccccgtcccctactcatacccaccacagagcaccagccagtgccaacgccaggctgctatttatctccctatcccaccccctaccccacctaacacatttgcactgccgggaatggacactggaagtgccaggaggaaggaaggctggtttggtggggtagtggggaggtcagggaggcggggccaagggtgtcccacattcccaacaccgccctctgatcaccatgggaatctttggactcaggacagggccaggcgcagggctctccctcctctccccttcgctgtcccctccccctggagggcatggtgtcggggggtggcactgagctatgagtcccggggatggtgaggaacgccacagacagagccaccctaggagtgagtatagtgctggtgactgtgtttcatagccccagtccagggctgtctaagaaataaagatcatcagactcca

SEQ ID NO: 414781 - DNA, 1666 bp, Homo sapiens
gagctccgcccccaagcgggcgccccaggctggtgccggccgcgtccctggccagccggagcaagcctgactcgtgcagccgccggccgcgtcctggccaggcggagcgagcctcactcccgcagccgccagtctggttccaggctcccgcaggtttcgggggccgaggcggaccgacaggcgccagccaatcgcgagcacggagccggcctgggggcggggtggtacccgctccgccaatcgggtgggggcggagccagacgccgggggcggacgggaggaccggaggaccgaggacagaaagattggtggacaggagcagcggccggtggggagggcgctcggcggcggcctgcggccatggccaccgtgatggcagcgacggcggcggagcgggcggtgctggaggaggagttccgctggctgctgcacgacgaggtgcacgctgtgttgaagcagctgcaggacatcctcaaggaggcctctctgcgcttcactctgccgggctccggcactgaggggcccgccaagcaagagaacttcatcctaggcagctgtggcacagaccaggtgaagggtgtgctgactctgcagggggatgccctcagccaggcggatgtgaacctgaagatgccccggaacaaccagctgctgcacttcgccttccgggaggacaagcagtggaagctgcagcagatccaggatgccagaaaccatgtgagccaagccatttacctgcttaccagccgggaccagagctaccagttcaagacgggcgctgaggtcctcaagctgatggacgcagtgatgctgcagctgaccagagcccgaaaccggctcaccacccccgccaccctcaccctccccgagatcgccgccagcggcctcacgcggatgttcgcccctgccctgccgtccgacctgctggtcaacgtctacatcaacctcaacaagctctgcctcacggtgtaccagctgcatgccctgcagcccaactccaccaagcgagtggggctctcagcgcctggaggtgagccacgtgcacaaagtggagtgcgtgatcccctggctcaacgacgccctggtctacttcaccgtctccctgcagctctgccagcagctcaaggacaagatctccgtgttctccagctactggagctacagacccttctgatcacagcacccaggagcttgtctccaggaaggcggccccgtcccctactcatacccaccacagagcaccagccagtgccaacgccaggctgctatttatctccctatcccaccccctaccccacctaacacatttgcactgccgggaatggacactggaagtgccaggaggaaggaaggctggtttggtggggtagtggggaggtcagggaggcggggccaagggtgtcccacattcccaacaccgccctctgatcaccatgggaatctttggactcaggacagggccaggcgcagggctctccctcctctccccttcgctgtcccctccccctggagggcatggtgtcggggggtggcactgagctatgagtcccggggatggtgaggaacgccacagacagagccaccctaggagtgagtatagtgctggtgactgtgtttcatagccccagtccagggctgtctaagaaataaagatcatcagactcca

SEQ ID NO: 414782 - DNA, 5846 bp, Homo sapiens
cggggtgggaacctcggaaacctgcggaggccgggaggcggctgcaaggggcggggaaggcgggagcccgcagcggaggaggggccgcgggcgggaggcgctgcgaggcgctgctggccctcgggctgcgggagccgggctaggacgccgagcggtgactccccgccgctcccgggggccgtgacggagatgcctacatagaagagtgacagcagctagactaaatgtttaactgctgaactagttcctcaggtatcctggctctagagattgctatgggagattggatgactgttacagatccaggtctgtcttcagaaagcaaaactatctctcaatatacctcagaaacaaagatgtctccatcaagtttatactcacagcaagtgctatgttcttcaatacctttatcgaaaaatgtgcacagttttttcagtgccttctgcacagaagataatattgaacagagtatctcatatcttgatcaggaattgactacttttggttttccttcattatatgaagaatccaaaggtaaagagacaaagagagagttaaatatagtagctgtactaaattgtatgaatgagctgcttgtgcttcagcggaagaaccttctagctcaggaaaatgtggagacacagaatttgaagctgggaagtgatatggaccatctacagagctgctactcaaaacttaaggaacaactggaaacctccaggagggaaatgattgggcttcaggaaagagacagacagttacaatgtaagaacaggaatttgcatcagctactaaagaatgagaaagatgaggtgcaaaaattacaaaatatcattgcaagtcgagctactcagtataatcatgatatgaagagaaaagagcgtgaatataataaactgaaggaacgtctacatcaacttgttatgaacaagaaagataagaaaatagctatggacattttgaattatgtcgggagagctgatggaaaaagaggctcctggaggactggtaaaactgaagccaggaatgaagatgaaatgtataaaattctcttgaatgattatgaatatcgtcagaaacaaatcctaatggaaaatgcagaacttaagaaggttcttcaacaaatgaaaaaggaaatgatttctcttctttctccccaaaagaagaaacctagagaaagagtagatgatagtacaggaactgttatttccgatgttgaagaagatgccggggaactaagcagagagagtatgtgggacctttcctgtgaaactgtgagagagcagcttacaaacagcatcagaaaacagtggagaattttgaaaagtcatgtagaaaagcttgataaccaagtttcaaaggtacacctggaaggttttaatgatgaagatgtaatctcacgacaagaccatgaacaagaaactgaaaaactcgagttagaaattcagcagtgtaaagaaatgattaaaactcagcaacagcttttacagcagcagctcgctactgcatatgatgatgataccacttcactattacgagactgttatttgttggaagaaaaggaacgtctcaaagaagaatggtccctttttaaagagcagaaaaagaattttgagagggagagacgaagctttacagaagccgctattcgcctgggattggagagaaaggcatttgaagaagaaagagccagttggttaaagcagcagtttctaaatatgactacctttgaccaccagaactcagaaaatgtgaaacttttcagtgccttctcaggaagttctgattgggacaatcttatagtgcactcgaggcagccgcaaaagaagcctcacagtgtgtctaatgggtctccagtttgcatgtctaaacttactaaatctcttcctgcttcaccttccacttcagacttttgccagacacgttcctgcatatctgaacatagttcaatcaatgtactgaatataactgctgaagaaattaaaccaaatcaggttggaggagaacgtacaaatcaaaaatggagtgtggcgtcaagacctggatcacaggaaggttgctatagtggatgctccttgagctacacaaattctcatgtagaaaaagatgacttaccttagacatgtggactggaatttttttcattaatgtgttcatcaagtttcacatctaagttgaaacagggtgtgtcataaagtcagttatctctaataacttaagatggtctgagttgtttgtttggacttccctgtcttcccccaaagagttgaaatcttaaatctatttaaaaggatataaaagctttggatatgtatttttagtaacagaagcatctggttctgtgaataaaggaatgtatagatgtttggatggaaacaaaagcactagactgagtttcctcttataggtattaaaaatagcacttttaggaaactgattattgtaaatgtttaattttgtctcaaatatagttggcattggaagtttagcctttacttgaatgtatactgtagatttttaacaaagcgagttctatatttattatgtttagtgtggtttgaaattacctctttcatatgttttaaataaagtgaaatttatgtatgttttgtacatagatacacatgattatgttaagaggctttaagatttaaaagtttcacacaaccataagtatagtatttcatgccagtaaaatttttttagtggtattctgtttacagatgtattaggaccattgatgcattacatttaagaattctctttaatacatctgggcaataaatattgaaaggtattccatgaagctgagttctttagataatcaacactactaacattacatttttgagatttttatgacattagatttttattttgtatatgtagaatattataatttttaaaaggactattgatgatagaagaataggggcaagacgacaaaagtacctttgaataaaacaatttaagaaattggtttaagatattggatgatagaagatatttaagatatctagatggtgatattttccttacaagatgggtaccagtatagtaatatctgtatactaactagggctttgtattgtcaataattttttaataattttttaatgaggtatttaccactgaagaaatatgataatataaaaccatcaaattttataattgagatgatactctggaaaaacatgtcatttcattttcagaaaactcttaagctctcttcagtctctgtaatgtttctgattgcatgtttcttcatgaaaagtatgttgttgttttgatagtaataataataaatgtaggctcagctctttcccaggattttcatcaaaaagctttaagtgcctaaccctgcttgtctctgtacatagaagcctgcacagatccaacccttgctaggtatcatagtttaggcccatttaccttcccctgtactggcagttcagccgcttacatgcactcaccctgtttgtggctattttaaattcatattattaaaaaacaaaaaaaacccacctatttgtgttgtccattcactatacgtaactatgtaactctttggagttgcatagcagcagccattttttcagggctgataggatatcattaagagtgtcttatgagacattagtggatatactcatagtaaccatatttatagttttaaagagctagctcttgagcattagtcactaccttcagcttgatgcatggtcacttctttactatttaaaatactacacattgtacaaaatatcgaagacactaccatatgctaaaggaagaaatctagctgggatataggatttttgttgtttttgtttttgtttgttttgctatttagcaataacatggtcaaaaaggcaatcagaaattttaaatacagttaatggatacatttggcaacaattttcccccgagggttttccatggtgtactttgcaagaaataagcactctaatttttaaagtaaatctcttattttagcaaatattatatttcatgacaatggagttctagaaagcagcatctgttttttgttgcgtgtttccattttaaagtgagttgagttctcaaattggaaagaaagattccttgagacgtacttttaaaatctaaagtgtgaaagaaacagcagagtaaaagccagactcattgcaccttcaatgtctgcatagatccagaagttgtacattttacctaacaacatcacttttgttgaacattccaactccagaatgatccccaatcaccctaatctcagaatgctggaatgatgtctgttggaaaacccaggactccacacacaaaactcctgggattttgtttcccatctctttctaggtgtttgcaatgtacaaataatacagctgtgctaatctcacatttagccatgatagatgatggttctagagtgtacttccatttgtaagtcctcctgataagtgctttcttgtttatcactatgtaaatctgaaatattttgtacttcatttgtttttatccattctgaattttcaaagcataaaaatgtcaaagaaaaattgagataaacattttgttcaccattaaatgtttgcatctgcagtctatgatgagaaacaatgaaattatgactaaaatttaacaaatagtattttcttatagaagcaatgtattaaatgattagatacacaggacagttcacagcaaattgtttacttacatggcataattgaaatactgttatttgtaaagagttctatactgcctaccttagctaaccagaattgttcatagacttgtgataatatggtgttatgggaaaacacattttgtgcgcatgatgaagagagcaccgtgaatctagtcttgactgcccctggtggaacatttgaaagcccttgggactccaggagagatgtttttgcagcatgtatgctaaatttgtgagttagcaagaccctgctgtgattactatgttgtacagatcttcaaagtatattgcctaatatgagtcatgttatttctagattgaatttaaagtaagtatggattatggaagtctagtaaatatacttttccctatttttgtcctttttcagtcttttggtaagcatttattaagtacctgctgtatgtcaaggcttactactgctttccaatccttggtgatatgaagacagataagcacgctgcctgctattaggaatctgagctgagtggaaggccaactattaaacctacattgtaataaacaatggtggatgctacggacacattcagtctgttcataaaacatggactgatgggtctgctccaggccacatttgttttttaacagtaacgtggctaggcttccatttataagtcttagcattatttcctttgtgaagtactatgtaacagatgattgtttgctagattttgttttctacaatcaaaatgttgacctgcaaagcagtgtaggattttctctcctcaagagcgtgtattattatctagtagaaaaagcattcccaaagacttggtccatgcagataaggataatgaaattgctcactctaatcctttttctaaatacagtgtttttcaagctggatgtaaattagagtgggtggatattgattaaattatttgatttatatgaaatcaaatgactggttgaggtttttttgaacatttacaaataatggattcctgagagctcaggaagtactgtaatgtcagtgacatatgaagctcctgataaagatccacctcattcatatatttgagcttcagaaatacatgtacctagtataatgcttaacagcacataatatttgttgatgagaaatacactgatgaaacaacac

SEQ ID NO: 414783 - DNA, 5687 bp, Homo sapiens
cggggtgggaacctcggaaacctgcggaggccgggaggcggctgcaaggggcggggaaggcgggagcccgcagcggaggaggggccgcgggcgggaggcgctgcgaggcgctgctggccctcgggctgcgggagccgggctaggacgccgagcggtgactccccgccgctcccgggggccgtgacgatgaggaaagtgaggcccaaagaagatttatgttcaggaccatttagtctgagatgcctacatagaagagtgacagcagctagactaaatgtttaactgctgaactagttcctcaggtatcctggctctagagattgctatgggagattggatgactgttacagatccaggtctgtcttcagaaagcaaaactatctctcaatatacctcagaaacaaagatgtctccatcaagtttatactcacagcaagtgctatgttcttcaatacctttatcgaaaaatgtgcacagttttttcagtgccttctgcacagaagataatattgaacagagtatctcatatcttgatcaggaattgactacttttggttttccttcattatatgaagaatccaaaggtaaagagacaaagagagagttaaatatagtagctgtactaaattgtatgaatgagctgcttgtgcttcagcggaagaaccttctagctcaggaaaatgtggagacacagaatttgaagctgggaagtgatatggaccatctacagagctgctactcaaaacttaaggaacaactggaaacctccaggagggaaatgattgggcttcaggaaagagacagacagttacaatgtaagaacaggaatttgcatcagctactaaagaatgagaaagatgaggtgcaaaaattacaaaatatcattgcaagtcgagctactcagtataatcatgatatgaagagaaaagagcgtgaatataataaactgaaggaacgtctacatcaacttgttatgaacaagaaagataagaaaatagctatggacattttgaattatgtcgggagagctgatggaaaaagaggctcctggaggactggtaaaactgaagccaggaatgaagatgaaatgtataaaattctcttgaatgattatgaatatcgtcagaaacaaatcctaatggaaaatgcagaacttaagaaggttcttcaacaaatgaaaaaggaaatgatttctcttctttctccccaaaagaagaaacctagagaaagagtagatgatagtacaggaactgttatttccgatgttgaagaagatgccggggaactaagcagagagagtatgtgggacctttcctgtgaaactgtgagagagcagcttacaaacagcatcagaaaacagtggagaattttgaaaagtcatgtagaaaagcttgataaccaagtttcaaaggtacacctggaaggttttaatgatgaagatgtaatctcacgacaagaccatgaacaagaaactgaaaaactcgagttagaaattcagcagtgtaaagaaatgattaaaactcagcaacagcttttacagcagcagctcgctactgcatatgatgatgataccacttcactattacgagactgttatttgttggaagaaaaggaacgtctcaaagaagaatggtccctttttaaagagcagaaaaagaattttgagagggagagacgaagctttacagaagccgctattcgcctgggattggagagaaaggcatttgaagaagaaagagccagttggttaaagcagcagtttctaaatatgactacctttgaccaccagaactcagaaaatgtgaaacttttcagtgccttctcaggaagttctgattgggacaatcttatagtgcactcgaggcagccgcaaaagaagcctcacagtgtgtctaatgggtctccagtttgcatgtctaaacttactaaatctcttcctgcttcaccttccacttcagacttttgccagacacgttcctgcatatctgaacatagttcaatcaatgtactgaatataactgctgaagaaattaaaccaaatcaggttggaggagaacgtacaaatcaaaaatggagtgtggcgtcaagacctggatcacaggaaggttgctatagtggatgctccttgagctacacaaattctcatgtagaaaaagatgacttaccttagacatgtggactggaatttttttcattaatgtgttcatcaagtttcacatctaagttgaaacagggtgtgtcataaagtcagttatctctaataacttaagatggtctgagttgtttgtttggacttccctgtcttcccccaaagagttgaaatcttaaatctatttaaaaggatataaaagctttggatatgtatttttagtaacagaagcatctggttctgtgaataaaggaatgtatagatgtttggatggaaacaaaagcactagactgagtttcctcttataggtattaaaaatagcacttttaggaaactgattattgtaaatgtttaattttgtctcaaatatagttggcattggaagtttagcctttacttgaatgtatactgtagatttttaacaaagcgagttctatatttattatgtttagtgtggtttgaaattacctctttcatatgttttaaataaagtgaaatttatgtatgttttgtacatagatacacatgattatgttaagaggctttaagatttaaaagtttcacacaaccataagtatagtatttcatgccagtaaaatttttttagtggtattctgtttacagatgtattaggaccattgatgcattacatttaagaattctctttaatacatctgggcaataaatattgaaaggtattccatgaagctgagttctttagataatcaacactactaacattacatttttgagatttttatgacattagatttttattttgtatatgtagaatattataatttttaaaaggactattgatgatagaagaataggggcaagacgacaaaagtacctttgaataaaacaatttaagaaattggtttaagatattggatgatagaagatatttaagatatctagatggtgatattttccttacaagatgggtaccagtatagtaatatctgtatactaactagggctttgtattgtcaataattttttaataattttttaatgaggtatttaccactgaagaaatatgataatataaaaccatcaaattttataattgagatgatactctggaaaaacatgtcatttcattttcagaaaactcttaagctctcttcagtctctgtaatgtttctgattgcatgtttcttcatgaaaagtatgttgttgttttgatagtaataataataaatgtaggctcagctctttcccaggattttcatcaaaaagctttaagtgcctaaccctgcttgtctctgtacatagaagcctgcacagatccaacccttgctaggtatcatagtttaggcccatttaccttcccctgtactggcagttcagccgcttacatgcactcaccctgtttgtggctattttaaattcatattattaaaaaacaaaaaaaacccacctatttgtgttgtccattcactatacgtaactatgtaactctttggagttgcatagcagcagccattttttcagggctgataggatatcattaagagtgtcttatgagacattagtggatatactcatagtaaccatatttatagttttaaagagctagctcttgagcattagtcactaccttcagcttgatgcatggtcacttctttactatttaaaatactacacattgtacaaaatatcgaagacactaccatatgctaaaggaagaaatctagctgggatataggatttttgttgtttttgtttttgtttgttttgctatttagcaataacatggtcaaaaaggcaatcagaaattttaaatacagttaatggatacatttggcaacaattttcccccgagggttttccatggtgtactttgcaagaaataagcactctaatttttaaagtaaatctcttattttagcaaatattatatttcatgacaatggagttctagaaagcagcatctgttttttgttgcgtgtttccattttaaagtgagttgagttctcaaattggaaagaaagattccttgagacgtacttttaaaatctaaagtgtgaaagaaacagcagagtaaaagccagactcattgcaccttcaatgtctgcatagatccagaagttgtacattttacctaacaacatcacttttgttgaacattccaactccagaatgatccccaatcaccctaatctcagaatgctggaatgatgtctgttggaaaacccaggactccacacacaaaactcctgggattttgtttcccatctctttctaggtgtttgcaatgtacaaataatacagctgtgctaatctcacatttagccatgatagatgatggttctagagtgtacttccatttgtaagtcctcctgataagtgctttcttgtttatcactatgtaaatctgaaatattttgtacttcatttgtttttatccattctgaattttcaaagcataaaaatgtcaaagaaaaattgagataaacattttgttcaccattaaatgtttgcatctgcagtctatgatgagaaacaatgaaattatgactaaaatttaacaaatagtattttcttatagaagcaatgtattaaatgattagatacacaggacagttcacagcaaattgtttacttacatggcataattgaaatactgttatttgtaaagagttctatactgcctaccttagctaaccagaattgttcatagacttgtgataatatggtgttatgggaaaacacattttgtgcgcatgatgaagagagcaccgtgaatctagtcttgactgcccctggtggaacatttgaaagcccttgggactccaggagagatgtttttgcagcatgtatgctaaatttgtgagttagcaagaccctgctgtgattactatgttgtacagatcttcaaagtatattgcctaatatgagtcatgttatttctagattgaatttaaagtaagtatggattatggaagtctagtaaatatacttttccctatttttgtcctttttcagtcttttggtaagcatttattaagtacctgctgtatgtcaaggcttactactgctttccaatccttggtgatatgaagacagataagcacgctgcctgctattaggaatctgagctgagtggaaggccaactattaaacctacattgtaataaacaatggtggatgctacggacacattcagtctgttcataaaacatggactgatgggtctgctccaggccacatttgttttttaacagtaacgtggctaggcttccatttataagtcttagcattatttcctttgtgaagtactatgtaacagatgattgtttgctagattttgttttctacaatcaaaatgttgacctgcaaagcagtgtaggattttctctcctcaagagcgtgtattattatctagtagaaaaagcattcccaaagacttggtccatgcagataaggataatgaaattgctcactctaatcctttttctaaatacagtgtttttcaagctggatgtaaattagagtgggtggatattgattaaattatttgatttatatg

SEQ ID NO: 414784 - DNA, 466 bp, Homo sapiens
ctatgttttaaattttaatagcagcagctcgctactgcatatgatgatgataccacttcactattacgagactgttatttgttggaagaaaaggaacgtctcaaagaagaatggtccctttttaaagagcagaaaaagaattttgagagggagagacgaagctttacagaagccgctattcgcctgggattggagattggctttctcctgctaagtgttttacacaagaaatctcttttgggtatccatcattcatccacggtcagtaggtgtggtgtcagaagacagtgcaaccaagactatatttgctgtttaaaaaggaagtataataaaaaattaagttctcttctccccagtccatcattgttatatatacgctctacagcttgctttttttacttagcaatgtgtcatctacatattcccccttcaaaaattgtagcagtaatgtctgaataaggttaaa

SEQ ID NO: 414785 - DNA, 5056 bp, Homo sapiens
ggcgggcgggggtgggcgccggcaaggggcgggcgcgcgcggaggtgagagccggcacctggctcagcgccccgttgttcggcgggaggctccgcgcggctgttggggccgttgcagggtgcgggcgagcgtcgacccgggccgctcctggaggaggaggtgggaggagatgcctacatagaagagtgacagcagctagactaaatgtttaactgctgaactagttcctcaggtatcctggctctagagattgctatgggagattggatgactgttacagatccaggtctgtcttcagaaagcaaaactatctctcaatatacctcagaaacaaagatgtctccatcaagtttatactcacagcaagtgctatgttcttcaatacctttatcgaaaaatgtgcacagttttttcagtgccttctgcacagaagataatattgaacagagtatctcatatcttgatcaggaattgactacttttggttttccttcattatatgaagaatccaaaggtaaagagacaaagagagagttaaatatagtagctgtactaaattgtatgaatgagctgcttgtgcttcagcggaagaaccttctagctcaggaaaatgtggagacacagaatttgaagctgggaagtgatatggaccatctacagagctgctactcaaaacttaaggaacaactggaaacctccaggagggaaatgattgggcttcaggaaagagacagacagttacaatgtaagaacaggaatttgcatcagctactaaagaatgagaaagatgaggtgcaaaaattacaaaatatcattgcaagtcgagctactcagtataatcatgatatgaagagaaaagagcgtgaatataataaactgaaggaacgtctacatcaacttgttatgaacaagaaagataagaaaatagctatggacattttgaattatgtcgggagagctgatggaaaaagaggctcctggaggactggtaaaactgaagccaggaatgaagatgaaatgtataaaattctcttgaatgattatgaatatcgtcagaaacaaatcctaatggaaaatgcagaacttaagaaggttcttcaacaaatgaaaaaggaaatgatttctcttctttctccccaaaagaagaaacctagagaaagagtagatgatagtacaggaactgttatttccgatgttgaagaagatgccggggaactaagcagagagagtatgtgggacctttcctgtgaaactgtgagagagcagcttacaaacagcatcagaaaacagtggagaattttgaaaagtcatgtagaaaagcttgataaccaagtttcaaaggtacacctggaaggttttaatgatgaagatgtaatctcacgacaagaccatgaacaagaaactgaaaaactcgagttagaaattcagcagtgtaaagaaatgattaaaactcagcaacagcttttacagcagcagctcgctactgcatatgatgatgataccacttcactattacgagactgttatttgttggaagaaaaggaacgtctcaaagaagaatggtccctttttaaagagcagaaaaagaattttgagagggagagacgaagctttacagaagccgctattcgcctgggattggagagaaaggcatttgaagaagaaagagccagttggttaaagcagcagtttctaaatatgactacctttgaccaccagaactcagaaaatgtgaaacttttcagtgccttctcaggaagttctgattgggacaatcttatagtgcactcgaggcagccgcaaaagaagcctcacagtgtgtctaatgggtctccagtttgcatgtctaaacttactaaatctcttcctgcttcaccttccacttcagacttttgccagacacgttcctgcatatctgaacatagttcaatcaatgtactgaatataactgctgaagaaattaaaccaaatcaggttggaggagaacgtacaaatcaaaaatggagtgtggcgtcaagacctggatcacaggaaggttgctatagtggatgctccttgagctacacaaattctcatgtagaaaaagatgacttaccttagacatgtggactggaatttttttcattaatgtgttcatcaagtttcacatctaagttgaaacagggtgtgtcataaagtcagttatctctaataacttaagatggtctgagttgtttgtttggacttccctgtcttcccccaaagagttgaaatcttaaatctatttaaaaggatataaaagctttggatatgtatttttagtaacagaagcatctggttctgtgaataaaggaatgtatagatgtttggatggaaacaaaagcactagactgagtttcctcttataggtattaaaaatagcacttttaggaaactgattattgtaaatgtttaattttgtctcaaatatagttggcattggaagtttagcctttacttgaatgtatactgtagatttttaacaaagcgagttctatatttattatgtttagtgtggtttgaaattacctctttcatatgttttaaataaagtgaaatttatgtatgttttgtacatagatacacatgattatgttaagaggctttaagatttaaaagtttcacacaaccataagtatagtatttcatgccagtaaaatttttttagtggtattctgtttacagatgtattaggaccattgatgcattacatttaagaattctctttaatacatctgggcaataaatattgaaaggtattccatgaagctgagttctttagataatcaacactactaacattacatttttgagatttttatgacattagatttttattttgtatatgtagaatattataatttttaaaaggactattgatgatagaagaataggggcaagacgacaaaagtacctttgaataaaacaatttaagaaattggtttaagatattggatgatagaagatatttaagatatctagatggtgatattttccttacaagatgggtaccagtatagtaatatctgtatactaactagggctttgtattgtcaataattttttaataattttttaatgaggtatttaccactgaagaaatatgataatataaaaccatcaaattttataattgagatgatactctggaaaaacatgtcatttcattttcagaaaactcttaagctctcttcagtctctgtaatgtttctgattgcatgtttcttcatgaaaagtatgttgttgttttgatagtaataataataaatgtaggctcagctctttcccaggattttcatcaaaaagctttaagtgcctaaccctgcttgtctctgtacatagaagcctgcacagatccaacccttgctaggtatcatagtttaggcccatttaccttcccctgtactggcagttcagccgcttacatgcactcaccctgtttgtggctattttaaattcatattattaaaaaacaaaaaaaacccacctatttgtgttgtccattcactatacgtaactatgtaactctttggagttgcatagcagcagccattttttcagggctgataggatatcattaagagtgtcttatgagacattagtggatatactcatagtaaccatatttatagttttaaagagctagctcttgagcattagtcactaccttcagcttgatgcatggtcacttctttactatttaaaatactacacattgtacaaaatatcgaagacactaccatatgctaaaggaagaaatctagctgggatataggatttttgttgtttttgtttttgtttgttttgctatttagcaataacatggtcaaaaaggcaatcagaaattttaaatacagttaatggatacatttggcaacaattttcccccgagggttttccatggtgtactttgcaagaaataagcactctaatttttaaagtaaatctcttattttagcaaatattatatttcatgacaatggagttctagaaagcagcatctgttttttgttgcgtgtttccattttaaagtgagttgagttctcaaattggaaagaaagattccttgagacgtacttttaaaatctaaagtgtgaaagaaacagcagagtaaaagccagactcattgcaccttcaatgtctgcatagatccagaagttgtacattttacctaacaacatcacttttgttgaacattccaactccagaatgatccccaatcaccctaatctcagaatgctggaatgatgtctgttggaaaacccaggactccacacacaaaactcctgggattttgtttcccatctctttctaggtgtttgcaatgtacaaataatacagctgtgctaatctcacatttagccatgatagatgatggttctagagtgtacttccatttgtaagtcctcctgataagtgctttcttgtttatcactatgtaaatctgaaatattttgtacttcatttgtttttatccattctgaattttcaaagcataaaaatgtcaaagaaaaattgagataaacattttgttcaccattaaatgtttgcatctgcagtctatgatgagaaacaatgaaattatgactaaaatttaacaaatagtattttcttatagaagcaatgtattaaatgattagatacacaggacagttcacagcaaattgtttacttacatggcataattgaaatactgttatttgtaaagagttctatactgcctaccttagctaaccagaattgttcatagacttgtgataatatggtgttatgggaaaacacattttgtgcgcatgatgaagagagcaccgtgaatctagtcttgactgcccctggtggaacatttgaaagcccttgggactccaggagagatgtttttgcagcatgtatgctaaatttgtgagttagcaagaccctgctgtgattactatgttgtacagatcttcaaagtatattgcctaatatgagtcatgttatttctagattgaatttaaagtaagtatggattatggaagtctagtaaatatacttttcccta

SEQ ID NO: 414786 - DNA, 5106 bp, Homo sapiens
ggcgggcgggggtgggcgccggcaaggggcgggcgcgcgcggaggtgagagccggcacctggctcagcgccccgttgttcggcgggaggctccgcgcggctgttggggccgttgcagggtgcgggcgagcgtcgacccgggccgctcctggaggaggaggtgggagatgaggaaagtgaggcccaaagaagatttatgttcaggaccatttagtctgagatgcctacatagaagagtgacagcagctagactaaatgtttaactgctgaactagttcctcaggtatcctggctctagagattgctatgggagattggatgactgttacagatccaggtctgtcttcagaaagcaaaactatctctcaatatacctcagaaacaaagatgtctccatcaagtttatactcacagcaagtgctatgttcttcaatacctttatcgaaaaatgtgcacagttttttcagtgccttctgcacagaagataatattgaacagagtatctcatatcttgatcaggaattgactacttttggttttccttcattatatgaagaatccaaaggtaaagagacaaagagagagttaaatatagtagctgtactaaattgtatgaatgagctgcttgtgcttcagcggaagaaccttctagctcaggaaaatgtggagacacagaatttgaagctgggaagtgatatggaccatctacagagctgctactcaaaacttaaggaacaactggaaacctccaggagggaaatgattgggcttcaggaaagagacagacagttacaatgtaagaacaggaatttgcatcagctactaaagaatgagaaagatgaggtgcaaaaattacaaaatatcattgcaagtcgagctactcagtataatcatgatatgaagagaaaagagcgtgaatataataaactgaaggaacgtctacatcaacttgttatgaacaagaaagataagaaaatagctatggacattttgaattatgtcgggagagctgatggaaaaagaggctcctggaggactggtaaaactgaagccaggaatgaagatgaaatgtataaaattctcttgaatgattatgaatatcgtcagaaacaaatcctaatggaaaatgcagaacttaagaaggttcttcaacaaatgaaaaaggaaatgatttctcttctttctccccaaaagaagaaacctagagaaagagtagatgatagtacaggaactgttatttccgatgttgaagaagatgccggggaactaagcagagagagtatgtgggacctttcctgtgaaactgtgagagagcagcttacaaacagcatcagaaaacagtggagaattttgaaaagtcatgtagaaaagcttgataaccaagtttcaaaggtacacctggaaggttttaatgatgaagatgtaatctcacgacaagaccatgaacaagaaactgaaaaactcgagttagaaattcagcagtgtaaagaaatgattaaaactcagcaacagcttttacagcagcagctcgctactgcatatgatgatgataccacttcactattacgagactgttatttgttggaagaaaaggaacgtctcaaagaagaatggtccctttttaaagagcagaaaaagaattttgagagggagagacgaagctttacagaagccgctattcgcctgggattggagagaaaggcatttgaagaagaaagagccagttggttaaagcagcagtttctaaatatgactacctttgaccaccagaactcagaaaatgtgaaacttttcagtgccttctcaggaagttctgattgggacaatcttatagtgcactcgaggcagccgcaaaagaagcctcacagtgtgtctaatgggtctccagtttgcatgtctaaacttactaaatctcttcctgcttcaccttccacttcagacttttgccagacacgttcctgcatatctgaacatagttcaatcaatgtactgaatataactgctgaagaaattaaaccaaatcaggttggaggagaacgtacaaatcaaaaatggagtgtggcgtcaagacctggatcacaggaaggttgctatagtggatgctccttgagctacacaaattctcatgtagaaaaagatgacttaccttagacatgtggactggaatttttttcattaatgtgttcatcaagtttcacatctaagttgaaacagggtgtgtcataaagtcagttatctctaataacttaagatggtctgagttgtttgtttggacttccctgtcttcccccaaagagttgaaatcttaaatctatttaaaaggatataaaagctttggatatgtatttttagtaacagaagcatctggttctgtgaataaaggaatgtatagatgtttggatggaaacaaaagcactagactgagtttcctcttataggtattaaaaatagcacttttaggaaactgattattgtaaatgtttaattttgtctcaaatatagttggcattggaagtttagcctttacttgaatgtatactgtagatttttaacaaagcgagttctatatttattatgtttagtgtggtttgaaattacctctttcatatgttttaaataaagtgaaatttatgtatgttttgtacatagatacacatgattatgttaagaggctttaagatttaaaagtttcacacaaccataagtatagtatttcatgccagtaaaatttttttagtggtattctgtttacagatgtattaggaccattgatgcattacatttaagaattctctttaatacatctgggcaataaatattgaaaggtattccatgaagctgagttctttagataatcaacactactaacattacatttttgagatttttatgacattagatttttattttgtatatgtagaatattataatttttaaaaggactattgatgatagaagaataggggcaagacgacaaaagtacctttgaataaaacaatttaagaaattggtttaagatattggatgatagaagatatttaagatatctagatggtgatattttccttacaagatgggtaccagtatagtaatatctgtatactaactagggctttgtattgtcaataattttttaataattttttaatgaggtatttaccactgaagaaatatgataatataaaaccatcaaattttataattgagatgatactctggaaaaacatgtcatttcattttcagaaaactcttaagctctcttcagtctctgtaatgtttctgattgcatgtttcttcatgaaaagtatgttgttgttttgatagtaataataataaatgtaggctcagctctttcccaggattttcatcaaaaagctttaagtgcctaaccctgcttgtctctgtacatagaagcctgcacagatccaacccttgctaggtatcatagtttaggcccatttaccttcccctgtactggcagttcagccgcttacatgcactcaccctgtttgtggctattttaaattcatattattaaaaaacaaaaaaaacccacctatttgtgttgtccattcactatacgtaactatgtaactctttggagttgcatagcagcagccattttttcagggctgataggatatcattaagagtgtcttatgagacattagtggatatactcatagtaaccatatttatagttttaaagagctagctcttgagcattagtcactaccttcagcttgatgcatggtcacttctttactatttaaaatactacacattgtacaaaatatcgaagacactaccatatgctaaaggaagaaatctagctgggatataggatttttgttgtttttgtttttgtttgttttgctatttagcaataacatggtcaaaaaggcaatcagaaattttaaatacagttaatggatacatttggcaacaattttcccccgagggttttccatggtgtactttgcaagaaataagcactctaatttttaaagtaaatctcttattttagcaaatattatatttcatgacaatggagttctagaaagcagcatctgttttttgttgcgtgtttccattttaaagtgagttgagttctcaaattggaaagaaagattccttgagacgtacttttaaaatctaaagtgtgaaagaaacagcagagtaaaagccagactcattgcaccttcaatgtctgcatagatccagaagttgtacattttacctaacaacatcacttttgttgaacattccaactccagaatgatccccaatcaccctaatctcagaatgctggaatgatgtctgttggaaaacccaggactccacacacaaaactcctgggattttgtttcccatctctttctaggtgtttgcaatgtacaaataatacagctgtgctaatctcacatttagccatgatagatgatggttctagagtgtacttccatttgtaagtcctcctgataagtgctttcttgtttatcactatgtaaatctgaaatattttgtacttcatttgtttttatccattctgaattttcaaagcataaaaatgtcaaagaaaaattgagataaacattttgttcaccattaaatgtttgcatctgcagtctatgatgagaaacaatgaaattatgactaaaatttaacaaatagtattttcttatagaagcaatgtattaaatgattagatacacaggacagttcacagcaaattgtttacttacatggcataattgaaatactgttatttgtaaagagttctatactgcctaccttagctaaccagaattgttcatagacttgtgataatatggtgttatgggaaaacacattttgtgcgcatgatgaagagagcaccgtgaatctagtcttgactgcccctggtggaacatttgaaagcccttgggactccaggagagatgtttttgcagcatgtatgctaaatttgtgagttagcaagaccctgctgtgattactatgttgtacagatcttcaaagtatattgcctaatatgagtcatgttatttctagattgaatttaaagtaagtatggattatggaagtctagtaaatatacttttcccta

SEQ ID NO: 414787 - DNA, 4924 bp, Homo sapiens
ggcgggcgggggtgggcgccggcaaggggcgggcgcgcgcggaggtgagagccggcacctggctcagcgccccgttgttcggcgggaggctccgcgcggctgttggggccgttgcagggtgcgggcgagcgtcgacccgggccgctcctggaggaggaggtgggagaaagcaaaactatctctcaatatacctcagaaacaaagatgtctccatcaagtttatactcacagcaagtgctatgttcttcaatacctttatcgaaaaatgtgcacagttttttcagtgccttctgcacagaagataatattgaacagagtatctcatatcttgatcaggaattgactacttttggttttccttcattatatgaagaatccaaaggtaaagagacaaagagagagttaaatatagtagctgtactaaattgtatgaatgagctgcttgtgcttcagcggaagaaccttctagctcaggaaaatgtggagacacagaatttgaagctgggaagtgatatggaccatctacagagctgctactcaaaacttaaggaacaactggaaacctccaggagggaaatgattgggcttcaggaaagagacagacagttacaatgtaagaacaggaatttgcatcagctactaaagaatgagaaagatgaggtgcaaaaattacaaaatatcattgcaagtcgagctactcagtataatcatgatatgaagagaaaagagcgtgaatataataaactgaaggaacgtctacatcaacttgttatgaacaagaaagataagaaaatagctatggacattttgaattatgtcgggagagctgatggaaaaagaggctcctggaggactggtaaaactgaagccaggaatgaagatgaaatgtataaaattctcttgaatgattatgaatatcgtcagaaacaaatcctaatggaaaatgcagaacttaagaaggttcttcaacaaatgaaaaaggaaatgatttctcttctttctccccaaaagaagaaacctagagaaagagtagatgatagtacaggaactgttatttccgatgttgaagaagatgccggggaactaagcagagagagtatgtgggacctttcctgtgaaactgtgagagagcagcttacaaacagcatcagaaaacagtggagaattttgaaaagtcatgtagaaaagcttgataaccaagtttcaaaggtacacctggaaggttttaatgatgaagatgtaatctcacgacaagaccatgaacaagaaactgaaaaactcgagttagaaattcagcagtgtaaagaaatgattaaaactcagcaacagcttttacagcagcagctcgctactgcatatgatgatgataccacttcactattacgagactgttatttgttggaagaaaaggaacgtctcaaagaagaatggtccctttttaaagagcagaaaaagaattttgagagggagagacgaagctttacagaagccgctattcgcctgggattggagagaaaggcatttgaagaagaaagagccagttggttaaagcagcagtttctaaatatgactacctttgaccaccagaactcagaaaatgtgaaacttttcagtgccttctcaggaagttctgattgggacaatcttatagtgcactcgaggcagccgcaaaagaagcctcacagtgtgtctaatgggtctccagtttgcatgtctaaacttactaaatctcttcctgcttcaccttccacttcagacttttgccagacacgttcctgcatatctgaacatagttcaatcaatgtactgaatataactgctgaagaaattaaaccaaatcaggttggaggagaacgtacaaatcaaaaatggagtgtggcgtcaagacctggatcacaggaaggttgctatagtggatgctccttgagctacacaaattctcatgtagaaaaagatgacttaccttagacatgtggactggaatttttttcattaatgtgttcatcaagtttcacatctaagttgaaacagggtgtgtcataaagtcagttatctctaataacttaagatggtctgagttgtttgtttggacttccctgtcttcccccaaagagttgaaatcttaaatctatttaaaaggatataaaagctttggatatgtatttttagtaacagaagcatctggttctgtgaataaaggaatgtatagatgtttggatggaaacaaaagcactagactgagtttcctcttataggtattaaaaatagcacttttaggaaactgattattgtaaatgtttaattttgtctcaaatatagttggcattggaagtttagcctttacttgaatgtatactgtagatttttaacaaagcgagttctatatttattatgtttagtgtggtttgaaattacctctttcatatgttttaaataaagtgaaatttatgtatgttttgtacatagatacacatgattatgttaagaggctttaagatttaaaagtttcacacaaccataagtatagtatttcatgccagtaaaatttttttagtggtattctgtttacagatgtattaggaccattgatgcattacatttaagaattctctttaatacatctgggcaataaatattgaaaggtattccatgaagctgagttctttagataatcaacactactaacattacatttttgagatttttatgacattagatttttattttgtatatgtagaatattataatttttaaaaggactattgatgatagaagaataggggcaagacgacaaaagtacctttgaataaaacaatttaagaaattggtttaagatattggatgatagaagatatttaagatatctagatggtgatattttccttacaagatgggtaccagtatagtaatatctgtatactaactagggctttgtattgtcaataattttttaataattttttaatgaggtatttaccactgaagaaatatgataatataaaaccatcaaattttataattgagatgatactctggaaaaacatgtcatttcattttcagaaaactcttaagctctcttcagtctctgtaatgtttctgattgcatgtttcttcatgaaaagtatgttgttgttttgatagtaataataataaatgtaggctcagctctttcccaggattttcatcaaaaagctttaagtgcctaaccctgcttgtctctgtacatagaagcctgcacagatccaacccttgctaggtatcatagtttaggcccatttaccttcccctgtactggcagttcagccgcttacatgcactcaccctgtttgtggctattttaaattcatattattaaaaaacaaaaaaaacccacctatttgtgttgtccattcactatacgtaactatgtaactctttggagttgcatagcagcagccattttttcagggctgataggatatcattaagagtgtcttatgagacattagtggatatactcatagtaaccatatttatagttttaaagagctagctcttgagcattagtcactaccttcagcttgatgcatggtcacttctttactatttaaaatactacacattgtacaaaatatcgaagacactaccatatgctaaaggaagaaatctagctgggatataggatttttgttgtttttgtttttgtttgttttgctatttagcaataacatggtcaaaaaggcaatcagaaattttaaatacagttaatggatacatttggcaacaattttcccccgagggttttccatggtgtactttgcaagaaataagcactctaatttttaaagtaaatctcttattttagcaaatattatatttcatgacaatggagttctagaaagcagcatctgttttttgttgcgtgtttccattttaaagtgagttgagttctcaaattggaaagaaagattccttgagacgtacttttaaaatctaaagtgtgaaagaaacagcagagtaaaagccagactcattgcaccttcaatgtctgcatagatccagaagttgtacattttacctaacaacatcacttttgttgaacattccaactccagaatgatccccaatcaccctaatctcagaatgctggaatgatgtctgttggaaaacccaggactccacacacaaaactcctgggattttgtttcccatctctttctaggtgtttgcaatgtacaaataatacagctgtgctaatctcacatttagccatgatagatgatggttctagagtgtacttccatttgtaagtcctcctgataagtgctttcttgtttatcactatgtaaatctgaaatattttgtacttcatttgtttttatccattctgaattttcaaagcataaaaatgtcaaagaaaaattgagataaacattttgttcaccattaaatgtttgcatctgcagtctatgatgagaaacaatgaaattatgactaaaatttaacaaatagtattttcttatagaagcaatgtattaaatgattagatacacaggacagttcacagcaaattgtttacttacatggcataattgaaatactgttatttgtaaagagttctatactgcctaccttagctaaccagaattgttcatagacttgtgataatatggtgttatgggaaaacacattttgtgcgcatgatgaagagagcaccgtgaatctagtcttgactgcccctggtggaacatttgaaagcccttgggactccaggagagatgtttttgcagcatgtatgctaaatttgtgagttagcaagaccctgctgtgattactatgttgtacagatcttcaaagtatattgcctaatatgagtcatgttatttctagattgaatttaaagtaagtatggattatggaagtctagtaaatatacttttcccta

SEQ ID NO: 414788 - DNA, 5858 bp, Homo sapiens
aggcgtcagaagggggcggggagcagaaaacggccgggtgaatcactgggcgtaacaggtgccgcagccgcagctgcgcccgcagcgcgcgcggaccgcagggataaggtcttctttttctccgggtttttttggaggagatgcctacatagaagagtgacagcagctagactaaatgtttaactgctgaactagttcctcaggtatcctggctctagagattgctatgggagattggatgactgttacagatccaggtctgtcttcagaaagcaaaactatctctcaatatacctcagaaacaaagatgtctccatcaagtttatactcacagcaagtgctatgttcttcaatacctttatcgaaaaatgtgcacagttttttcagtgccttctgcacagaagataatattgaacagagtatctcatatcttgatcaggtaacatgtttttgtaaaaaacagtagcataaatcatgttatataatagaatgtatcaaaattatgagaaaaacatttgtcaaacacaagtttgttgtttatgtagtgcccctgagacttagattttcagagaaccttggtgattatctcatctagagatagcaagtctaacttttttgtgtggagcaccttggcctcctcattgtcccaggggctcctccactgagagtccagccatcactttatggatgcagaaacccaagtgccttgctccatgtcacagatttatagcagagactaaaagagccccgtcctcttaactctttgtcctttgggatattgaccattttcttaactatttcaagatagttttctatttttctaaggaaagatttctatcttttgattttttttttactaagttgcccagtaaccaaccttttaaaataattcacatttatttttaatttttgacaaaaattatatatatttgtcatgttcaacataatgtttcataatacacattgtgaaatggctcagtgtgcatacctcccatacttatatcattttttgtggtgagaatttacttgctcagcaatttcaggaatatagtacgtagttattagctgaggtcaccgtgttgtacaatagatctattaaacttattcttcctatctaactgaaagtttgtatcctctgaccagtatctcctcaactgtaaccaactttaagaaaacattttctcctaccaggaattgactacttttggttttccttcattatatgaagaatccaaaggtaaagagacaaagagagagttaaatatagtagctgtactaaattgtatgaatgagctgcttgtgcttcagcggaagaaccttctagctcaggaaaatgtggagacacagaatttgaagctgggaagtgatatggaccatctacagagctgctactcaaaacttaaggaacaactggaaacctccaggagggaaatgattgggcttcaggaaagagacagacagttacaatgtaagaacaggaatttgcatcagctactaaagaatgagaaagatgaggtgcaaaaattacaaaatatcattgcaagtcgagctactcagtataatcatgatatgaagagaaaagagcgtgaatataataaactgaaggaacgtctacatcaacttgttatgaacaagaaagataagaaaatagctatggacattttgaattatgtcgggagagctgatggaaaaagaggctcctggaggactggtaaaactgaagccaggtaaagtccagtttaaattgataaatgtaatcagacttccttctatcctgcattttcatactgacagtttctttctcaggaatgaagatgaaatgtataaaattctcttgaatgattatgaatatcgtcagaaacaaatcctaatggaaaatgcagaacttaagaaggttcttcaacaaatgaaaaaggaaatgatttctcttctttctccccaaaagaagaaacctagagaaagagtagatgatagtacaggaactgttatttccgatgttgaagaagatgccggggaactaagcagagagagtatgtgggacctttcctgtgaaactgtgagagagcagcttacaaacagcatcagaaaacagtggagaattttgaaaagtcatgtagaaaagcttgataaccaagtttcaaaggtacacctggaaggttttaatgatgaagatgtaatctcacgacaagaccatgaacaagaaactgaaaaactcgagttagaaattcagcagtgtaaagaaatgattaaaactcagcaacagcttttacagcagcagctcgctactgcatatgatgatgataccacttcactattacgagactgttatttgttggaagaaaaggaacgtctcaaagaagaatggtccctttttaaagagcagaaaaagaattttgagagggagagacgaagctttacagaagccgctattcgcctgggattggagagaaaggcatttgaagaagaaagagccagttggttaaagcagcagtttctaaatatgactacctttgaccaccagaactcagaaaatgtgaaacttttcagtgccttctcaggaagttctgattgggacaatcttatagtgcactcgaggcagccgcaaaagaagcctcacagtgtgtctaatgggtctccagtttgcatgtctaaacttactaaatctcttcctgcttcaccttccacttcagacttttgccagacacgttcctgcatatctgaacatagttcaatcaatgtactgaatataactgctgaagaaattaaaccaaatcaggttggaggagaacgtacaaatcaaaaatggagtgtggcgtcaagacctggatcacaggaaggttgctatagtggatgctccttgagctacacaaattctcatgtagaaaaagatgacttaccttagacatgtggactggaatttttttcattaatgtgttcatcaagtttcacatctaagttgaaacagggtgtgtcataaagtcagttatctctaataacttaagatggtctgagttgtttgtttggacttccctgtcttcccccaaagagttgaaatcttaaatctatttaaaaggatataaaagctttggatatgtatttttagtaacagaagcatctggttctgtgaataaaggaatgtatagatgtttggatggaaacaaaagcactagactgagtttcctcttataggtattaaaaatagcacttttaggaaactgattattgtaaatgtttaattttgtctcaaatatagttggcattggaagtttagcctttacttgaatgtatactgtagatttttaacaaagcgagttctatatttattatgtttagtgtggtttgaaattacctctttcatatgttttaaataaagtgaaatttatgtatgttttgtacatagatacacatgattatgttaagaggctttaagatttaaaagtttcacacaaccataagtatagtatttcatgccagtaaaatttttttagtggtattctgtttacagatgtattaggaccattgatgcattacatttaagaattctctttaatacatctgggcaataaatattgaaaggtattccatgaagctgagttctttagataatcaacactactaacattacatttttgagatttttatgacattagatttttattttgtatatgtagaatattataatttttaaaaggactattgatgatagaagaataggggcaagacgacaaaagtacctttgaataaaacaatttaagaaattggtttaagatattggatgatagaagatatttaagatatctagatggtgatattttccttacaagatgggtaccagtatagtaatatctgtatactaactagggctttgtattgtcaataattttttaataattttttaatgaggtatttaccactgaagaaatatgataatataaaaccatcaaattttataattgagatgatactctggaaaaacatgtcatttcattttcagaaaactcttaagctctcttcagtctctgtaatgtttctgattgcatgtttcttcatgaaaagtatgttgttgttttgatagtaataataataaatgtaggctcagctctttcccaggattttcatcaaaaagctttaagtgcctaaccctgcttgtctctgtacatagaagcctgcacagatccaacccttgctaggtatcatagtttaggcccatttaccttcccctgtactggcagttcagccgcttacatgcactcaccctgtttgtggctattttaaattcatattattaaaaaacaaaaaaaacccacctatttgtgttgtccattcactatacgtaactatgtaactctttggagttgcatagcagcagccattttttcagggctgataggatatcattaagagtgtcttatgagacattagtggatatactcatagtaaccatatttatagttttaaagagctagctcttgagcattagtcactaccttcagcttgatgcatggtcacttctttactatttaaaatactacacattgtacaaaatatcgaagacactaccatatgctaaaggaagaaatctagctgggatataggatttttgttgtttttgtttttgtttgttttgctatttagcaataacatggtcaaaaaggcaatcagaaattttaaatacagttaatggatacatttggcaacaattttcccccgagggttttccatggtgtactttgcaagaaataagcactctaatttttaaagtaaatctcttattttagcaaatattatatttcatgacaatggagttctagaaagcagcatctgttttttgttgcgtgtttccattttaaagtgagttgagttctcaaattggaaagaaagattccttgagacgtacttttaaaatctaaagtgtgaaagaaacagcagagtaaaagccagactcattgcaccttcaatgtctgcatagatccagaagttgtacattttacctaacaacatcacttttgttgaacattccaactccagaatgatccccaatcaccctaatctcagaatgctggaatgatgtctgttggaaaacccaggactccacacacaaaactcctgggattttgtttcccatctctttctaggtgtttgcaatgtacaaataatacagctgtgctaatctcacatttagccatgatagatgatggttctagagtgtacttccatttgtaagtcctcctgataagtgctttcttgtttatcactatgtaaatctgaaatattttgtacttcatttgtttttatccattctgaattttcaaagcataaaaatgtcaaagaaaaattgagataaacattttgttcaccattaaatgtttgcatctgcagtctatgatgagaaacaatgaaattatgactaaaatttaacaaatagtattttcttatagaagcaatgtattaaatgattagatacacaggacagttcacagcaaattgtttacttacatggcataattgaaatactgttatttgtaaagagttctatactgcctaccttagctaaccagaattgttcatagacttgtgataatatggtgttatgggaaaacacattttgtgcgcatgatgaagagagcaccgtgaatctagtcttgactgcccctggtggaacatttgaaagcccttgggactccaggagagatgtttttgcagcatgtatgctaaatttgtgagttagcaagaccctgctgtgattactatgttgtacagatcttcaaagtatattgcctaatatgagtcatgttatttctagattgaatttaaagtaagtatggattatggaagtctagtaaatatacttttcccta

SEQ ID NO: 414789 - DNA, 5283 bp, Homo sapiens
aggcgtcagaagggggcggggagcagaaaacggccgggtgaatcactgggcgtaacaggtgccgcagccgcagctgcgcccgcagcgcgcgcggaccgcagggataaggtcttctttttctccgggtttttttggaggagatgcctacatagaagagtgacagcagctagactaaatgtttaactgctgaactagttcctcaggtatcctggctctagagattgctatgggagattggatgactgttacagatccaggtctgtcttcagaaagcaaaactatctctcaatatacctcagaaacaaagatgtctccatcaagtttatactcacagcaagtgctatgttcttcaatacctttatcgaaaaatgtgcacagttttttcagtgccttctgcacagaagataatattgaacagagtatctcatatcttgatcaggtaacatgtttttgtaaaaaacagtagcataaatcatgttatataatagaatgtatcaaaattatgagaaaaacatttgtcaaacacaagtttgttgtttatgtagtgcccctgagacttagattttcagagaaccttggtgattatctcatctagagatagcaagtctaacttttttgtgtggagcaccttggcctcctcattgtcccaggggctcctccactgagagtccagccatcactttatggatgcagaaacccaagtgccttgctccatgtcacagatttatagcagagactaaaagagccccgtcctcttaactctttgtcctttgggatattgaccattttcttaactatttcaagatagttttctatttttctaaggaaagatttctatcttttgattttttttttactaagttgcccagtaaccaaccttttaaaataattcacatttatttttaatttttgacaaaaattatatatatttgtcatgttcaacataatgtttcataatacacattgtgaaatggctcagtgtgcatacctcccatacttatatcattttttgtggtgagaatttacttgctcagcaatttcaggaatatagtacgtagttattagctgaggtcaccgtgttgtacaatagatctattaaacttattcttcctatctaactgaaagtttgtatcctctgaccagtatctcctcaactgtaaccaactttaagaaaacattttctcctaccaggaattgactacttttggttttccttcattatatgaagaatccaaaggtaaagagacaaagagagagttaaatatagtagctgtactaaattgtatgaatgagctgcttgtgcttcagcggaagaaccttctagctcaggaaaatgtggagacacagaatttgaagctgggaagtgatatggaccatctacagagctgctactcaaaacttaaggaacaactggaaacctccaggagggaaatgattgggcttcaggaaagagacagacagttacaatgtaagaacaggaatttgcatcagctactaaagaatgagaaagatgaggtgcaaaaattacaaaatatcattgcaagtcgagctactcagtataatcatgatatgaagagaaaagagcgtgaatataataaactgaaggaacgtctacatcaacttgttatgaacaagaaagataagaaaatagctatggacattttgaattatgtcgggagagctgatggaaaaagaggctcctggaggactggtaaaactgaagccaggaatgaagatgaaatgtataaaattctcttgaatgattatgaatatcgtcagaaacaaatcctaatggaaaatgcagaacttaagaaggttcttcaacaaatgaaaaaggaaatgatttctcttctttctccccaaaagaagaaacctagagaaagagtagatgatagtacaggaactgttatttccgatgttgaagaagatgccggggaactaagcagagagagtatgtgggacctttcctgtgaaactgtgagagagcagcttacaaacagcatcagaaaacagtggagaattttgaaaagtcatgtagaaaagcttgataaccaagtttcaaaggtacacctggaaggttttaatgatgaagatgtaatctcacgacaagaccatgaacaagaaactgaaaaactcgagttagaaattcagcagtgtaaagaaatgattaaaactcagcaacagcttttacagcagcagctcgctactgcatatgatgatgataccacttcactattacgagactgttatttgttggaagaaaaggaacgtctcaaagaagaatggtccctttttaaagagcagaaaaagaattttgagagggagagacgaagctttacagaagccgctattcgcctgggattggagagaaaggcatttgaagaagaaagagccagttggttaaagcagcagtttctaaatatgactacctttgaccaccagaactcagaaaatgtgaaacttttcagtgccttctcaggaagttctgattgggacaatcttatagtgcactcgaggcagccgcaaaagaagcctcacagtgtgtctaatgggtctccagtttgcatgtctaaacttactaaatctcttcctgcttcaccttccacttcagacttttgccagacacgttcctgcatatctgaacatagttcaatcaatgtactgaatataactgctgaagaaattaaaccaaatcaggttggaggagaacgtacaaatcaaaaatggagtgtggcgtcaagacctggatcacaggaaggttgctatagtggatgctccttgagctacacaaattctcatgtagaaaaagatgacttaccttagacatgtggactggaatttttttcattaatgtgttcatcaagtttcacatctaagttgaaacagggtgtgtcataaagtcagttatctctaataacttaagatggtctgagttgtttgtttggacttccctgtcttcccccaaagagttgaaatcttaaatctatttaaaaggatataaaagctttggatatgtatttttagtaacagaagcatctggttctgtgaataaaggaatgtatagatgtttggatggaaacaaaagcactagactgagtttcctcttataggtattaaaaatagcacttttaggaaactgattattgtaaatgtttaattttgtctcaaatatagttggcattggaagtttagcctttacttgaatgtatactgtagatttttaacaaagcgagttctatatttattatgtttagtgtggtttgaaattacctctttcatatgttttaaataaagtgaaatttatgtatgttttgtacatagatacacatgattatgttaagaggctttaagatttaaaagtttcacacaaccataagtatagtatttcatgccagtaaaatttttttagtggtattctgtttacagatgtattaggaccattgatgcattacatttaagaattctctttaatacatctgggcaataaatattgaaaggtattccatgaagctgagttctttagataatcaacactactaacattacatttttgagatttttatgacattagatttttattttgtatatgtagaatattataatttttaaaaggactattgatgatagaagaataggggcaagacgacaaaagtacctttgaataaaacaatttaagaaattggtttaagatattggatgatagaagatatttaagatatctagatggtgatattttccttacaagatgggtaccagtatagtaatatctgtatactaactagggctttgtattgtcaataattttttaataattttttaatgaggtatttaccactgaagaaatatgataatataaaaccatcaaattttataattgagatgatactctggaaaaacatgtcatttcattttcagaaaactcttaagctctcttcagtctctgtaatgtttctgattgcatgtttcttcatgaaaagtatgttgttgttttgatagtaataataataaatgtaggctcagctctttcccaggattttcatcaaaaagctttaagtgcctaaccctgcttgtctctgtacatagaagcctgcacagatccaacccttgctaggtatcatagtttaggcccatttaccttcccctgtactggcagttcagccgcttacatgcactcaccctgtttgtggctattttaaattcatattattaaaaaacaaaaaaaacccacctatttgtgttgtccattcactatacgtaactatgtaactctttggagttgcatagcagcagccattttttcagggctgataggatatcattaagagtgtcttatgagacattagtggatatactcatagtaaccatatttatagttttaaagagctagctcttgagcattagtcactaccttcagcttgatgcatggtcacttctttactatttaaaatactacacattgtacaaaatatcgaagacactaccatatgctaaaggaagaaatctagctgggatataggatttttgttgtttttgtttttgtttgttttgctatttagcaataacatggtcaaaaaggcaatcagaaattttaaatacagttaatggatacatttggcaacaattttcccccgagggttttccatggtgtactttgcaagaaataagcactctaatttttaaagtaaatctcttattttagcaaatattatatttcatgacaatggagttctagaaagcagcatctgttttttgttgcgtgtttccattttaaagtgagttgagttctcaaattggaaagaaagattccttgagacgtacttttaaaatctaaagtgtgaaagaaacagcagagtaaaagccagactcattgcaccttcaatgtctgcatagatccagaagttgtacattttacctaacaacatcacttttgttgaacattccaactccagaatgatccccaatcaccctaatctcagaatgctggaatgatgtctgttggaaaacccaggactccacacacaaaactcctgggattttgtttcccatctctttctaggtgtttgcaatgtacaaataatacagctgtgctaatctcacatttagccatgatagatgatggttctagagtgtacttccatttgtaagtcctcctgataagtgctttcttgtttatcactatgtaaatctgaaatattttgtacttcatttgtttttatccattctgaattttcaaagcataaaaatgtcaaagaaaaattgagataaacattttgttcaccatta

SEQ ID NO: 414790 - DNA, 3355 bp, Homo sapiens
aggcgtcagaagggggcggggagcagaaaacggccgggtgaatcactgggcgtaacaggtgccgcagccgcagctgcgcccgcagcgcgcgcggaccgcagggataaggtcttctttttctccgggtttttttggaggagatgcctacatagaagagtgacagcagctagactaaatgtttaactgctgaactagttcctcaggtatcctggctctagagattgctatgggagattggatgactgttacagatccaggtctgtcttcagaaagcaaaactatctctcaatatacctcagaaacaaagatgtctccatcaagtttatactcacagcaagtgctatgttcttcaatacctttatcgaaaaatgtgcacagttttttcagtgccttctgcacagaagataatattgaacagagtatctcatatcttgatcaggtaacatgtttttgtaaaaaacagtagcataaatcatgttatataatagaatgtatcaaaattatgagaaaaacatttgtcaaacacaagtttgttgtttatgtagtgcccctgagacttagattttcagagaaccttggtgattatctcatctagagatagcaagtctaacttttttgtgtggagcaccttggcctcctcattgtcccaggggctcctccactgagagtccagccatcactttatggatgcagaaacccaagtgccttgctccatgtcacagatttatagcagagactaaaagagccccgtcctcttaactctttgtcctttgggatattgaccattttcttaactatttcaagatagttttctatttttctaaggaaagatttctatcttttgattttttttttactaagttgcccagtaaccaaccttttaaaataattcacatttatttttaatttttgacaaaaattatatatatttgtcatgttcaacataatgtttcataatacacattgtgaaatggctcagtgtgcatacctcccatacttatatcattttttgtggtgagaatttacttgctcagcaatttcaggaatatagtacgtagttattagctgaggtcaccgtgttgtacaatagatctattaaacttattcttcctatctaactgaaagtttgtatcctctgaccagtatctcctcaactgtaaccaactttaagaaaacattttctcctaccaggaattgactacttttggttttccttcattatatgaagaatccaaaggtaaagagacaaagagagagttaaatatagtagctgtactaaattgtatgaatgagctgcttgtgcttcagcggaagaaccttctagctcaggaaaatgtggagacacagaatttgaagctgggaagtgatatggaccatctacagagctgctactcaaaacttaaggaacaactggaaacctccaggagggaaatgattgggcttcaggaaagagacagacagttacaatgtaagaacaggaatttgcatcagctactaaagaatgagaaagatgaggtgcaaaaattacaaaatatcattgcaagtcgagctactcagtataatcatgatatgaagagaaaagagcgtgaatataataaactgaaggaacgtctacatcaacttgttatgaacaagaaagataagaaaatagctatggacattttgaattatgtcgggagagctgatggaaaaagaggctcctggaggactggtaaaactgaagccaggaatgaagatgaaatgtataaaattctcttgaatgattatgaatatcgtcagaaacaaatcctaatggaaaatgcagaacttaagaaggttcttcaacaaatgaaaaaggaaatgatttctcttctttctccccaaaagaagaaacctagagaaagagtagatgatagtacaggaactgttatttccgatgttgaagaagatgccggggaactaagcagagagagtatgtgggacctttcctgtgaaactgtgagagagcagcttacaaacagcatcagaaaacagtggagaattttgaaaagtcatgtagaaaagcttgataaccaagtttcaaaggtacacctggaaggttttaatgatgaagatgtaatctcacgacaagaccatgaacaagaaactgaaaaactcgagttagaaattcagcagtgtaaagaaatgattaaaactcagcaacagcttttacagcagcagctcgctactgcatatgatgatgataccacttcactattacgagactgttatttgttggaagaaaaggaacgtctcaaagaagaatggtccctttttaaagagcagaaaaagaattttgagagggagagacgaagctttacagaagccgctattcgcctgggattggagagaaaggcatttgaagaagaaagagccagttggttaaagcagcagtttctaaatatgactacctttgaccaccagaactcagaaaatgtgaaacttttcagtgccttctcaggaagttctgattgggacaatcttatagtgcactcgaggcagccgcaaaagaagcctcacagtgtgtctaatgggtctccagtttgcatgtctaaacttactaaatctcttcctgcttcaccttccacttcagacttttgccagacacgttcctgcatatctgaacatagttcaatcaatgtactgaatataactgctgaagaaattaaaccaaatcaggttggaggagaacgtacaaatcaaaaatggagtgtggcgtcaagacctggatcacaggaaggttgctatagtggatgctccttgagctacacaaattctcatgtagaaaaagatgacttaccttagacatgtggactggaatttttttcattaatgtgttcatcaagtttcacatctaagttgaaacagggtgtgtcataaagtcagttatctctaataacttaagatggtctgagttgtttgtttggacttccctgtcttcccccaaagagttgaaatcttaaatctatttaaaaggatataaaagctttggatatgtatttttagtaacagaagcatctggttctgtgaataaaggaatgtatagatgtttggatggaaacaaaagcactagactgagtttcctcttataggtattaaaaatagcacttttaggaaactgatcatggaacgtcaagtgggtccactatcgtggctggacgttagccttactgcactgttccgaaatttaccaggcgtcccatataggtccgggggaaacccccctaaggcgtacaagagaaccgcgtcagcaccaaaccacaatcagagccacactcacccactcactacgccatctcgtcgcagaaagagcgcaccccgccgcggtatacactgt

SEQ ID NO: 414791 - DNA, 2239 bp, Homo sapiens
aggcgtcagaagggggcggggagcagaaaacggccgggtgaatcactgggcgtaacaggtgccgcagccgcagctgcgcccgcagcgcgcgcggaccgcagggataaggtcttctttttctccgggtttttttggaggagatgcctacatagaagagtgacagcagctagactaaatgtttaactgctgaactagttcctcaggtatcctggctctagagattgctatgggagattggatgactgttacagatccaggtctgtcttcagaaagcaaaactatctctcaatatacctcagaaacaaagatgtctccatcaagtttatactcacagcaagtgctatgttcttcaatacctttatcgaaaaatgtgcacagttttttcagtgccttctgcacagaagataatattgaacagagtatctcatatcttgatcaggtaacatgtttttgtaaaaaacagtagcataaatcatgttatataatagaatgtatcaaaattatgagaaaaacatttgtcaaacacaagtttgttgtttatgtagtgcccctgagacttagattttcagagaaccttggtgattatctcatctagagatagcaagtctaacttttttgtgtggagcaccttggcctcctcattgtcccaggggctcctccactgagagtccagccatcactttatggatgcagaaacccaagtgccttgctccatgtcacagatttatagcagagactaaaagagccccgtcctcttaactctttgtcctttgggatattgaccattttcttaactatttcaagatagttttctatttttctaaggaaagatttctatcttttgattttttttttactaagttgcccagtaaccaaccttttaaaataattcacatttatttttaatttttgacaaaaattatatatatttgtcatgttcaacataatgtttcataatacacattgtgaaatggctcagtgtgcatacctcccatacttatatcattttttgtggtgagaatttacttgctcagcaatttcaggaatatagtacgtagttattagctgaggtcaccgtgttgtacaatagatctattaaacttattcttcctatctaactgaaagtttgtatcctctgaccagtatctcctcaactgtaaccaactttaagaaaacattttctcctaccaggaattgactacttttggttttccttcattatatgaagaatccaaaggtaaagagacaaagagagagttaaatatagtagctgtactaaattgtatgaatgagctgcttgtgcttcagcggaagaaccttctagctcaggaaaatgtggagacacagaatttgaagctgggaagtgatatggaccatctacagagctgctactcaaaacttaaggaacaactggaaacctccaggagggaaatgattgggcttcaggaaagagacagacagttacaatgtaagaacaggaatttgcatcagctactaaagaatgagaaagatgaggtgcaaaaattacaaaatatcattgcaagtcgagctactcagtataatcatgatatgaagagaaaagagcgtgaatataataaactgaaggaacgtctacatcaacttgttatgaacaagaaagataagaaaatagctatggacattttgaattatgtcgggagagctgatggaaaaagaggctcctggaggactggtaaaactgaagccaggtaaagtccagtttaaattgataaatgtaatcagacttccttctatcctgcattttcatactgacagtttctttctcaggaatgaagatgaaatgtataaaattctcttgaatgattatgaatatcgtcagaaacaaatcctaatggaaaatgcagaacttaagaaggttcttcaacaaatgaaaaaggaaatgatttctcttctttctccccaaaagaagaaacctagagaaagagtagatgatagtacaggaactgttatttccgatgttgaagaagatgccggggaactaagcagagagagtatgtgggacctttcctgtgaaactgtgagagagcagcttacaaacagcatcagaaaacagtggagaattttgaaaagtcatgtagaaaagcttgataaccaaggtaaccactgcttctatgcatgtaaagtgagttgtgacatttggtaaggtgttgatttttagtcacttagaaagccgcattataggctcagagctaaagtacta

SEQ ID NO: 414792 - DNA, 1334 bp, Homo sapiens
ctttccaaactcttcctcatttcccaggtctttgatctgaaaaaacaatctggttagaaaagttgccctccactcataattcactgtgaaatggaaactgcataaacagagacacacagaccctggaaacaccacttgaatgaatgaagtgaatggatgatgtatgtgtgtgtgcatgtgtgtatgttataggtcacatacacatacaaagtgtgcgtctgtgtgtgtataagaggtctaaacttacaaactgagcgtgtcagagtgtgtgatatgacttgtgataatatggtgttatgggaaaacacattttgtgcgcatgatgaagagagcaccgtgaatctagtcttgactgcccctggtggaacatttgaaagcccttgggactccaggagagatgtttttgcagcatgtatgctaaatttgtgagttagcaagaccctgctgtgattactatgttgtacagatcttcaaagtatattgcctaatatgagtcatgttatttctagattgaatttaaagtaagtatggattatggaagtctagtaaatatacttttccctatttttgtcctttttcagtcttttggtaagcatttattaagtacctgctgtatgtcaaggcttactactgctttccaatccttggtgatatgaagacagataagcacgctgcctgctattaggaatctgagctgagtggaaggccaactattaaacctacattgtaataaacaatggtggatgctacggacacattcagtctgttcataaaacatggactgatgggtctgctccaggccacatttgttttttaacagtaacgtggctaggcttccatttataagtcttagcattatttcctttgtgaagtactatgtaacagatgattgtttgctagattttgttttctacaatcaaaatgttgacctgcaaagcagtgtaggattttctctcctcaagagcgtgtattattatctagtagaaaaagcattcccaaagacttggtccatgcagataaggataatgaaattgctcactctaatcctttttctaaatacagtgtttttcaagctggatgtaaattagagtgggtggatattgattaaattatttgatttatatgaaatcaaatgactggttgaggtttttttgaacatttacaaataatggattcctgagagctcaggaagtactgtaatgtcagtgacatatgaagctcctgataaagatccacctcattcatatatttgagcttcagaaatacatgtacctagtataatgcttaacagcacataatatttgttgatgagaaatacactgatgaaacaacac

SEQ ID NO: 414793 - DNA, 327 bp, Homo sapiens
ggagtctcattttttttctcaagacatttaaatactgggccatatatgcataagacacagcacagaaatgattttgatgtggcttcctctggtaatcaaactgaagactacttgcctgagcatctaaagccattgtaaggtactagcctttcctcttcatctctctccgcttgtaggttatttccgatgttgaagaagatgccggggaactaagcagagagagtatgtgggacctttcctgtgaaactgtgagagagcagcttacaaacagcatcagaaaacagtggagaattttgaaaagtcatgtagaaaagcttgataaccaag

SEQ ID NO: 414794 - DNA, 5779 bp, Homo sapiens
aggcgtcagaagggggcggggagcagaaaacggccgggtgaatcactgggcgtaacaggtgccgcagccgcagctgcgcccgcagcgcgcgcggaccgcagggataaggtcttctttttctccgggtttttttggaggagatgcctacatagaagagtgacagcagctagactaaatgtttaactgctgaactagttcctcaggtatcctggctctagagattgctatgggagattggatgactgttacagatccaggtctgtcttcagaaagcaaaactatctctcaatatacctcagaaacaaagatgtctccatcaagtttatactcacagcaagtgctatgttcttcaatacctttatcgaaaaatgtgcacagttttttcagtgccttctgcacagaagataatattgaacagagtatctcatatcttgatcaggtaacatgtttttgtaaaaaacagtagcataaatcatgttatataatagaatgtatcaaaattatgagaaaaacatttgtcaaacacaagtttgttgtttatgtagtgcccctgagacttagattttcagagaaccttggtgattatctcatctagagatagcaagtctaacttttttgtgtggagcaccttggcctcctcattgtcccaggggctcctccactgagagtccagccatcactttatggatgcagaaacccaagtgccttgctccatgtcacagatttatagcagagactaaaagagccccgtcctcttaactctttgtcctttgggatattgaccattttcttaactatttcaagatagttttctatttttctaaggaaagatttctatcttttgattttttttttactaagttgcccagtaaccaaccttttaaaataattcacatttatttttaatttttgacaaaaattatatatatttgtcatgttcaacataatgtttcataatacacattgtgaaatggctcagtgtgcatacctcccatacttatatcattttttgtggtgagaatttacttgctcagcaatttcaggaatatagtacgtagttattagctgaggtcaccgtgttgtacaatagatctattaaacttattcttcctatctaactgaaagtttgtatcctctgaccagtatctcctcaactgtaaccaactttaagaaaacattttctcctaccaggaattgactacttttggttttccttcattatatgaagaatccaaaggtaaagagacaaagagagagttaaatatagtagctgtactaaattgtatgaatgagctgcttgtgcttcagcggaagaaccttctagctcaggaaaatgtggagacacagaatttgaagctgggaagtgatatggaccatctacagagctgctactcaaaacttaaggaacaactggaaacctccaggagggaaatgattgggcttcaggaaagagacagacagttacaatgtaagaacaggaatttgcatcagctactaaagaatgagaaagatgaggtgcaaaaattacaaaatatcattgcaagtcgagctactcagtataatcatgatatgaagagaaaagagcgtgaatataataaactgaaggaacgtctacatcaacttgttatgaacaagaaagataagaaaatagctatggacattttgaattatgtcgggagagctgatggaaaaagaggctcctggaggactggtaaaactgaagccaggaatgaagatgaaatgtataaaattctcttgaatgattatgaatatcgtcagaaacaaatcctaatggaaaatgcagaacttaagaaggttcttcaacaaatgaaaaaggaaatgatttctcttctttctccccaaaagaagaaacctagagaaagagtagatgatagtacaggaactgttatttccgatgttgaagaagatgccggggaactaagcagagagagtatgtgggacctttcctgtgaaactgtgagagagcagcttacaaacagcatcagaaaacagtggagaattttgaaaagtcatgtagaaaagcttgataaccaagtttcaaaggtacacctggaaggttttaatgatgaagatgtaatctcacgacaagaccatgaacaagaaactgaaaaactcgagttagaaattcagcagtgtaaagaaatgattaaaactcagcaacagcttttacagcagcagctcgctactgcatatgatgatgataccacttcactattacgagactgttatttgttggaagaaaaggaacgtctcaaagaagaatggtccctttttaaagagcagaaaaagaattttgagagggagagacgaagctttacagaagccgctattcgcctgggattggagagaaaggcatttgaagaagaaagagccagttggttaaagcagcagtttctaaatatgactacctttgaccaccagaactcagaaaatgtgaaacttttcagtgccttctcaggaagttctgattgggacaatcttatagtgcactcgaggcagccgcaaaagaagcctcacagtgtgtctaatgggtctccagtttgcatgtctaaacttactaaatctcttcctgcttcaccttccacttcagacttttgccagacacgttcctgcatatctgaacatagttcaatcaatgtactgaatataactgctgaagaaattaaaccaaatcaggttggaggagaacgtacaaatcaaaaatggagtgtggcgtcaagacctggatcacaggaaggttgctatagtggatgctccttgagctacacaaattctcatgtagaaaaagatgacttaccttagacatgtggactggaatttttttcattaatgtgttcatcaagtttcacatctaagttgaaacagggtgtgtcataaagtcagttatctctaataacttaagatggtctgagttgtttgtttggacttccctgtcttcccccaaagagttgaaatcttaaatctatttaaaaggatataaaagctttggatatgtatttttagtaacagaagcatctggttctgtgaataaaggaatgtatagatgtttggatggaaacaaaagcactagactgagtttcctcttataggtattaaaaatagcacttttaggaaactgattattgtaaatgtttaattttgtctcaaatatagttggcattggaagtttagcctttacttgaatgtatactgtagatttttaacaaagcgagttctatatttattatgtttagtgtggtttgaaattacctctttcatatgttttaaataaagtgaaatttatgtatgttttgtacatagatacacatgattatgttaagaggctttaagatttaaaagtttcacacaaccataagtatagtatttcatgccagtaaaatttttttagtggtattctgtttacagatgtattaggaccattgatgcattacatttaagaattctctttaatacatctgggcaataaatattgaaaggtattccatgaagctgagttctttagataatcaacactactaacattacatttttgagatttttatgacattagatttttattttgtatatgtagaatattataatttttaaaaggactattgatgatagaagaataggggcaagacgacaaaagtacctttgaataaaacaatttaagaaattggtttaagatattggatgatagaagatatttaagatatctagatggtgatattttccttacaagatgggtaccagtatagtaatatctgtatactaactagggctttgtattgtcaataattttttaataattttttaatgaggtatttaccactgaagaaatatgataatataaaaccatcaaattttataattgagatgatactctggaaaaacatgtcatttcattttcagaaaactcttaagctctcttcagtctctgtaatgtttctgattgcatgtttcttcatgaaaagtatgttgttgttttgatagtaataataataaatgtaggctcagctctttcccaggattttcatcaaaaagctttaagtgcctaaccctgcttgtctctgtacatagaagcctgcacagatccaacccttgctaggtatcatagtttaggcccatttaccttcccctgtactggcagttcagccgcttacatgcactcaccctgtttgtggctattttaaattcatattattaaaaaacaaaaaaaacccacctatttgtgttgtccattcactatacgtaactatgtaactctttggagttgcatagcagcagccattttttcagggctgataggatatcattaagagtgtcttatgagacattagtggatatactcatagtaaccatatttatagttttaaagagctagctcttgagcattagtcactaccttcagcttgatgcatggtcacttctttactatttaaaatactacacattgtacaaaatatcgaagacactaccatatgctaaaggaagaaatctagctgggatataggatttttgttgtttttgtttttgtttgttttgctatttagcaataacatggtcaaaaaggcaatcagaaattttaaatacagttaatggatacatttggcaacaattttcccccgagggttttccatggtgtactttgcaagaaataagcactctaatttttaaagtaaatctcttattttagcaaatattatatttcatgacaatggagttctagaaagcagcatctgttttttgttgcgtgtttccattttaaagtgagttgagttctcaaattggaaagaaagattccttgagacgtacttttaaaatctaaagtgtgaaagaaacagcagagtaaaagccagactcattgcaccttcaatgtctgcatagatccagaagttgtacattttacctaacaacatcacttttgttgaacattccaactccagaatgatccccaatcaccctaatctcagaatgctggaatgatgtctgttggaaaacccaggactccacacacaaaactcctgggattttgtttcccatctctttctaggtgtttgcaatgtacaaataatacagctgtgctaatctcacatttagccatgatagatgatggttctagagtgtacttccatttgtaagtcctcctgataagtgctttcttgtttatcactatgtaaatctgaaatattttgtacttcatttgtttttatccattctgaattttcaaagcataaaaatgtcaaagaaaaattgagataaacattttgttcaccattaaatgtttgcatctgcagtctatgatgagaaacaatgaaattatgactaaaatttaacaaatagtattttcttatagaagcaatgtattaaatgattagatacacaggacagttcacagcaaattgtttacttacatggcataattgaaatactgttatttgtaaagagttctatactgcctaccttagctaaccagaattgttcatagacttgtgataatatggtgttatgggaaaacacattttgtgcgcatgatgaagagagcaccgtgaatctagtcttgactgcccctggtggaacatttgaaagcccttgggactccaggagagatgtttttgcagcatgtatgctaaatttgtgagttagcaagaccctgctgtgattactatgttgtacagatcttcaaagtatattgcctaatatgagtcatgttatttctagattgaatttaaagtaagtatggattatggaagtctagtaaatatacttttcccta

SEQ ID NO: 414795 - DNA, 5027 bp, Homo sapiens
aggcgtcagaagggggcggggagcagaaaacggccgggtgaatcactgggcgtaacaggtgccgcagccgcagctgcgcccgcagcgcgcgcggaccgcagggataaggtcttctttttctccgggtttttttggaggagatgcctacatagaagagtgacagcagctagactaaatgtttaactgctgaactagttcctcaggtatcctggctctagagattgctatgggagattggatgactgttacagatccaggtctgtcttcagaaagcaaaactatctctcaatatacctcagaaacaaagatgtctccatcaagtttatactcacagcaagtgctatgttcttcaatacctttatcgaaaaatgtgcacagttttttcagtgccttctgcacagaagataatattgaacagagtatctcatatcttgatcaggaattgactacttttggttttccttcattatatgaagaatccaaaggtaaagagacaaagagagagttaaatatagtagctgtactaaattgtatgaatgagctgcttgtgcttcagcggaagaaccttctagctcaggaaaatgtggagacacagaatttgaagctgggaagtgatatggaccatctacagagctgctactcaaaacttaaggaacaactggaaacctccaggagggaaatgattgggcttcaggaaagagacagacagttacaatgtaagaacaggaatttgcatcagctactaaagaatgagaaagatgaggtgcaaaaattacaaaatatcattgcaagtcgagctactcagtataatcatgatatgaagagaaaagagcgtgaatataataaactgaaggaacgtctacatcaacttgttatgaacaagaaagataagaaaatagctatggacattttgaattatgtcgggagagctgatggaaaaagaggctcctggaggactggtaaaactgaagccaggaatgaagatgaaatgtataaaattctcttgaatgattatgaatatcgtcagaaacaaatcctaatggaaaatgcagaacttaagaaggttcttcaacaaatgaaaaaggaaatgatttctcttctttctccccaaaagaagaaacctagagaaagagtagatgatagtacaggaactgttatttccgatgttgaagaagatgccggggaactaagcagagagagtatgtgggacctttcctgtgaaactgtgagagagcagcttacaaacagcatcagaaaacagtggagaattttgaaaagtcatgtagaaaagcttgataaccaagtttcaaaggtacacctggaaggttttaatgatgaagatgtaatctcacgacaagaccatgaacaagaaactgaaaaactcgagttagaaattcagcagtgtaaagaaatgattaaaactcagcaacagcttttacagcagcagctcgctactgcatatgatgatgataccacttcactattacgagactgttatttgttggaagaaaaggaacgtctcaaagaagaatggtccctttttaaagagcagaaaaagaattttgagagggagagacgaagctttacagaagccgctattcgcctgggattggagagaaaggcatttgaagaagaaagagccagttggttaaagcagcagtttctaaatatgactacctttgaccaccagaactcagaaaatgtgaaacttttcagtgccttctcaggaagttctgattgggacaatcttatagtgcactcgaggcagccgcaaaagaagcctcacagtgtgtctaatgggtctccagtttgcatgtctaaacttactaaatctcttcctgcttcaccttccacttcagacttttgccagacacgttcctgcatatctgaacatagttcaatcaatgtactgaatataactgctgaagaaattaaaccaaatcaggttggaggagaacgtacaaatcaaaaatggagtgtggcgtcaagacctggatcacaggaaggttgctatagtggatgctccttgagctacacaaattctcatgtagaaaaagatgacttaccttagacatgtggactggaatttttttcattaatgtgttcatcaagtttcacatctaagttgaaacagggtgtgtcataaagtcagttatctctaataacttaagatggtctgagttgtttgtttggacttccctgtcttcccccaaagagttgaaatcttaaatctatttaaaaggatataaaagctttggatatgtatttttagtaacagaagcatctggttctgtgaataaaggaatgtatagatgtttggatggaaacaaaagcactagactgagtttcctcttataggtattaaaaatagcacttttaggaaactgattattgtaaatgtttaattttgtctcaaatatagttggcattggaagtttagcctttacttgaatgtatactgtagatttttaacaaagcgagttctatatttattatgtttagtgtggtttgaaattacctctttcatatgttttaaataaagtgaaatttatgtatgttttgtacatagatacacatgattatgttaagaggctttaagatttaaaagtttcacacaaccataagtatagtatttcatgccagtaaaatttttttagtggtattctgtttacagatgtattaggaccattgatgcattacatttaagaattctctttaatacatctgggcaataaatattgaaaggtattccatgaagctgagttctttagataatcaacactactaacattacatttttgagatttttatgacattagatttttattttgtatatgtagaatattataatttttaaaaggactattgatgatagaagaataggggcaagacgacaaaagtacctttgaataaaacaatttaagaaattggtttaagatattggatgatagaagatatttaagatatctagatggtgatattttccttacaagatgggtaccagtatagtaatatctgtatactaactagggctttgtattgtcaataattttttaataattttttaatgaggtatttaccactgaagaaatatgataatataaaaccatcaaattttataattgagatgatactctggaaaaacatgtcatttcattttcagaaaactcttaagctctcttcagtctctgtaatgtttctgattgcatgtttcttcatgaaaagtatgttgttgttttgatagtaataataataaatgtaggctcagctctttcccaggattttcatcaaaaagctttaagtgcctaaccctgcttgtctctgtacatagaagcctgcacagatccaacccttgctaggtatcatagtttaggcccatttaccttcccctgtactggcagttcagccgcttacatgcactcaccctgtttgtggctattttaaattcatattattaaaaaacaaaaaaaacccacctatttgtgttgtccattcactatacgtaactatgtaactctttggagttgcatagcagcagccattttttcagggctgataggatatcattaagagtgtcttatgagacattagtggatatactcatagtaaccatatttatagttttaaagagctagctcttgagcattagtcactaccttcagcttgatgcatggtcacttctttactatttaaaatactacacattgtacaaaatatcgaagacactaccatatgctaaaggaagaaatctagctgggatataggatttttgttgtttttgtttttgtttgttttgctatttagcaataacatggtcaaaaaggcaatcagaaattttaaatacagttaatggatacatttggcaacaattttcccccgagggttttccatggtgtactttgcaagaaataagcactctaatttttaaagtaaatctcttattttagcaaatattatatttcatgacaatggagttctagaaagcagcatctgttttttgttgcgtgtttccattttaaagtgagttgagttctcaaattggaaagaaagattccttgagacgtacttttaaaatctaaagtgtgaaagaaacagcagagtaaaagccagactcattgcaccttcaatgtctgcatagatccagaagttgtacattttacctaacaacatcacttttgttgaacattccaactccagaatgatccccaatcaccctaatctcagaatgctggaatgatgtctgttggaaaacccaggactccacacacaaaactcctgggattttgtttcccatctctttctaggtgtttgcaatgtacaaataatacagctgtgctaatctcacatttagccatgatagatgatggttctagagtgtacttccatttgtaagtcctcctgataagtgctttcttgtttatcactatgtaaatctgaaatattttgtacttcatttgtttttatccattctgaattttcaaagcataaaaatgtcaaagaaaaattgagataaacattttgttcaccattaaatgtttgcatctgcagtctatgatgagaaacaatgaaattatgactaaaatttaacaaatagtattttcttatagaagcaatgtattaaatgattagatacacaggacagttcacagcaaattgtttacttacatggcataattgaaatactgttatttgtaaagagttctatactgcctaccttagctaaccagaattgttcatagacttgtgataatatggtgttatgggaaaacacattttgtgcgcatgatgaagagagcaccgtgaatctagtcttgactgcccctggtggaacatttgaaagcccttgggactccaggagagatgtttttgcagcatgtatgctaaatttgtgagttagcaagaccctgctgtgattactatgttgtacagatcttcaaagtatattgcctaatatgagtcatgttatttctagattgaatttaaagtaagtatggattatggaagtctagtaaatatacttttcccta

SEQ ID NO: 414796 - DNA, 4944 bp, Homo sapiens
cggggtgggaacctcggaaacctgcggaggccgggaggcggctgcaaggggcggggaaggcgggagcccgcagcggaggaggggccgcgggcgggaggcgctgcgaggcgctgctggccctcgggctgcgggagccgggctaggacgccgagcggtgactccccgccgctcccgggggccgtgacgaaagcaaaactatctctcaatatacctcagaaacaaagatgtctccatcaagtttatactcacagcaagtgctatgttcttcaatacctttatcgaaaaatgtgcacagttttttcagtgccttctgcacagaagataatattgaacagagtatctcatatcttgatcaggaattgactacttttggttttccttcattatatgaagaatccaaaggtaaagagacaaagagagagttaaatatagtagctgtactaaattgtatgaatgagctgcttgtgcttcagcggaagaaccttctagctcaggaaaatgtggagacacagaatttgaagctgggaagtgatatggaccatctacagagctgctactcaaaacttaaggaacaactggaaacctccaggagggaaatgattgggcttcaggaaagagacagacagttacaatgtaagaacaggaatttgcatcagctactaaagaatgagaaagatgaggtgcaaaaattacaaaatatcattgcaagtcgagctactcagtataatcatgatatgaagagaaaagagcgtgaatataataaactgaaggaacgtctacatcaacttgttatgaacaagaaagataagaaaatagctatggacattttgaattatgtcgggagagctgatggaaaaagaggctcctggaggactggtaaaactgaagccaggaatgaagatgaaatgtataaaattctcttgaatgattatgaatatcgtcagaaacaaatcctaatggaaaatgcagaacttaagaaggttcttcaacaaatgaaaaaggaaatgatttctcttctttctccccaaaagaagaaacctagagaaagagtagatgatagtacaggaactgttatttccgatgttgaagaagatgccggggaactaagcagagagagtatgtgggacctttcctgtgaaactgtgagagagcagcttacaaacagcatcagaaaacagtggagaattttgaaaagtcatgtagaaaagcttgataaccaagtttcaaaggtacacctggaaggttttaatgatgaagatgtaatctcacgacaagaccatgaacaagaaactgaaaaactcgagttagaaattcagcagtgtaaagaaatgattaaaactcagcaacagcttttacagcagcagctcgctactgcatatgatgatgataccacttcactattacgagactgttatttgttggaagaaaaggaacgtctcaaagaagaatggtccctttttaaagagcagaaaaagaattttgagagggagagacgaagctttacagaagccgctattcgcctgggattggagagaaaggcatttgaagaagaaagagccagttggttaaagcagcagtttctaaatatgactacctttgaccaccagaactcagaaaatgtgaaacttttcagtgccttctcaggaagttctgattgggacaatcttatagtgcactcgaggcagccgcaaaagaagcctcacagtgtgtctaatgggtctccagtttgcatgtctaaacttactaaatctcttcctgcttcaccttccacttcagacttttgccagacacgttcctgcatatctgaacatagttcaatcaatgtactgaatataactgctgaagaaattaaaccaaatcaggttggaggagaacgtacaaatcaaaaatggagtgtggcgtcaagacctggatcacaggaaggttgctatagtggatgctccttgagctacacaaattctcatgtagaaaaagatgacttaccttagacatgtggactggaatttttttcattaatgtgttcatcaagtttcacatctaagttgaaacagggtgtgtcataaagtcagttatctctaataacttaagatggtctgagttgtttgtttggacttccctgtcttcccccaaagagttgaaatcttaaatctatttaaaaggatataaaagctttggatatgtatttttagtaacagaagcatctggttctgtgaataaaggaatgtatagatgtttggatggaaacaaaagcactagactgagtttcctcttataggtattaaaaatagcacttttaggaaactgattattgtaaatgtttaattttgtctcaaatatagttggcattggaagtttagcctttacttgaatgtatactgtagatttttaacaaagcgagttctatatttattatgtttagtgtggtttgaaattacctctttcatatgttttaaataaagtgaaatttatgtatgttttgtacatagatacacatgattatgttaagaggctttaagatttaaaagtttcacacaaccataagtatagtatttcatgccagtaaaatttttttagtggtattctgtttacagatgtattaggaccattgatgcattacatttaagaattctctttaatacatctgggcaataaatattgaaaggtattccatgaagctgagttctttagataatcaacactactaacattacatttttgagatttttatgacattagatttttattttgtatatgtagaatattataatttttaaaaggactattgatgatagaagaataggggcaagacgacaaaagtacctttgaataaaacaatttaagaaattggtttaagatattggatgatagaagatatttaagatatctagatggtgatattttccttacaagatgggtaccagtatagtaatatctgtatactaactagggctttgtattgtcaataattttttaataattttttaatgaggtatttaccactgaagaaatatgataatataaaaccatcaaattttataattgagatgatactctggaaaaacatgtcatttcattttcagaaaactcttaagctctcttcagtctctgtaatgtttctgattgcatgtttcttcatgaaaagtatgttgttgttttgatagtaataataataaatgtaggctcagctctttcccaggattttcatcaaaaagctttaagtgcctaaccctgcttgtctctgtacatagaagcctgcacagatccaacccttgctaggtatcatagtttaggcccatttaccttcccctgtactggcagttcagccgcttacatgcactcaccctgtttgtggctattttaaattcatattattaaaaaacaaaaaaaacccacctatttgtgttgtccattcactatacgtaactatgtaactctttggagttgcatagcagcagccattttttcagggctgataggatatcattaagagtgtcttatgagacattagtggatatactcatagtaaccatatttatagttttaaagagctagctcttgagcattagtcactaccttcagcttgatgcatggtcacttctttactatttaaaatactacacattgtacaaaatatcgaagacactaccatatgctaaaggaagaaatctagctgggatataggatttttgttgtttttgtttttgtttgttttgctatttagcaataacatggtcaaaaaggcaatcagaaattttaaatacagttaatggatacatttggcaacaattttcccccgagggttttccatggtgtactttgcaagaaataagcactctaatttttaaagtaaatctcttattttagcaaatattatatttcatgacaatggagttctagaaagcagcatctgttttttgttgcgtgtttccattttaaagtgagttgagttctcaaattggaaagaaagattccttgagacgtacttttaaaatctaaagtgtgaaagaaacagcagagtaaaagccagactcattgcaccttcaatgtctgcatagatccagaagttgtacattttacctaacaacatcacttttgttgaacattccaactccagaatgatccccaatcaccctaatctcagaatgctggaatgatgtctgttggaaaacccaggactccacacacaaaactcctgggattttgtttcccatctctttctaggtgtttgcaatgtacaaataatacagctgtgctaatctcacatttagccatgatagatgatggttctagagtgtacttccatttgtaagtcctcctgataagtgctttcttgtttatcactatgtaaatctgaaatattttgtacttcatttgtttttatccattctgaattttcaaagcataaaaatgtcaaagaaaaattgagataaacattttgttcaccattaaatgtttgcatctgcagtctatgatgagaaacaatgaaattatgactaaaatttaacaaatagtattttcttatagaagcaatgtattaaatgattagatacacaggacagttcacagcaaattgtttacttacatggcataattgaaatactgttatttgtaaagagttctatactgcctaccttagctaaccagaattgttcatagacttgtgataatatggtgttatgggaaaacacattttgtgcgcatgatgaagagagcaccgtgaatctagtcttgactgcccctggtggaacatttgaaagcccttgggactccaggagagatgtttttgcagcatgtatgctaaatttgtgagttagcaagaccctgctgtgattactatgttgtacagatcttcaaagtatattgcctaatatgagtcatgttatttctagattgaatttaaagtaagtatggattatggaagtctagtaaatatacttttcccta

SEQ ID NO: 414797 - DNA, 5724 bp, Homo sapiens
aggcgtcagaagggggcggggagcagaaaacggccgggtgaatcactgggcgtaacaggtgccgcagccgcagctgcgcccgcagcgcgcgcggaccgcagggataaggtcttctttttctccgggtttttttggaggagatgcctacatagaagagtgacagcagctagactaaatgtttaactgctgaactagttcctcaggtatcctggctctagagattgctatgggagattggatgactgttacagatccaggtctgtcttcagaaagcaaaactatctctcaatatacctcagaaacaaagatgtctccatcaagtttatactcacagcaagtgctatgttcttcaatacctttatcgaaaaatgtgcacagttttttcagtgccttctgcacagaagataatattgaacagagtatctcatatcttgatcaggtaacatgtttttgtaaaaaacagtagcataaatcatgttatataatagaatgtatcaaaattatgagaaaaacatttgtcaaacacaagtttgttgtttatgtagtgcccctgagacttagattttcagagaaccttggtgattatctcatctagagatagcaagtctaacttttttgtgtggagcaccttggcctcctcattgtcccaggggctcctccactgagagtccagccatcactttatggatgcagaaacccaagtgccttgctccatgtcacagatttatagcagagactaaaagagccccgtcctcttaactctttgtcctttgggatattgaccattttcttaactatttcaagatagttttctatttttctaaggaaagatttctatcttttgattttttttttactaagttgcccagtaaccaaccttttaaaataattcacatttatttttaatttttgacaaaaattatatatatttgtcatgttcaacataatgtttcataatacacattgtgaaatggctcagtgtgcatacctcccatacttatatcattttttgtggtgagaatttacttgctcagcaatttcaggaatatagtacgtagttattagctgaggtcaccgtgttgtacaatagatctattaaacttattcttcctatctaactgaaagtttgtatcctctgaccagtatctcctcaactgtaaccaactttaagaaaacattttctcctaccaggaattgactacttttggttttccttcattatatgaagaatccaaaggtaaagagacaaagagagagttaaatatagtagctgtactaaattgtatgaatgagctgcttgtgcttcagcggaagaaccttctagctcaggaaaatgtggagacacagaatttgaagctgggaagtgatatggaccatctacagagctgctactcaaaacttaaggaacaactggaaacctccaggagggaaatgattgggcttcaggaaagagacagacagttacaatgtaagaacaggaatttgcatcagctactaaagaatgagaaagatgaggtgcaaaaattacaaaatatcattgcaagtcgagctactcagtataatcatgatatgaagagaaaagagcgtgaatataataaactgaaggaacgtctacatcaacttgttatgaacaagaaagataagaaaatagctatggacattttgaattatgtcgggagagctgatggaaaaagaggctcctggaggactggtaaaactgaagccaggaatgaagatgaaatgtataaaattctcttgaatgattatgaatatcgtcagaaacaaatcctaatggaaaatgcagaacttaagaaggttcttcaacaaatgaaaaaggaaatgatttctcttctttctccccaaaagaagaaacctagagaaagagtagatgatagtacaggaactgttatttccgatgttgaagaagatgccggggaactaagcagagagagtatgtgggacctttcctgtgaaactgtgagagagcagcttacaaacagcatcagaaaacagtggagaattttgaaaagtcatgtagaaaagcttgataaccaagtttcaaaggtacacctggaaggttttaatgatgaagatgtaatctcacgacaagaccatgaacaagaaactgaaaaactcgagttagaaattcagcagtgtaaagaaatgattaaaactcagcaacagcttttacagcagcagctcgctactgcatatgatgatgataccacttcactattacgagactgttatttgttggaagaaaaggaacgtctcaaagaagaatggtccctttttaaagagcagaaaaagaattttgagagggagagacgaagctttacagaagccgctattcgcctgggattggagagaaaggcatttgaagaagaaagagccagttggttaaagcagcagtttctaaatatgactacctttgaccaccagaactcagaaaatgtgaaacttttcagtgccttctcaggaagttctgattgggacaatcttatagtgcactcgaggcagccgcaaaagaagcctcacagtgtgtctaatgggtctccagtttgcatgtctaaacttactaaatctcttcctgcttcaccttccacttcagacttttgccagacacgttcctgcatatctgaacatagttcaatcaatgtactgaatataactgctgaagaaattaaaccaaatcaggttggaggagaacgtacaaatcaaaaatggagtgtggcgtcaagacctggatcacaggaaggttgctatagtggatgctccttgagctacacaaattctcatgtagaaaaagatgacttaccttagacatgtggactggaatttttttcattaatgtgttcatcaagtttcacatctaagttgaaacagggtgtgtcataaagtcagttatctctaataacttaagatggtctgagttgtttgtttggacttccctgtcttcccccaaagagttgaaatcttaaatctatttaaaaggatataaaagctttggatatgtatttttagtaacagaagcatctggttctgtgaataaaggaatgtatagatgtttggatggaaacaaaagcactagactgagtttcctcttataggtattaaaattggcattggaagtttagcctttacttgaatgtatactgtagatttttaacaaagcgagttctatatttattatgtttagtgtggtttgaaattacctctttcatatgttttaaataaagtgaaatttatgtatgttttgtacatagatacacatgattatgttaagaggctttaagatttaaaagtttcacacaaccataagtatagtatttcatgccagtaaaatttttttagtggtattctgtttacagatgtattaggaccattgatgcattacatttaagaattctctttaatacatctgggcaataaatattgaaaggtattccatgaagctgagttctttagataatcaacactactaacattacatttttgagatttttatgacattagatttttattttgtatatgtagaatattataatttttaaaaggactattgatgatagaagaataggggcaagacgacaaaagtacctttgaataaaacaatttaagaaattggtttaagatattggatgatagaagatatttaagatatctagatggtgatattttccttacaagatgggtaccagtatagtaatatctgtatactaactagggctttgtattgtcaataattttttaataattttttaatgaggtatttaccactgaagaaatatgataatataaaaccatcaaattttataattgagatgatactctggaaaaacatgtcatttcattttcagaaaactcttaagctctcttcagtctctgtaatgtttctgattgcatgtttcttcatgaaaagtatgttgttgttttgatagtaataataataaatgtaggctcagctctttcccaggattttcatcaaaaagctttaagtgcctaaccctgcttgtctctgtacatagaagcctgcacagatccaacccttgctaggtatcatagtttaggcccatttaccttcccctgtactggcagttcagccgcttacatgcactcaccctgtttgtggctattttaaattcatattattaaaaaacaaaaaaaacccacctatttgtgttgtccattcactatacgtaactatgtaactctttggagttgcatagcagcagccattttttcagggctgataggatatcattaagagtgtcttatgagacattagtggatatactcatagtaaccatatttatagttttaaagagctagctcttgagcattagtcactaccttcagcttgatgcatggtcacttctttactatttaaaatactacacattgtacaaaatatcgaagacactaccatatgctaaaggaagaaatctagctgggatataggatttttgttgtttttgtttttgtttgttttgctatttagcaataacatggtcaaaaaggcaatcagaaattttaaatacagttaatggatacatttggcaacaattttcccccgagggttttccatggtgtactttgcaagaaataagcactctaatttttaaagtaaatctcttattttagcaaatattatatttcatgacaatggagttctagaaagcagcatctgttttttgttgcgtgtttccattttaaagtgagttgagttctcaaattggaaagaaagattccttgagacgtacttttaaaatctaaagtgtgaaagaaacagcagagtaaaagccagactcattgcaccttcaatgtctgcatagatccagaagttgtacattttacctaacaacatcacttttgttgaacattccaactccagaatgatccccaatcaccctaatctcagaatgctggaatgatgtctgttggaaaacccaggactccacacacaaaactcctgggattttgtttcccatctctttctaggtgtttgcaatgtacaaataatacagctgtgctaatctcacatttagccatgatagatgatggttctagagtgtacttccatttgtaagtcctcctgataagtgctttcttgtttatcactatgtaaatctgaaatattttgtacttcatttgtttttatccattctgaattttcaaagcataaaaatgtcaaagaaaaattgagataaacattttgttcaccattaaatgtttgcatctgcagtctatgatgagaaacaatgaaattatgactaaaatttaacaaatagtattttcttatagaagcaatgtattaaatgattagatacacaggacagttcacagcaaattgtttacttacatggcataattgaaatactgttatttgtaaagagttctatactgcctaccttagctaaccagaattgttcatagacttgtgataatatggtgttatgggaaaacacattttgtgcgcatgatgaagagagcaccgtgaatctagtcttgactgcccctggtggaacatttgaaagcccttgggactccaggagagatgtttttgcagcatgtatgctaaatttgtgagttagcaagaccctgctgtgattactatgttgtacagatcttcaaagtatattgcctaatatgagtcatgttatttctagattgaatttaaagtaagtatggattatggaagtctagtaaatatacttttcccta

SEQ ID NO: 414798 - DNA, 4992 bp, Homo sapiens
attggatcaaacatgtcacaagagtcggacaagtaagtggatcacacgcgccggctgctgctactactaccactttgggctgatggcaactgtaataaaagactagtggccttagtgcccatgcccagtgaccctccattcaatacccgaagagcctacaccagtgaggatgaagcctggaagtcatacttggagaatcccctgacagcagccaccaaggccatgatgatcattaatggtgatgaggacagtgctgctgccctcggcctgctctatgactactacaaggttcctcgagacaagaggctgctgtctgtaagcaaagcaagtgacagccaagaagaccaggagaaaagaaactgccttggcaccagtgaagcccagagtaatttgagtggaggagaaaaccgagtgcaagtcctaaagactgttccagtgaacctttccctaaatcaagatcacctggagaattccaagcgggaacagtacagcatcagcttccccgagagctctgccatcatcccggtgtcgggaatcacggtggtgaaagctgaagatttcacaccagttttcatggccccacctgtgcactatccccggggagatggggaagagcaacgagtggttatctttgaacagactcagtatgacgtgccctcgctggccacccacagcgcctatctcaaagacgaccagcgcagcactccggacagcacatacagcgagagcttcaaggacgcagccacagagaaatttcggagtgcttcagttggggctgaggagtacatgtatgatcagacatcaagtggcacatttcagtacaccctggaagccaccaaatctctccgtcagaagcagggggagggccccatgacctacctcaacaaaggacagttctatgccataacactcagcgagaccggagacaacaaatgcttccgacaccccatcagcaaagtcaggagtgtggtgatggtggtcttcagtgaagacaaaaacagagatgaacagctcaaatactggaaatactggcactctcggcagcatacggcgaagcagagggtccttgacattgccgattacaaggagagctttaatacgattggaaacattgaagagattgcatataatgctgtttcctttacctgggacgtgaatgaagaggcgaagattttcatcaccgtgaattgcttgagcacagatttctcctcccaaaaaggggtgaaaggacttcctttgatgattcagattgacacatacagttataacaatcgtagcaataaacccattcatagagcttattgccagatcaaggtcttctgtgacaaaggagcagaaagaaaaatccgagatgaagagcagaagcagaacaggaagaacgggaaaggccaggcctcccaaactcaatgcaacagctcctctgatgggaagttggctgccatacctttacagaagaagagtgacatcacctacttcaaaaccatgcctgatctccactcacagccagttctcttcatacctgatgttcactttgcaaacctgcagaggaccggacaggtgtattacaacacggatgatgaacgagaaggtggcagtgtccttgttaaacggatgttccggcccatggaagaggagtttggtccagtgccttcaaagcagatgaaagaagaagggacaaagcgagtgctcttgtacgtgaggaaggagactgacgatgtgttcgatgcattgatgttgaagtctcccacagtgaagggcctgatggaagcgatatctgagaaatatgggctgcccgtggagaagatagcaaagctttacaagaaaagcaaaaaaggcatcttggtgaacatggatgacaacatcatcgagcactactcgaacgaggacaccttcatcctcaacatggagagcatggtggagggcttcaaggtcacgctcatggaaatctagccctgggtttggcatccgctttggctggagctctcagtgcgttcctccctgagagagacagaagccccagccccagaacctggagacccatctcccccatctcacaactgctgttacaagaccgtgctggggagtggggcaagggacaggccccactgtcggtgtgcttggcccatccactggcacctaccacggagccgaagcctgagcccctcaggaaggtgccttaggcctgttggattcctatttattgcccaccttttcctggagcccaggtccaggcccgccaggactctgcaggtcactgctagctccagatgagaccgtccagcgttcccccttcaagagaaacactcatcccgaacagcctaaaaaattcccatcccttctttctcacccctccatatctatatctcccgagtggctggacaaaatgagctacgtctgggtgcagtagttataggtggggcaagaggtggatgcccactttctggtcagacacctttaggttgctctggggaaggctgtcttgctaaatacctccagggttcccagcaagtggccaccaggccttgtacaggaagacattcagtcaccgtgtaattagtaacacagaaagtctgcctgtctgcattgtacatagtgtttataatattgtaataatatattttacctgtggtatgtgggcatgtttactgccactggcctagaggagacacagacctggagaccgttttaatgggggtttttgcctctgtgcctgttcaagagacttgcagggctaggtagagggcctttgggatgttaaggtgactgcagctgatgccaagatggactctgcaatgggcatacctgggggctcgttccctgtccccagaggaagccccctctccttctccatgggcatgactctccttcgaggccaccacgtttatctcacaatgatgtgttttgcctgactttccctttgcgctgtctcgtgggaaaggtcattctgtctgagaccccagctccttctccagctttggctgcgggcatggcctgagctttctggagagcctctgcagggggtttgccatcagggccctgtggctgggtctgctgcagagctccttggctatcaggagaatcctggacactgtactgtgcctcccagtttacaaacacgcccttcatctcaagtggccctttaaaaggcctgctgccatgtgagagctgtgaacagctcagctctgagtcggcaggctggggcttcctcctgggccaccagatggaaagggggtattgtttgcctcactcctggatgctgcgttttaaggaagtgagtgagaaagaatgtgccaagatacctggctcctgtgaaaccagcctcaggagggaaactgggagagagaagctgtggtctcctgctacatgccctgggagctggaagagaaaaacactcccctaaacaatcgcaaaatgatgaaccatcatgggccactgttctctttgaggggacaggtttaggggtttgcgttcgcccttgtgggctgaagcactagctttttggtagctagacacatcctgcacccaaaggttctctacaaaggcccagatttgtttgtaaagcactttgactcttacctggaggcccgctctctaagggcttcctgcgctcccacctcatctgtccctgagatgcagagcaggatggagggtctgcttctagctcagctgtttctccttgaggttgcggaggaattgaattgaatgggacagagggcaggtgctgtggccaagaagatctccgagcagcagtgacggggcaccttgctgtgtgtcctctgggcatgttaacccttctgtggggccaaaggtttgcatcgtggatccagctgtgctccagtctgtcccctcctcctccactctgactgccacgccccggaccagcagcttggggaccctccagggtactaatggggctctgttctgagatggacaaattcagtgttggaaatacatgttgtactatgcacttcccatgctcctagggttaggaatagtttcaaacatgattggcagacataacaacggcaaatactcggactggggcataggactccagagtaggaaaaagacaaaagatttggcagcctgacacaggcaacctacccctctctctccagcctctttatgaaactgtttgtttgccagtcctgccctaaggcagaagatgaattgaagatgctgtgcatgtttcctaagtccttgagcaatcatggtggtgacaattgccacaagggatatgaggccagtgccaccagagggtggtgccaagtgccacatcccttccgatccattcccctctgcatcctcggagcaccccagtttgcctttgatgtgtccgctgtgtatgttagctgaactttgatgagcaaaatttcctgagcgaaacactccaaagagataggaaaacttgccgcctcttcttttttgtcccttaatcaaactcaaataagcttaaaaaaaatccatggaagatcatggacatgtgaaatgagcatttttttcttttctttttttttttttttttttaacaaagtctgaactgaacagaacaagactttttcctcatacatctccaaattgtttaaacttactttatgagtgtttgtttagaagttcggaccaacagaaaaatgcagtcagatgtcatcttggaattggtttctaaaagagtaaggcatgtccctgcccagaaacttaggaagcatgaaataaatcaaatgtttattttccttcttatttaaaatcatgcaaatgcaacagaaatagagggtttgtgccaaatgctatgaacggccctttcttaaagacaagcaagggagattgatatatgtacaatttgctctcatgttttaaaaaaaaaaaggtaaatgtaacttaatagttttgtaaatgggagagggggaatctataaactataaatacagttattttattttttgtacatttttaaggagaaaaaaataaatattcataacataagagtaaaaaaca

SEQ ID NO: 414799 - DNA, 3562 bp, Homo sapiens
tattaaacagattagtcttttgcctttttaagagacagtttatgccttaggaaagtctgtacatcacgtaatattttttccatttcttgtctctgacctacagtaagcctattgttttgttccacaggtgtattacaacacggatgatgaacgagaaggtggcagtgtccttgttaaacggatgttccggcccatggaagaggagtttggtccagtgccttcaaagcagatgaaagaagaagggacaaagcgagtgctcttgtacgtgaggaaggagactgacgatgtgttcgatgcattgatgttgaagtctcccacagtgaagggcctgatggaagcgatatctgagaaatatgggctgcccgtggagaagatagcaaagctttacaagaaaagcaaaaaaggcatcttggtgaacatggatgacaacatcatcgagcactactcgaacgaggacaccttcatcctcaacatggagagcatggtggagggcttcaaggtcacgctcatggaaatctagccctgggtttggcatccgctttggctggagctctcagtgcgttcctccctgagagagacagaagccccagccccagaacctggagacccatctcccccatctcacaactgctgttacaagaccgtgctggggagtggggcaagggacaggccccactgtcggtgtgcttggcccatccactggcacctaccacggagccgaagcctgagcccctcaggaaggtgccttaggcctgttggattcctatttattgcccaccttttcctggagcccaggtccaggcccgccaggactctgcaggtcactgctagctccagatgagaccgtccagcgttcccccttcaagagaaacactcatcccgaacagcctaaaaaattcccatcccttctttctcacccctccatatctatatctcccgagtggctggacaaaatgagctacgtctgggtgcagtagttataggtggggcaagaggtggatgcccactttctggtcagacacctttaggttgctctggggaaggctgtcttgctaaatacctccagggttcccagcaagtggccaccaggccttgtacaggaagacattcagtcaccgtgtaattagtaacacagaaagtctgcctgtctgcattgtacatagtgtttataatattgtaataatatattttacctgtggtatgtgggcatgtttactgccactggcctagaggagacacagacctggagaccgttttaatgggggtttttgcctctgtgcctgttcaagagacttgcagggctaggtagagggcctttgggatgttaaggtgactgcagctgatgccaagatggactctgcaatgggcatacctgggggctcgttccctgtccccagaggaagccccctctccttctccatgggcatgactctccttcgaggccaccacgtttatctcacaatgatgtgttttgcctgactttccctttgcgctgtctcgtgggaaaggtcattctgtctgagaccccagctccttctccagctttggctgcgggcatggcctgagctttctggagagcctctgcagggggtttgccatcagggccctgtggctgggtctgctgcagagctccttggctatcaggagaatcctggacactgtactgtgcctcccagtttacaaacacgcccttcatctcaagtggccctttaaaaggcctgctgccatgtgagagctgtgaacagctcagctctgagtcggcaggctggggcttcctcctgggccaccagatggaaagggggtattgtttgcctcactcctggatgctgcgttttaaggaagtgagtgagaaagaatgtgccaagatacctggctcctgtgaaaccagcctcaggagggaaactgggagagagaagctgtggtctcctgctacatgccctgggagctggaagagaaaaacactcccctaaacaatcgcaaaatgatgaaccatcatgggccactgttctctttgaggggacaggtttaggggtttgcgttcgcccttgtgggctgaagcactagctttttggtagctagacacatcctgcacccaaaggttctctacaaaggcccagatttgtttgtaaagcactttgactcttacctggaggcccgctctctaagggcttcctgcgctcccacctcatctgtccctgagatgcagagcaggatggagggtctgcttctagctcagctgtttctccttgaggttgcggaggaattgaattgaatgggacagagggcaggtgctgtggccaagaagatctccgagcagcagtgacggggcaccttgctgtgtgtcctctgggcatgttaacccttctgtggggccaaaggtttgcatcgtggatccagctgtgctccagtctgtcccctcctcctccactctgactgccacgccccggaccagcagcttggggaccctccagggtactaatggggctctgttctgagatggacaaattcagtgttggaaatacatgttgtactatgcacttcccatgctcctagggttaggaatagtttcaaacatgattggcagacataacaacggcaaatactcggactggggcataggactccagagtaggaaaaagacaaaagatttggcagcctgacacaggcaacctacccctctctctccagcctctttatgaaactgtttgtttgccagtcctgccctaaggcagaagatgaattgaagatgctgtgcatgtttcctaagtccttgagcaatcatggtggtgacaattgccacaagggatatgaggccagtgccaccagagggtggtgccaagtgccacatcccttccgatccattcccctctgcatcctcggagcaccccagtttgcctttgatgtgtccgctgtgtatgttagctgaactttgatgagcaaaatttcctgagcgaaacactccaaagagataggaaaacttgccgcctcttcttttttgtcccttaatcaaactcaaataagcttaaaaaaaatccatggaagatcatggacatgtgaaatgagcatttttttcttttctttttttttttttttttttaacaaagtctgaactgaacagaacaagactttttcctcatacatctccaaattgtttaaacttactttatgagtgtttgtttagaagttcggaccaacagaaaaatgcagtcagatgtcatcttggaattggtttctaaaagagtaaggcatgtccctgcccagaaacttaggaagcatgaaataaatcaaatgtttattttccttcttatttaaaatcatgcaaatgcaacagaaatagagggtttgtgccaaatgctatgaacggccctttcttaaagacaagcaagggagattgatatatgtacaatttgctctcatgttttaaaaaaaaaaaggtaaatgtaacttaatagttttgtaaatgggagagggggaatctataaactataaatacagttattttattttttgtacatttttaaggagaaaaaaataaatattcataacataagagtaaaaaaca

SEQ ID NO: 414800 - DNA, 2199 bp, Homo sapiens
attggatcaaacatgtcacaagagtcggacaataataaaagactagtggccttagtgcccatgcccagtgaccctccattcaatacccgaagagcctacaccagtgaggatgaagcctggaagtcatacttggagaatcccctgacagcagccaccaaggccatgatgatcattaatggtgatgaggacagtgctgctgccctcggcctgctctatgactactacaaggttcctcgagacaagaggctgctgtctgtaagcaaagcaagtgacagccaagaagaccaggagaaaagaaactgccttggcaccagtgaagcccagagtaatttgagtggaggagaaaaccgagtgcaagtcctaaagactgttccagtgaacctttccctaaatcaagatcacctggagaattccaagcgggaacagtacagcatcagcttccccgagagctctgccatcatcccggtgtcgggaatcacggtggtgaaagctgaagatttcacaccagttttcatggccccacctgtgcactatccccggggagatggggaagagcaacgagtggttatctttgaacagactcagtatgacgtgccctcgctggccacccacagcgcctatctcaaagacgaccagcgcagcactccggacagcacatacagcgagagcttcaaggacgcagccacagagaaatttcggagtgcttcagttggggctgaggagtacatgtatgatcagacatcaagtggcacatttcagtacaccctggaagccaccaaatctctccgtcagaagcagggggagggccccatgacctacctcaacaaaggacagttctatgccataacactcagcgagaccggagacaacaaatgcttccgacaccccatcagcaaagtcaggagtgtggtgatggtggtcttcagtgaagacaaaaacagagatgaacagctcaaatactggaaatactggcactctcggcagcatacggcgaagcagagggtccttgacattgccgattacaaggagagctttaatacgattggaaacattgaagagattgcatataatgctgtttcctttacctgggacgtgaatgaagaggcgaagattttcatcaccgtgaattgcttgagcacagatttctcctcccaaaaaggggtgaaaggacttcctttgatgattcagattgacacatacagttataacaatcgtagcaataaacccattcatagagcttattgccagatcaaggtcttctgtgacaaaggagcagaaagaaaaatccgagatgaagagcagaagcagaacaggaagaacgggaaaggccaggcctcccaaactcaatgcaacagctcctctgatgggaagttggctgccatacctttacagaagaagagtgacatcacctacttcaaaaccatgcctgatctccactcacagccagttctcttcatacctgatgttcactttgcaaacctgcagaggaccggacaggtgtattacaacacggatgatgaacgagaaggtggcagtgtccttgttaaacggatgttccggcccatggaagaggagtttggtccagtgccttcaaagcagatgaaagaagaagggacaaagcgaggtatctctcctgctggggcatgccctctcagaagggatgcggggtgtctctcccaagaagagcttgcaagccctcttgcccaggcccccatggctctgtgccagcctggtgactttctcttcacacaggaagtccacagtcttcttctttgctttaaactctgtcctttcaacaccttaagaaaacatttgtcattcctgggtgctggttctttcctttgccttgggagaacgtaatgaataaacagactcatccagcagcaaggtacaaggttaagaacgaaactcttgctgcgtgtgtggacagtcatacctcataagaactagtgattgagcctcatttgatacatgcaaactattcatctcacccaaataaatgagcctcaggtttctgtggcatcaccacttactcattttctcccagtcaaaggtcttattctgcttcaccaagagggtaagaaacaaagcttgactgtgcccatgtcttgcccagcatgtcaatgccatacaggattccatgcccttcctcggagtaagaggaaagtgtgtgggtgcacattcccctcagtatcctgc

SEQ ID NO: 414801 - DNA, 4932 bp, Homo sapiens
attggatcaaacatgtcacaagagtcggacaataataaaagactagtggccttagtgcccatgcccagtgaccctccattcaatacccgaagagcctacaccagtgaggatgaagcctggaagtcatacttggagaatcccctgacagcagccaccaaggccatgatgatcattaatggtgatgaggacagtgctgctgccctcggcctgctctatgactactacaaggttcctcgagacaagaggctgctgtctgtaagcaaagcaagtgacagccaagaagaccaggagaaaagaaactgccttggcaccagtgaagcccagagtaatttgagtggaggagaaaaccgagtgcaagtcctaaagactgttccagtgaacctttccctaaatcaagatcacctggagaattccaagcgggaacagtacagcatcagcttccccgagagctctgccatcatcccggtgtcgggaatcacggtggtgaaagctgaagatttcacaccagttttcatggccccacctgtgcactatccccggggagatggggaagagcaacgagtggttatctttgaacagactcagtatgacgtgccctcgctggccacccacagcgcctatctcaaagacgaccagcgcagcactccggacagcacatacagcgagagcttcaaggacgcagccacagagaaatttcggagtgcttcagttggggctgaggagtacatgtatgatcagacatcaagtggcacatttcagtacaccctggaagccaccaaatctctccgtcagaagcagggggagggccccatgacctacctcaacaaaggacagttctatgccataacactcagcgagaccggagacaacaaatgcttccgacaccccatcagcaaagtcaggagtgtggtgatggtggtcttcagtgaagacaaaaacagagatgaacagctcaaatactggaaatactggcactctcggcagcatacggcgaagcagagggtccttgacattgccgattacaaggagagctttaatacgattggaaacattgaagagattgcatataatgctgtttcctttacctgggacgtgaatgaagaggcgaagattttcatcaccgtgaattgcttgagcacagatttctcctcccaaaaaggggtgaaaggacttcctttgatgattcagattgacacatacagttataacaatcgtagcaataaacccattcatagagcttattgccagatcaaggtcttctgtgacaaaggagcagaaagaaaaatccgagatgaagagcagaagcagaacaggaagaacgggaaaggccaggcctcccaaactcaatgcaacagctcctctgatgggaagttggctgccatacctttacagaagaagagtgacatcacctacttcaaaaccatgcctgatctccactcacagccagttctcttcatacctgatgttcactttgcaaacctgcagaggaccggacaggtgtattacaacacggatgatgaacgagaaggtggcagtgtccttgttaaacggatgttccggcccatggaagaggagtttggtccagtgccttcaaagcagatgaaagaagaagggacaaagcgagtgctcttgtacgtgaggaaggagactgacgatgtgttcgatgcattgatgttgaagtctcccacagtgaagggcctgatggaagcgatatctgagaaatatgggctgcccgtggagaagatagcaaagctttacaagaaaagcaaaaaaggcatcttggtgaacatggatgacaacatcatcgagcactactcgaacgaggacaccttcatcctcaacatggagagcatggtggagggcttcaaggtcacgctcatggaaatctagccctgggtttggcatccgctttggctggagctctcagtgcgttcctccctgagagagacagaagccccagccccagaacctggagacccatctcccccatctcacaactgctgttacaagaccgtgctggggagtggggcaagggacaggccccactgtcggtgtgcttggcccatccactggcacctaccacggagccgaagcctgagcccctcaggaaggtgccttaggcctgttggattcctatttattgcccaccttttcctggagcccaggtccaggcccgccaggactctgcaggtcactgctagctccagatgagaccgtccagcgttcccccttcaagagaaacactcatcccgaacagcctaaaaaattcccatcccttctttctcacccctccatatctatatctcccgagtggctggacaaaatgagctacgtctgggtgcagtagttataggtggggcaagaggtggatgcccactttctggtcagacacctttaggttgctctggggaaggctgtcttgctaaatacctccagggttcccagcaagtggccaccaggccttgtacaggaagacattcagtcaccgtgtaattagtaacacagaaagtctgcctgtctgcattgtacatagtgtttataatattgtaataatatattttacctgtggtatgtgggcatgtttactgccactggcctagaggagacacagacctggagaccgttttaatgggggtttttgcctctgtgcctgttcaagagacttgcagggctaggtagagggcctttgggatgttaaggtgactgcagctgatgccaagatggactctgcaatgggcatacctgggggctcgttccctgtccccagaggaagccccctctccttctccatgggcatgactctccttcgaggccaccacgtttatctcacaatgatgtgttttgcctgactttccctttgcgctgtctcgtgggaaaggtcattctgtctgagaccccagctccttctccagctttggctgcgggcatggcctgagctttctggagagcctctgcagggggtttgccatcagggccctgtggctgggtctgctgcagagctccttggctatcaggagaatcctggacactgtactgtgcctcccagtttacaaacacgcccttcatctcaagtggccctttaaaaggcctgctgccatgtgagagctgtgaacagctcagctctgagtcggcaggctggggcttcctcctgggccaccagatggaaagggggtattgtttgcctcactcctggatgctgcgttttaaggaagtgagtgagaaagaatgtgccaagatacctggctcctgtgaaaccagcctcaggagggaaactgggagagagaagctgtggtctcctgctacatgccctgggagctggaagagaaaaacactcccctaaacaatcgcaaaatgatgaaccatcatgggccactgttctctttgaggggacaggtttaggggtttgcgttcgcccttgtgggctgaagcactagctttttggtagctagacacatcctgcacccaaaggttctctacaaaggcccagatttgtttgtaaagcactttgactcttacctggaggcccgctctctaagggcttcctgcgctcccacctcatctgtccctgagatgcagagcaggatggagggtctgcttctagctcagctgtttctccttgaggttgcggaggaattgaattgaatgggacagagggcaggtgctgtggccaagaagatctccgagcagcagtgacggggcaccttgctgtgtgtcctctgggcatgttaacccttctgtggggccaaaggtttgcatcgtggatccagctgtgctccagtctgtcccctcctcctccactctgactgccacgccccggaccagcagcttggggaccctccagggtactaatggggctctgttctgagatggacaaattcagtgttggaaatacatgttgtactatgcacttcccatgctcctagggttaggaatagtttcaaacatgattggcagacataacaacggcaaatactcggactggggcataggactccagagtaggaaaaagacaaaagatttggcagcctgacacaggcaacctacccctctctctccagcctctttatgaaactgtttgtttgccagtcctgccctaaggcagaagatgaattgaagatgctgtgcatgtttcctaagtccttgagcaatcatggtggtgacaattgccacaagggatatgaggccagtgccaccagagggtggtgccaagtgccacatcccttccgatccattcccctctgcatcctcggagcaccccagtttgcctttgatgtgtccgctgtgtatgttagctgaactttgatgagcaaaatttcctgagcgaaacactccaaagagataggaaaacttgccgcctcttcttttttgtcccttaatcaaactcaaataagcttaaaaaaaatccatggaagatcatggacatgtgaaatgagcatttttttcttttctttttttttttttttttttaacaaagtctgaactgaacagaacaagactttttcctcatacatctccaaattgtttaaacttactttatgagtgtttgtttagaagttcggaccaacagaaaaatgcagtcagatgtcatcttggaattggtttctaaaagagtaaggcatgtccctgcccagaaacttaggaagcatgaaataaatcaaatgtttattttccttcttatttaaaatcatgcaaatgcaacagaaatagagggtttgtgccaaatgctatgaacggccctttcttaaagacaagcaagggagattgatatatgtacaatttgctctcatgttttaaaaaaaaaaaggtaaatgtaacttaatagttttgtaaatgggagagggggaatctataaactataaatacagttattttattttttgtacatttttaaggagaaaaaaataaatattcataacataagagtaaaaaaca

SEQ ID NO: 414802 - DNA, 4846 bp, Homo sapiens
attggatcaaacatgtcacaagagtcggacaataataaaagactagtggccttagtgcccatgcccagtgaccctccattcaatacccgaagagcctacaccagtgaggatgaagcctggaagtcatacttggagaatcccctgacagcagccaccaaggccatgatgatcattaatggtgatgaggacagtgctgctgccctcggcctgctctatgactactacaaggttcctcgagacaagaggctgctgtctgtaagcaaagcaagtgacagccaagaagaccaggagaaaagaaactgccttggcaccagtgaagcccagagtaatttgagtggaggagaaaaccgagtgcaagtcctaaagactgttccagtgaacctttccctaaatcaagatcacctggagaattccaagcgggaacagtacagcatcagcttccccgagagctctgccatcatcccggtgtcgggaatcacggtggtgaaagctgaagatttcacaccagttttcatggccccacctgtgcactatccccggggagatggggaagagcaacgagtggttatctttgaacagactcagtatgacgtgccctcgctggccacccacagcgcctatctcaaagacgaccagcgcagcactccggacagcacatacagcgagagcttcaaggacgcagccacagagaaatttcggagtgcttcagttggggctgaggagtacatgtatgatcagacatcaagtggcacatttcagtacaccctggaagccaccaaatctctccgtcagaagcagggggagggccccatgacctacctcaacaaaggacagttctatgccataacactcagcgagaccggagacaacaaatgcttccgacaccccatcagcaaagtcaggagtgtggtgatggtggtcttcagtgaagacaaaaacagagatgaacagctcaaatactggaaatactggcactctcggcagcatacggcgaagcagagggtccttgacattgccgattacaaggagagctttaatacgattggaaacattgaagagattgcatataatgctgtttcctttacctgggacgtgaatgaagaggcgaagattttcatcaccgtgaattgcttgagcacagatttctcctcccaaaaaggggtgaaaggacttcctttgatgattcagattgacacatacagttataacaatcgtagcaataaacccattcatagagcttattgccagatcaaggtcttctgtgacaaaggagcagaaagaaaaatccgagatgaagagcagaagcagaacaggaagaacgggaaaggccaggcctcccaaactcaatgcaacagctcctctgatgggaagttggctgccatacctttacagaagaagagtgacatcacctacttcaaaaccatgcctgatctccactcacagccagttctcttcatacctgatgttcactttgcaaacctgcagaggaccggacaggtgtattacaacacggatgatgaacgagaaggtggcagtgtccttgttaaacggatgttccggcccatggaagaggagtttggtccagtgccttcaaagcagatgaaagaagaagggacaaagcgagatatctgagaaatatgggctgcccgtggagaagatagcaaagctttacaagaaaagcaaaaaaggcatcttggtgaacatggatgacaacatcatcgagcactactcgaacgaggacaccttcatcctcaacatggagagcatggtggagggcttcaaggtcacgctcatggaaatctagccctgggtttggcatccgctttggctggagctctcagtgcgttcctccctgagagagacagaagccccagccccagaacctggagacccatctcccccatctcacaactgctgttacaagaccgtgctggggagtggggcaagggacaggccccactgtcggtgtgcttggcccatccactggcacctaccacggagccgaagcctgagcccctcaggaaggtgccttaggcctgttggattcctatttattgcccaccttttcctggagcccaggtccaggcccgccaggactctgcaggtcactgctagctccagatgagaccgtccagcgttcccccttcaagagaaacactcatcccgaacagcctaaaaaattcccatcccttctttctcacccctccatatctatatctcccgagtggctggacaaaatgagctacgtctgggtgcagtagttataggtggggcaagaggtggatgcccactttctggtcagacacctttaggttgctctggggaaggctgtcttgctaaatacctccagggttcccagcaagtggccaccaggccttgtacaggaagacattcagtcaccgtgtaattagtaacacagaaagtctgcctgtctgcattgtacatagtgtttataatattgtaataatatattttacctgtggtatgtgggcatgtttactgccactggcctagaggagacacagacctggagaccgttttaatgggggtttttgcctctgtgcctgttcaagagacttgcagggctaggtagagggcctttgggatgttaaggtgactgcagctgatgccaagatggactctgcaatgggcatacctgggggctcgttccctgtccccagaggaagccccctctccttctccatgggcatgactctccttcgaggccaccacgtttatctcacaatgatgtgttttgcctgactttccctttgcgctgtctcgtgggaaaggtcattctgtctgagaccccagctccttctccagctttggctgcgggcatggcctgagctttctggagagcctctgcagggggtttgccatcagggccctgtggctgggtctgctgcagagctccttggctatcaggagaatcctggacactgtactgtgcctcccagtttacaaacacgcccttcatctcaagtggccctttaaaaggcctgctgccatgtgagagctgtgaacagctcagctctgagtcggcaggctggggcttcctcctgggccaccagatggaaagggggtattgtttgcctcactcctggatgctgcgttttaaggaagtgagtgagaaagaatgtgccaagatacctggctcctgtgaaaccagcctcaggagggaaactgggagagagaagctgtggtctcctgctacatgccctgggagctggaagagaaaaacactcccctaaacaatcgcaaaatgatgaaccatcatgggccactgttctctttgaggggacaggtttaggggtttgcgttcgcccttgtgggctgaagcactagctttttggtagctagacacatcctgcacccaaaggttctctacaaaggcccagatttgtttgtaaagcactttgactcttacctggaggcccgctctctaagggcttcctgcgctcccacctcatctgtccctgagatgcagagcaggatggagggtctgcttctagctcagctgtttctccttgaggttgcggaggaattgaattgaatgggacagagggcaggtgctgtggccaagaagatctccgagcagcagtgacggggcaccttgctgtgtgtcctctgggcatgttaacccttctgtggggccaaaggtttgcatcgtggatccagctgtgctccagtctgtcccctcctcctccactctgactgccacgccccggaccagcagcttggggaccctccagggtactaatggggctctgttctgagatggacaaattcagtgttggaaatacatgttgtactatgcacttcccatgctcctagggttaggaatagtttcaaacatgattggcagacataacaacggcaaatactcggactggggcataggactccagagtaggaaaaagacaaaagatttggcagcctgacacaggcaacctacccctctctctccagcctctttatgaaactgtttgtttgccagtcctgccctaaggcagaagatgaattgaagatgctgtgcatgtttcctaagtccttgagcaatcatggtggtgacaattgccacaagggatatgaggccagtgccaccagagggtggtgccaagtgccacatcccttccgatccattcccctctgcatcctcggagcaccccagtttgcctttgatgtgtccgctgtgtatgttagctgaactttgatgagcaaaatttcctgagcgaaacactccaaagagataggaaaacttgccgcctcttcttttttgtcccttaatcaaactcaaataagcttaaaaaaaatccatggaagatcatggacatgtgaaatgagcatttttttcttttctttttttttttttttttttaacaaagtctgaactgaacagaacaagactttttcctcatacatctccaaattgtttaaacttactttatgagtgtttgtttagaagttcggaccaacagaaaaatgcagtcagatgtcatcttggaattggtttctaaaagagtaaggcatgtccctgcccagaaacttaggaagcatgaaataaatcaaatgtttattttccttcttatttaaaatcatgcaaatgcaacagaaatagagggtttgtgccaaatgctatgaacggccctttcttaaagacaagcaagggagattgatatatgtacaatttgctctcatgttttaaaaaaaaaaaggtaaatgtaacttaatagttttgtaaatgggagagggggaatctataaactataaatacagttattttattttttgtacatttttaaggagaaaaaaataaatattcataacataagagtaaaaaaca

SEQ ID NO: 414803 - DNA, 901 bp, Homo sapiens
attggatcaaacatgtcacaagagtcggacaagtaagtggatcacacgcgccggctgctgctactactaccactttgggctgatggcaactgtaataaaagactagtggccttagtgcccatgcccagtgaccctccattcaatacccgaagagcctacaccagtgaggatgaagcctggaagtcatacttggagaatcccctgacagcagccaccaaggccatgatgatcattaatggtgatgaggacagtgctgctgccctcggcctgctctatgactactacaaggttcctcgagacaagaggctgctgtctgtaagcaaagcaagtgacagccaagaagaccaggagaaaaggtaaaggaatttgcctggcccccagaataactctatgttttctaaaaaacaatgttattaaactgtatgttttgttcttgagaggagatggggtcaagaagcttagcatcatctatctgtcttttgagtctggaccaatgctagatctctcaatgaggagagcaaattgcatgtttggttgtgcatccaaagggtctctccaccctcttcagatacccctcttcagattccaaggaggcttaaaatcctgagtcagaggtgagatgctggtaagatagcccattgctgggattaacttttctgatcaatcctatggcattataactgcaattaggcccctcaggaagtgagacacttgaaggattgcttttgatgatcagggaaggggaaagaaaggaggttgggctctttctcagccaagggaggcataggtggaggcgactgtaagggctatcgctgtcagggtgaaggggcaggacagctgcaggagatcaccatggaacaccccttgtctgccctcctcaatcaagaaccagctgaaaagc

SEQ ID NO: 414804 - DNA, 392 bp, Homo sapiens
tgagccactgtgcccagcctcatttaatttcattcatacttgcaagatggaaaatattaatactatccctgcttgatgttgatgaagaaattgaaacactgagggatcagatgagtttctcaaagacaaacagttcatctaggggaaagccagagttctaatccataccctttcactcaacaatcaatgcctataccaacagtttaatacttagtctagaaacatgtctctgatttttacaatttattcatttattcattcatttgtttattttttaccttctaccagaagggtaactatgctaacaatgtaatatattgttttgaattgagttatattagttgcaaatactgagaatagaataatataaagaattttttaaatctgtttca

SEQ ID NO: 414805 - DNA, 2413 bp, Homo sapiens
gtcttattcctttttagtgtattggaccgagttccagatgggccagtatttattgctatgtgttttctagtgagagtaatggatgcagttagctttgctgcagcaatgactgcatcttcttctatcctggcaaaggcttttccaaataacgtggctacggtattgggaagtcttgagactttttctggactggggctaatactaggtcctcctgtaggtggctttttgtatcaatcctttggctatgaagtgccttttattgttctgggatgcgtcgttttgctgatggtaccactcaatatgtatattttacccaattacgagtctgatccaggtgaacactcattctggaaactgatcgctttacccaaagttggccttatagccttcgtcatcaactcactcagctcgtgttttggcttcctcgatcctactctgtctctctttgttttggagaagttcaatttaccagctggatatgtgggactagtattcctgggtatggcactgtcctatgccatctcttcaccactatttggtctcctaagtgataaaaggccacctctaaggaaatggcttctggtgtttggcaacttaatcacagccgggtgctacatgctcttagggcctgtcccaatcttgcatattaaaagtcagctctggctgctggtgctgatattagttgtaagtggcctctctgctggaatgagtataattccaactttcccggaaattctcagttgtgcacatgaaaatgggtttgaagagggattaagtacattgggacttgtatcaggtctttttagtgcaatgtggtcaattggtgcttttatgggaccaacgctgggtggatttctgtatgagaaaattggttttgaatgggcagcagctatacaaggtctatgggctctgataagtggattagccatgggcttgttttatctactggagtattcaaggagaaaaaggtctaaatctcaaaacatcctcagcacagaggaggaacgaactactctcttgcctaatgaaacctagtccgatggatcctggattgatacaaggttgagaaatgaatgctcctggccttaaacatcaccgtaggaagggtttttaaaattttacgcgcaaaactccgtggaccccgtgccagtgtcttggaagtgtcaacgtgtttttggatgatcctgtattgggctgtacttactgtgatactgaaaagctgtcctgctgaagcagctatatttgaaatattaagtatgaaaggagtaattaaaaacaagcaaaacaaaacaagacttagtttttaaatgaccaaacttgtccttaaagatgttgttattaactcgagttagttcttatttcctctgtttattttttattctaagtacactgattctgtgaatgtaccttttttattaacagggaaagaaatgaattaatttgatatgctctaaatacataaaggtgcttcaaaatatgtagaaacattactatgaaatcagtttttaaaagatatactttctctttgtcctgaggtttttcggtcttgttcaaaaggaagaattcttgcctgccatacagaaactctctagcactccctgaccttaagcttttctaaaaattctgtttgtgtgaaaagtacaagaataacaatacttacaacttccatttttgtaacctacgttcacttatgatctggatttataaacattacttggtataacgtttttcatttcctttaatgtctctgttttttggctctaccatctgttttgtttttgtttttatctatatcttggtagatgtatttcatccctagagcaggtcagcctccttcccctaatgcgaatgcttgttttgttagggaagggcttcctccaacttcgtgtgaaattgtgatgttgaagtgaataaatgtctattgtgtaactctcaaaaaaaaaaaaaaaaaaaaaaaaaaaaaaaaaaaaaaaaaaaagagagggggggggcgcgttaaagagttttcccgcgggggggcgcccaagttttaggggttccccggtttttttttgcaacaagggggcccacaagaggggagacgcgatattaaaaacgagacgacgcgggcgccggcgcggttacacacgcggtgcgggcgagggggaacaaagcgtctaccgtgggagcacctcgggaagaagcacacactcactcgggggagggggggacaaatatatggtgggggcaaacaacttctctctaacaagaagattcttataacacggccctaggaggggaaacatcttaacactttctgaacgctgttaatcagggggtttcaaaccacagcggacaaatgatcactgacggcttgaaaaaactttctggcctcacagggagctacatctcgagaaccaatttttttaccgag

SEQ ID NO: 414806 - DNA, 2026 bp, Homo sapiens
tgtcggggcaaatacactttattcagtcctggcatcagactggcggagtcctgctgtgggtgccagtgccccagacagagggaccccacccctcagctacgagactagttctccaagaccacagacagtgacatctcttcaccactatttggtctcctaagtgataaaaggccacctctaaggaaatggcttctggtgtttggcaacttaatcacagccgggtgctacatgctcttagggcctgtcccaatcttgcatattaaaagtcagctctggctgctggtgctgatattagttgtaagtggcctctctgctggaatgagtataattccaactttcccggaaattctcagttgtgcacatgaaaatgggtttgaagagggattaagtacattgggacttgtatcaggtctttttagtgcaatgtggtcaattggtgcttttatgggaccaacgctgggtggatttctgtatgagaaaattggttttgaatgggcagcagctatacaaggtctatgggctctgataagtggattagccatgggcttgttttatctactggagtattcaaggagaaaaaggtctaaatctcaaaacatcctcagcacagaggaggaacgaactactctcttgcctaatgaaacctagtccgatggatcctggattgatacaaggttgagaaatgaatgctcctggccttaaacatcaccgtaggaagggtttttaaaattttacgcgcaaaactccgtggaccccgtgccagtgtcttggaagtgtcaacgtgtttttggatgatcctgtattgggctgtacttactgtgatactgaaaagctgtcctgctgaagcagctatatttgaaatattaagtatgaaaggagtaattaaaaacaagcaaaacaaaacaagacttagtttttaaatgaccaaacttgtccttaaagatgttgttattaactcgagttagttcttatttcctctgtttattttttattctaagtacactgattctgtgaatgtaccttttttattaacagggaaagaaatgaattaatttgatatgctctaaatacataaaggtgcttcaaaatatgtagaaacattactatgaaatcagtttttaaaagatatactttctctttgtcctgaggtttttcggtcttgttcaaaaggaagaattcttgcctgccatacagaaactctctagcactccctgaccttaagcttttctaaaaattctgtttgtgtgaaaagtacaagaataacaatacttacaacttccatttttgtaacctacgttcacttatgatctggatttataaacattacttggtataacgtttttcatttcctttaatgtctctgttttttggctctaccatctgttttgtttttgtttttatctatatcttggtagatgtatttcatccctagagcaggtcagcctccttcccctaatgcgaatgcttgttttgttagggaagggcttcctccaacttcgtgtgaaattgtgatgttgaagtgaataaatgtctattgtgtaactctcaaaaaaaaaaaaaaaaaaaaaaaaaaaaaaaaaaaaaaaaaaaagagagggggggggcgcgttaaagagttttcccgcgggggggcgcccaagttttaggggttccccggtttttttttgcaacaagggggcccacaagaggggagacgcgatattaaaaacgagacgacgcgggcgccggcgcggttacacacgcggtgcgggcgagggggaacaaagcgtctaccgtgggagcacctcgggaagaagcacacactcactcgggggagggggggacaaatatatggtgggggcaaacaacttctctctaacaagaagattcttataacacggccctaggaggggaaacatcttaacactttctgaacgctgttaatcagggggtttcaaaccacagcggacaaatgatcactgacggcttgaaaaaactttctggcctcacagggagctacatctcgagaaccaatttttttaccgag

SEQ ID NO: 414807 - DNA, 1859 bp, Homo sapiens
ctagtaatcccttaaggcatgagacacattaaaaccactttattgagccataattcatatacaattcacccatttaaagtgtacaattcaatggatttttgtatattcacagagttatacattcttcaccacaattttattttattttgagagagtcttttcactctcatcacccaggctggagtgcaatggtgcgatcttggctcactgcaacctccgcctcccaggtccaagagattcttctatctcagcctcctgagtagctgagattacaggcgtgagccaccatgcccgggcagtagaaacttttttaaaaagatagttggatggagatacaggtactggttttttgtttgtttgtttgtttttaagatgagaaatattgagattcatctcttctttccctcaatgtaggtctaaatctcaaaacatcctcagcacagaggaggaacgaactactctcttgcctaatgaaacctagtccgatggatcctggattgatacaaggttgagaaatgaatgctcctggccttaaacatcaccgtaggaagggtttttaaaattttacgcgcaaaactccgtggaccccgtgccagtgtcttggaagtgtcaacgtgtttttggatgatcctgtattgggctgtacttactgtgatactgaaaagctgtcctgctgaagcagctatatttgaaatattaagtatgaaaggagtaattaaaaacaagcaaaacaaaacaagacttagtttttaaatgaccaaacttgtccttaaagatgttgttattaactcgagttagttcttatttcctctgtttattttttattctaagtacactgattctgtgaatgtaccttttttattaacagggaaagaaatgaattaatttgatatgctctaaatacataaaggtgcttcaaaatatgtagaaacattactatgaaatcagtttttaaaagatatactttctctttgtcctgaggtttttcggtcttgttcaaaaggaagaattcttgcctgccatacagaaactctctagcactccctgaccttaagcttttctaaaaattctgtttgtgtgaaaagtacaagaataacaatacttacaacttccatttttgtaacctacgttcacttatgatctggatttataaacattacttggtataacgtttttcatttcctttaatgtctctgttttttggctctaccatctgttttgtttttgtttttatctatatcttggtagatgtatttcatccctagagcaggtcagcctccttcccctaatgcgaatgcttgttttgttagggaagggcttcctccaacttcgtgtgaaattgtgatgttgaagtgaataaatgtctattgtgtaactctcaaaaaaaaaaaaaaaaaaaaaaaaaaaaaaaaaaaaaaaaaaaagagagggggggggcgcgttaaagagttttcccgcgggggggcgcccaagttttaggggttccccggtttttttttgcaacaagggggcccacaagaggggagacgcgatattaaaaacgagacgacgcgggcgccggcgcggttacacacgcggtgcgggcgagggggaacaaagcgtctaccgtgggagcacctcgggaagaagcacacactcactcgggggagggggggacaaatatatggtgggggcaaacaacttctctctaacaagaagattcttataacacggccctaggaggggaaacatcttaacactttctgaacgctgttaatcagggggtttcaaaccacagcggacaaatgatcactgacggcttgaaaaaactttctggcctcacagggagctacatctcgagaaccaatttttttaccgag

SEQ ID NO: 414808 - DNA, 2246 bp, Homo sapiens
gtcttattcctttttagtgtattggaccgagttccagatgggccagtatttattgctatgtgttttctagtgagagtaatggatgcagttagctttgctgcagcaatgactgcatcttcttctatcctggcaaaggcttttccaaataacgtggctacggtattgggaagtcttgagactttttctggactggggctaatactaggtcctcctgtaggtggctttttgtatcaatcctttggctatgaagtgccttttattgttctgggatgcgtcgttttgctgatggtaccactcaatatgtatattttacccaattacgagtctgatccaggtgaacactcattctggaaactgatcgctttacccaaagttggccttatagccttcgtcatcaactcactcagctcgtgttttggcttcctcgatcctactctgtctctctttgttttggagaagttcaatttaccagctggatatgtgggactagtattcctgggtatggcactgtcctatgccatctcttcaccactatttggtctcctaagtgataaaaggccacctctaaggaaatggcttctggtgtttggcaacttaatcacagccgggtgctacatgctcttagggcctgtcccaatcttgcatattaaaagtcagctctggctgctggtgctgatattagttgtaagtggcctctctgctggaatgagtataattccaactttcccggaaattctcagttgtgcacatgaaaatgggtttgaagagggattaagtacattgggacttgtatcaggtctttttagtgcaatgtggtcaattggtgcttttatgggaccaacgctgggtggatttctgtatgagaaaattggttttgaatgggcagcagctatacaaggtctatgggctctgataagtggattagccatgggcttgttttatctactggagtattcaaggagaaaaaggtctaaatctcaaaacatcctcagcacagaggaggaacgaactactctcttgcctaatgaaacctagtccgatggatcctggattgatacaaggttgagaaatgaatgctcctggccttaaacatcaccgtaggaagggtttttaaaattttacgcgcaaaactccgtggaccccgtgccagtgtcttggaagtgtcaacgtgtttttggatgatcctgtattgggctgtacttactgtgatactgaaaagctgtcctgctgaagcagctatatttgaaatattacttggtataacgtttttcatttcctttaatgtctctgttttttggctctaccatctatgtagaaacattactatgaaatcagtttttaaaagatatactttctctttgtcctgaggtttttcggtcttgttcaaaaggaagaattcttgcctgccatacagaaactctctagcactccctgaccttaagcttttctaaaaattctgtttgtgtgaaaagtacaagaataacaatacttacaacttccatttttgtaacctacgttcacttatgatctggatttataaacattacttggtataacgtttttcatttcctttaatgtctctgttttttggctctaccatctgttttgtttttgtttttatctatatcttggtagatgtatttcatccctagagcaggtcagcctccttcccctaatgcgaatgcttgttttgttagggaagggcttcctccaacttcgtgtgaaattgtgatgttgaagtgaataaatgtctattgtgtaactctcaaaaaaaaaaaaaaaaaaaaaaaaaaaaaaaaaaaaaaaaaaaagagagggggggggcgcgttaaagagttttcccgcgggggggcgcccaagttttaggggttccccggtttttttttgcaacaagggggcccacaagaggggagacgcgatattaaaaacgagacgacgcgggcgccggcgcggttacacacgcggtgcgggcgagggggaacaaagcgtctaccgtgggagcacctcgggaagaagcacacactcactcgggggagggggggacaaatatatggtgggggcaaacaacttctctctaacaagaagattcttataacacggccctaggaggggaaacatcttaacactttctgaacgctgttaatcagggggtttcaaaccacagcggacaaatgatcactgacggcttgaaaaaactttctggcctcacagggagctacatctcgagaaccaatttttttaccgag

SEQ ID NO: 414809 - DNA, 1831 bp, Homo sapiens
gtcttattcctttttagtgtattggaccgagttccagatgggccagtatttattgctatgtgttttctagtgagagtaatggatgcagttagctttgctgcagcaatgactgcatcttcttctatcctggcaaaggcttttccaaataacgtggctacggtattgggaagtcttgagactttttctggactggggctaatactaggtcctcctgtaggtggctttttgtatcaatcctttggctatgaagtgccttttattgttctgggatgcgtcgttttgctgatggtaccactcaatatgtatattttacccaattacgagtctgatccaggtgaacactcattctggaaactgatcgctttacccaaagttggccttatagccttcgtcatcaactcactcagctcgtgttttggcttcctcgatcctactctgtctctctttgttttggagaagttcaatttaccagctggatatgtgggactagtattcctgggtatggcactgtcctatgccatctcttcaccactatttggtctcctaagtgataaaaggccacctctaaggaaatggcttctggtgtttggcaacttaatcacagccgggtgctacatgctcttagggcctgtcccaatcttgcatattaaaagtcagctctggctgctggtgctgatattagttgtaagtggcctctctgctggaatgagtataattccaactttcccggaaattctcagttgtgcacatgaaaatgggtttgaagagggattaagtacattgggacttgtatcaggtctttttagtgcaatgtggtcaattggtgcttttatgggaccaacgctgggtggatttctgtatgagaaaattggttttgaatgggcagcagctatacaaggtctatgggctctgataagtggattagccatgggcttgttttatctactggagtattcaaggagaaaaaggtctaaatctcaaaacatcctcagcacagaggaggaacgaactactctcttgcctaatgaaacctagtccgatggatcctggattgatacaaggttgagaaatgaatgctcctggccttaaacatcaccgtaggaagggtttttaaaattttacgcgcaaaactccgtggaccccgtgccagtgtcttggaagtgtcaacgtgtttttggatgatcctgtattgggctgtacttactgtgatactgaaaagctgtcctgctgaagcagctatatttgaaatattaagtatgaaaggagtaattaaaaacaagcaaaacaaaacaagacttagtttttaaatgaccaaacttgtccttaaagatgttgttattaactcgagttagttcttatttcctctgtttattttttattctaagtacactgattctgtgaatgtaccttttttattaacagggaaagaaatgaattaatttgatatgctctaaatacataaaggtgcttcaaaatatgtagaaacattactatgaaatcagtttttaaaagatatactttctctttgtcctgaggtttttcggtcttgttcaaaaggaagaattcttgcctgccatacagaaactctctagcactccctgaccttaagcggatcagcctgatccgcttaagcagcctcatttcacagaggagaaaacagactcaatgaggtagccagtaagcagaagtcacactagtagccagaaacagagctgcgggcgaattgtgtcattccctctgtagagctcattttctctccacttaatgtgtagacacttgggtcagcagaagtgcccaggccctggcttcccttgtaatgcaccagtctcgg

SEQ ID NO: 414810 - DNA, 661 bp, Homo sapiens
agctttgctgcagcaatgactgcatcttcttctatcctggcaaaggcttttccaaataacgtggctacggtattggtatgtattttagaagtatttcccactttcctttgagtgtaggccaaaatatttgcccttccaagttaaagctggggtccattcttctatacttgcatttctctactctctgtattattgttgcctttcaccccgagtttgactagcagcaagcctgtcaataaatgtaacattggtttcacttaggtgctcttcctggttttagaattccctgaatgggcagtttgacaggtaaatgtggtccaaatcagtcgttctttttaccacttaaaaaaaaaattttcctttgtagtttttttgctgtctccccgtagcctagattgtggctgagctgcctgaagcattcctctgctttagaaaagagttatccctagtggcaaaataatcaattcatactaaaggccttcttccactttccccagatttatgcacgggatcttagaaatcatctcaaagtccttaagtgtttctgtgctgtctgtctgaggagtgcttttgcattttgacataaaaatccagatcctggtggcatgatattgacatgcgtttttgtgtactgcctagatgcgtatagacctggtattag

SEQ ID NO: 414811 - DNA, 408 bp, Homo sapiens
gtccaaggacgtggcttgaagccgggagctggggcgccggagtccacgcaccggggatggaggcgctgggtgacctggagggaccacgcgcaccaggaggtgaccatgaattgcgtggccgggagcccggagaccagcggcggcttccggcgtgtctctttagcaacgattgaattgcttatagcttgatctgtttccgagagattggaaaaggctggggcctgatcgtggggttcgggccagcgtttcttttctctctggacggggtaaagttccaggattggatatgtgtcacggtttctaatgactttctaacctatacctctgctttttaagtactgtgtgtttaatgcattcaaataagtatgccattaggcaaatgtaaaacgttacctttcaagtacccat

SEQ ID NO: 414812 - DNA, 658 bp, Homo sapiens
atttctagaaaaccatggagtaaatgtaactatgaaaattcttttaaataagatttgctttttatcttagaagcagagtattcttgctgttggtttttttccagattatccttggtttatcttaattgatctatcatacaattttttctttcacacaggttttccttttaataatggatacactcatgtctctttttgcagtgaaaatgggtttgaagagggattaagtacattgggacttgtatcaggtctttttagtgcaatgtggtcaattgggtgagtagtcatttaatttctttctttttttttttttttgagatggagtttcactctcatcacccaggctggagtgcaatggtgcgatcttggctcactgcaacctccgcctcccaggtccaagagattcttctatctcagcctcctgagtagctgagattacaggtgcccaccaccacatctggctaatttttgtatttttagtagagacagggtttcaccgtgttggccaggctggtcttgaactcctgacctcaggtgatctgcccgccttggcctcccaaagtgctgggattacaggcatgagccactgtgcccagcctcatttaatttcattcatacttgcaagatggaaaatattaatactatccctgcttgatgt

SEQ ID NO: 414813 - DNA, 2261 bp, Homo sapiens
gtggctccttggaggtcgagtccaaggacgtggcttgaagccgggagctggggcgccggagtccacgcaccggggatggaggcgctgggtgacctggagggaccacgcgcaccaggaggtgatgatcctgcaggaagtgcaggagagacccccgggtggctttcgagagaacaggtttttgtactgatatcggcagcttcggtgaacttaggttccatgatgtgctattctatacttggaccgtttttccccaaagaggctgaaaagaagggagccagcaatacaattatcggtatgatctttggatttcaatttaccagctggatatgtgggactagtattcctgggtatggcactgtcctatgccatctcttcaccactatttggtctcctaagtgataaaaggccacctctaaggaaatggcttctggtgtttggcaacttaatcacagccgggtgctacatgctcttagggcctgtcccaatcttgcatattaaaagtcagctctggctgctggtgctgatattagttgtaagtggcctctctgctggaatgagtataattccaactttcccggaaattctcagttgtgcacatgaaaatgggtttgaagagggattaagtacattgggacttgtatcaggtctttttagtgcaatgtggtcaattggtgcttttatgggaccaacgctgggtggatttctgtatgagaaaattggttttgaatgggcagcagctatacaaggtctatgggctctgataagtggattagccatgggcttgttttatctactggagtattcaaggagaaaaaggtctaaatctcaaaacatcctcagcacagaggaggaacgaactactctcttgcctaatgaaacctagtccgatggatcctggattgatacaaggttgagaaatgaatgctcctggccttaaacatcaccgtaggaagggtttttaaaattttacgcgcaaaactccgtggaccccgtgccagtgtcttggaagtgtcaacgtgtttttggatgatcctgtattgggctgtacttactgtgatactgaaaagctgtcctgctgaagcagctatatttgaaatattaagtatgaaaggagtaattaaaaacaagcaaaacaaaacaagacttagtttttaaatgaccaaacttgtccttaaagatgttgttattaactcgagttagttcttatttcctctgtttattttttattctaagtacactgattctgtgaatgtaccttttttattaacagggaaagaaatgaattaatttgatatgctctaaatacataaaggtgcttcaaaatatgtagaaacattactatgaaatcagtttttaaaagatatactttctctttgtcctgaggtttttcggtcttgttcaaaaggaagaattcttgcctgccatacagaaactctctagcactccctgaccttaagcttttctaaaaattctgtttgtgtgaaaagtacaagaataacaatacttacaacttccatttttgtaacctacgttcacttatgatctggatttataaacattacttggtataacgtttttcatttcctttaatgtctctgttttttggctctaccatctgttttgtttttgtttttatctatatcttggtagatgtatttcatccctagagcaggtcagcctccttcccctaatgcgaatgcttgttttgttagggaagggcttcctccaacttcgtgtgaaattgtgatgttgaagtgaataaatgtctattgtgtaactctcaaaaaaaaaaaaaaaaaaaaaaaaaaaaaaaaaaaaaaaaaaaagagagggggggggcgcgttaaagagttttcccgcgggggggcgcccaagttttaggggttccccggtttttttttgcaacaagggggcccacaagaggggagacgcgatattaaaaacgagacgacgcgggcgccggcgcggttacacacgcggtgcgggcgagggggaacaaagcgtctaccgtgggagcacctcgggaagaagcacacactcactcgggggagggggggacaaatatatggtgggggcaaacaacttctctctaacaagaagattcttataacacggccctaggaggggaaacatcttaacactttctgaacgctgttaatcagggggtttcaaaccacagcggacaaatgatcactgacggcttgaaaaaactttctggcctcacagggagctacatctcgagaaccaatttttttaccgag

SEQ ID NO: 414814 - DNA, 2455 bp, Homo sapiens
gtcttattcctttttagtgtattggaccgagttccagatgggccagtatttattgctatgtgttttctagtgagagtaatggatgcagttagctttgctgcagcaatgactgcatcttcttctatcctggcaaaggcttttccaaataacgtggctacggtattgggaagtcttgagactttttctggactggggctaatactaggtcctcctgtaggtggctttttgtatcaatcctttggctatgaagtgccttttattgttctgggatgcgtcgttttgctgatggtaccactcaatatgtatattttacccaattacgagtctgatccaggtgaacactcattctggaaactgatcgctttacccaaagttggccttatagccttcgtcatcaactcactcagctcgtgttttggcttcctcgatcctactctgtctctctttgttttggagaagttcaatttaccagctggatatgtgggactagtattcctgggtatggcactgtcctatgccatctcttcaccactatttggtctcctaagtgataaaaggccacctctaaggaaatggcttctggtgtttggcaacttaatcacagccgggtgctacatgctcttagggcctgtcccaatcttgcatattaaaagtcagctctggctgctggtgctgatattagttgtaagtggcctctctgctggaatgagtataattccaactttcccggaaattctcagttgtgcacatttcactctcatcacccaggctggagtgcaatggtgcgatcttggctcactgcaacctccgcctcccaggtccaagagattcttctatctcagcctcctgagtagctgagattacagtgcttttatgggaccaacgctgggtggatttctgtatgagaaaattggttttgaatgggcagcagctatacaaggtctatgggctctgataagtggattagccatgggcttgttttatctactggagtattcaaggagaaaaaggtctaaatctcaaaacatcctcagcacagaggaggaacgaactactctcttgcctaatgaaacctagtccgatggatcctggattgatacaaggttgagaaatgaatgctcctggccttaaacatcaccgtaggaagggtttttaaaattttacgcgcaaaactccgtggaccccgtgccagtgtcttggaagtgtcaacgtgtttttggatgatcctgtattgggctgtacttactgtgatactgaaaagctgtcctgctgaagcagctatatttgaaatattaagtatgaaaggagtaattaaaaacaagcaaaacaaaacaagacttagtttttaaatgaccaaacttgtccttaaagatgttgttattaactcgagttagttcttatttcctctgtttattttttattctaagtacactgattctgtgaatgtaccttttttattaacagggaaagaaatgaattaatttgatatgctctaaatacataaaggtgcttcaaaatatgtagaaacattactatgaaatcagtttttaaaagatatactttctctttgtcctgaggtttttcggtcttgttcaaaaggaagaattcttgcctgccatacagaaactctctagcactccctgaccttaagcttttctaaaaattctgtttgtgtgaaaagtacaagaataacaatacttacaacttccatttttgtaacctacgttcacttatgatctggatttataaacattacttggtataacgtttttcatttcctttaatgtctctgttttttggctctaccatctgttttgtttttgtttttatctatatcttggtagatgtatttcatccctagagcaggtcagcctccttcccctaatgcgaatgcttgttttgttagggaagggcttcctccaacttcgtgtgaaattgtgatgttgaagtgaataaatgtctattgtgtaactctcaaaaaaaaaaaaaaaaaaaaaaaaaaaaaaaaaaaaaaaaaaaagagagggggggggcgcgttaaagagttttcccgcgggggggcgcccaagttttaggggttccccggtttttttttgcaacaagggggcccacaagaggggagacgcgatattaaaaacgagacgacgcgggcgccggcgcggttacacacgcggtgcgggcgagggggaacaaagcgtctaccgtgggagcacctcgggaagaagcacacactcactcgggggagggggggacaaatatatggtgggggcaaacaacttctctctaacaagaagattcttataacacggccctaggaggggaaacatcttaacactttctgaacgctgttaatcagggggtttcaaaccacagcggacaaatgatcactgacggcttgaaaaaactttctggcctcacagggagctacatctcgagaaccaatttttttaccgag

SEQ ID NO: 414815 - DNA, 1345 bp, Homo sapiens
gaacctggcatccccgactccctgcaggcagcgatccgcccggcccggagctccgcaaagccttccgtggaccccgtgccagtgtcttggaagtgtcaacgtgtttttggatgatcctgtattgggctgtacttactgtgatactgaaaagctgtcctgctgaagcagctatatttgaaatattaagtatgaaaggagtaattaaaaacaagcaaaacaaaacaagacttagtttttaaatgaccaaacttgtccttaaagatgttgttattaactcgagttagttcttatttcctctgtttattttttattctaagtacactgattctgtgaatgtaccttttttattaacagggaaagaaatgaattaatttgatatgctctaaatacataaaggtgcttcaaaatatgtagaaacattactatgaaatcagtttttaaaagatatactttctctttgtcctgaggtttttcggtcttgttcaaaaggaagaattcttgcctgccatacagaaactctctagcactccctgaccttaagcttttctaaaaattctgtttgtgtgaaaagtacaagaataacaatacttacaacttccatttttgtaacctacgttcacttatgatctggatttataaacattacttggtataacgtttttcatttcctttaatgtctctgttttttggctctaccatctgttttgtttttgtttttatctatatcttggtagatgtatttcatccctagagcaggtcagcctccttcccctaatgcgaatgcttgttttgttagggaagggcttcctccaacttcgtgtgaaattgtgatgttgaagtgaataaatgtctattgtgtaactctcaaaaaaaaaaaaaaaaaaaaaaaaaaaaaaaaaaaaaaaaaaaagagagggggggggcgcgttaaagagttttcccgcgggggggcgcccaagttttaggggttccccggtttttttttgcaacaagggggcccacaagaggggagacgcgatattaaaaacgagacgacgcgggcgccggcgcggttacacacgcggtgcgggcgagggggaacaaagcgtctaccgtgggagcacctcgggaagaagcacacactcactcgggggagggggggacaaatatatggtgggggcaaacaacttctctctaacaagaagattcttataacacggccctaggaggggaaacatcttaacactttctgaacgctgttaatcagggggtttcaaaccacagcggacaaatgatcactgacggcttgaaaaaactttctggcctcacagggagctacatctcgagaaccaatttttttaccgag

SEQ ID NO: 414816 - DNA, 1222 bp, Homo sapiens
gtcttattcctttttagtgtattggaccgagttccagatgggccagtatttattgctatgtgttttctagtgagagtaatggatgcagttagctttgctgcagcaatgactgcatcttcttctatcctggcaaaggcttttccaaataacgtggctacggtattgggaagtcttgagactttttctggactggggctaatactaggtcctcctgtaggtggctttttgtatcaatcctttggctatgaagtgccttttattgttctgggatgcgtcgttttgctgatggtaccactcaatatgtatattttacccaattacgagtctgatccaggtgaacactcattctggaaactgatcgctttacccaaagttggccttatagccttcgtcatcaactcactcagctcgtgttttggcttcctcgatcctactctgtctctctttgttttggagaagttcaatttaccagctggatatgtgggactagtattcctgggtatggcactgtcctatgccatctcttcaccactatttggtctcctaagtgataaaaggccacctctaaggaaatggcttctggtgtttggcaacttaatcacagccgggtgctacatgctcttagggcctgtcccaatcttgcatattaaaagtcagctctggctgctggtgctgatattagttgtaagtggcctctctgctggaatgagtataattccaactttcccggaaattctcagttgtgcacatgaaaatgggtttgaagagggattaagtacattgggacttgtatcaggtctttttagtgcaatgtggtcaattggtgcttttatgggaccaacgctgggtggatttctgtatgagaaaattggttttgaatgggcagcagctatacaaggtctatgggctctgataagtgtgagtaatcagtcttttatttgcattttccttatatttgtggaaaaacttgacttggaaaatttacattaatcagtacttttaattgtgtttaagggattagccatgggcttgttttatctactggagtattcaaggagaaaaaggtatggtcaattttggggctttttttctctctttaaaagttagccagtgcaagtggaaaataaataacattttacatttattcttccagtcagtggatttctaagcactctgaggctcatcagttggtagatacttttttaatttttattttttgaga

SEQ ID NO: 414817 - DNA, 2075 bp, Homo sapiens
ggcacatagaagagtgagccatcatctggtttccagcgccaagacttctgcaggagagcctccgctgggctttcaagttggcaacgtcacacctcctgaggacagccaggactccagcttttgctgagctttgcatcttgcctccttccttcaaaaggctccaggcccatgctcggctgtcttcaagtcccgcatgcccctggccaggcacctcaccgcccctccagcccagcccaatcctagagctcacctccaggacccagagtctgcccttctgcccagaatgactcaccattatttctagctcgagtgagaagacgtgatgaggagttgggctgcctgttggtgcatctcagattcctgcagcatctgatcagctctgcaaggaagagagcttcacgtctctggtcagccaagcgaggctgtctctccagctctcagagagctctcggggctctcctgcaggagaccaggccaatgctcctgtgcttcctggggccagtagcagcaccctgagctccctgccaccaggcagctgaaaggcatagcgtgaggtgcttctctcagtcccaattatgacagtggccaccggagacccagcagacgaggctgctgccctccctgggcacccacaggacacctatgacccagaggcagaccacgagtgctgtgagagggtggtgatcaacatctcagggctgcggtttgagacccagctaaagaccttagcccagtttccagagaccctcttaggggacccaaagaaacgaatgaggtactttgaccccctccgaaatgagtactttttcgatcggaaccgccctagctttgatgccattttgtactactaccagtcagggggccgattgaggcgacctgtgaatgtgcccttagatatattctctgaagaaattcggttttatgagctgggagaagaagcgatggagatgtttcgggaagatgaaggctacatcaaggaggaagagcgtcctctgcctgaaaatgagtttcagagacaagtgtggcttctctttgaatacccagagagctcagggcctgccaggattatagctattgtgtctgtcatggtgattctgatctcaattgtcagcttctgtctggaaacattgcccatcttccgggatgagaatgaagacatgcatggtagtggggtgaccttccacacctattccaacagcaccatcgggtaccagcagtccacttccttcacagaccctttcttcattgtagagacactctgcatcatctggttctcctttgaattcttggtgaggttctttgcctgtcccagcaaagccggcttcttcaccaacatcatgaacatcattgacattgtggccatcatcccctacttcatcaccctggggacagagttggctgagaagccagaggacgctcagcaaggccagcaggccatgtcactggccatcctccgtgtcatccggttggtaagagtctttaggattttcaagttgtccagacactccaaaggtctccagattctaggtcagaccctcaaagccagcatgagagaattgggcctcctgatattctttctcttcataggggtcatccttttctctagtgctgtgtattttgcagaggccgatgagcgagagtcccagttccccagcatcccagatgccttctggtgggcagtcgtctccatgacaactgtaggctatggagacatggttccgactaccattgggggaaagatagtgggttccctatgtgcgattgcaggtgtgttaactattgccttaccggtccctgtcattgtgtccaatttcaactacttctaccaccgggagacagagggagaggagcaggcccaatacttgcaagtgacaagctgtccaaagatcccatcctcccctgacctaaagaaaagtagaagtgcctctaccattagtaagtctgattacatggagatccaggagggtgtaaataacagtaatgaggactttagagaggaaaacttgaaaacagccaactgtaccttggctaacacaaactatgtgaatattaccaaaatgttaactgatgtctga

SEQ ID NO: 414818 - DNA, 298 bp, Homo sapiens
cgcatttattttaatcaatcgaaaaccctgaagaaaggtcaaaaagctatcttgagagtcttttagattggtaatatttagtgtcatgcttccccaaggaatatagatacttctgaagtatttttttttgaaaatttatacagatagtagctgaatacaataggtatctaaaaccagtaaatgatgttgagaatgaatgaaatgattaatgtagccaaatatagtattaaacattaattttatacagaaagaaataggattggtacagagaaaaattaaaatgtacaagattttttaa

SEQ ID NO: 414819 - DNA, 343 bp, Homo sapiens
  misc_feature (7)..(7): n is a, c, g, or t
cattgtnagtcccttgctttacactgtagccatgtctgatagaaagtgtgtggagcttgtcacaggatcatggataggtggaatagttaacacattaatccacacaatcagcttgaggagactgtccttttgtaggctaaatgctgtcagccacttcttctgtgacattccttcactgctaaagctgtcatgttctgacacctccatgaatgagttgttgctgttaaccttctccggagtcattgccatggccaccttcttgactgtgatcatttcctacatcttcattgcttttgctagcctaaggatccactcagcatcaggcagacagcaagccttctcc

SEQ ID NO: 414820 - DNA, 314 bp, Homo sapiens
tttaaagaatggtagacctgctgtccctatattgatattctgtacttgtatagtaacatgttttatagtcagatgattaggccagatatcaaagccttcagtctttttccactacaaattctgctacatacagaaacacagatatattaataaatgataccttagagtctcactccttaatctaaatagctcggtgattcttcattcctacagaataaaattgtctcccaaactaaatttccagcttcattctcattattcccttttatttctaagatctaatcaaattggataagggagtgctctttaaaaaa

SEQ ID NO: 414821 - DNA, 864 bp, Homo sapiens
agaagaactcaaacctctggaggaagtgctaaatttagctcaaagcaaaaactttcacttaagacccagggacttaatcagcaatatcaacgtaatagttctggaactaaagatggctgggcagtgctcccaaaatgaatattttgacagtttgttgcatgcttgcataccttgtcaacttcgatgttcttctaatactcctcctctaacatgtcagcgttattgtaatgcaagtgtgaccaattcagtgaaaggaacgaatgcgattctctggacctgtttgggactgagcttaataatttctttggcagttttcgtgctaatgtttttgctaaggaagataagctctgaaccattaaaggacgagtttaaaaacacaggatcaggtctcctgggcatggctaacattgacctggaaaagagcaggactggtgatgaaattattcttccgagaggcctcgagtacacggtggaagaatgcacctgtgaagactgcatcaagagcaaaccgaaggtcgactctgaccattgctttccactcccagctatggaggaaggcgcaaccattcttgtcaccacgaaaacgaatgactattgcaagagcctgccagctgctttgagtgctacggagatagagaaatcaatttctgctaggtaattaaccatttcgactcgagcagtgccactttaaaaatcttttgtcagaatagatgatgtgtcagatctctttaggatgactgtatttttcagttgccgatacagctttttgtcctctaactgtggaaactctttatgttagatatatttctctaggttactgttgggagcttaatggtagaaacttccttggtttctatgattaaa

SEQ ID NO: 414822 - DNA, 248 bp, Homo sapiens
agaagaactcaaacctctggaggaagtgctaaatttagctcaaagcaaaaactttcacttaagacccagggacttaatcagcaatatcaacgtaatagttctggaactaaagggatctgaaacaacattcatgtgtgaatatgctgatgagacagcaaccattgtagaatttctgaacagatggattaccttttgtcaaagcatcatctcaacactgacttgataattaagtgcttcccacttaaaac

SEQ ID NO: 414823 - DNA, 1043 bp, Homo sapiens
tcagctctatgctctgatgattgcttgctgcccttgggtcaggtgttcagttctggctgaattaatatggcctagaagcggggtggcaaatcacatggtacgcaacagggccacggacaccaccaggccttccagatctgaaatgcaaacaaggaaacagaagcttctaggcatcagaaggtgtggggagcagcacagtactcagaggagtgaggagcgtggcgcctgctgggaggaaggcctggccatggtatgttcttggatttctggcagcagccctcattggtccacgtgcgtccccactacagactccttgacttgagccagcttgagtgggtctctactcttttctattgtgttttgccacttggctgcttcctggccaagtcgcacctgactgcatgaacacctgttcaaacgtgtgttctctgttctctaagatgggtgaaagtcgatgccttctagtctcagtgaatttaacctgtgattttatgtctacgtatattgttcctttactgaacccaccacatgcgggccataaaatgagtgaaatcacagtgcaccctgttctcttatttttgaagtgtttcacgatttccagcatgtccatcagatggggggattgctaacttctctcttactcatgtacttacattctgtagttctcattgcatcactttggatgtttactttgaaaagcagaaactgtctctttaaacttggccctcaatgtcatttgcgtatctctgagaacaatagctatgtcccaccccagtttgtatttccgttggttgttggcacttttttctcattcccccatctcattaccttgtctgttttctggcactcactataatcagccttgcactagagctgtttgtggacttggcttcaccccctcctcctcagccctcccccacccattaaattgtgagctcttagaagacaggggtggcctttcatgtctgatcccctaccaaatctagcacagtgccttgcatcaagtagatttcaataaatatatgttaaatggcaaaaaaaaa

SEQ ID NO: 414824 - DNA, 2819 bp, Homo sapiens
cagccggtgactctagaactagaaagagattggttcataggcttctgctgtgggcagctaggggaaaattcacccatgtgttctggcatcacttcctatagccacacctaagtgagggcaacagagcagaggctcggagaggaaccctgcccctccgatggcttgtgcgttatgctgatagaagctggcagcactgccctgggctatgatttgcaacagccatgcccaggaggagcactaaagcaaaggtttggagggcagtggaacccttctgaaagcctgtgtggcatagaagtagaagctggtcctcctgggtctgagctaccatttccagtgggctcccccaagaggaacagcagcaagggctagcgaggaacctgcccctccagtggcccacagaagccacagatagaagccagccccaccagggctgtgctgtgacttcccagcagctgtggctggggacagggacactaggagggcctggcaaggaagtgtgcccttctcgtgggcccaccaaggctgaggcagagcttcctagcagacacaacttggaagggcttctcaggcacccatcctgacccccaggctggagaggagccaaaagcacttgttacatagtgattccttttgccctgtgggcctcagttcttgcagtagttgtgaatctgtgtctgaaatcactactttcttctcggatcctttttctcttttcgagttgttaggatgtgttttgtacagctgtcatttgataaagaaggttgacctctaccaggggcaagtctggcacctttacctagaagtactctgccatgtcttgcccgttcatttatcgtttgttgggtttcatgagggatcccattgaagtagatcccttttatgaagggatcccattgaatgcagcattaactcagaacgtagcataaagtcgtcactgctcccagctgggacgtggtgtcttggcatcccttcctgccgtccttgactctttcccatcttcagttctataattttctcccaaacaaatgctcttttagagttaacactaaagatctggtctttgccgtcaaggttgacagaacagctgttcatggtgtttgcggtgaaacccgtgttctctttcaatgcagtctgtggctttaacgtgtgtcctgtaatttcgccaagttcatttcttgcctctggtaacttgggggtggatttccttgggctctctaggtgtactgctatgtcagatgcaaaatgtcacccagcttcctgtcacatatccttgtctgtgcattcatgcatctacctcattccggttttctttctaatctcatgtattcctgttgtgaggaaatgtgttcttttcccgatccttttgtagttcatacacgtgacaattgggtttccacgcacgtgcatgagatgttcctccttcaaaccttgttactatgtcagcacattaactgcctggcatggaaaaagaaaaaaaaaaaagaaatatgttcttttcctaccatttgaaaaaaatcctccattgcttttattagagttttgaatacttgtgaaaattttcaaaagaaagtaattgattaccatttttgctgcttattacgatgagctgtgtccattagctgtgtcaccccactcttgcatttccagaatagtccctacccaattgcagcgggcatgtttttgagtggtgttgcattccatgtgcttgattttgtcctagaactggcacagcgcctgccctacctgcagccctgggttgtggccctgttgcgtaccatgtgatttgccaccccgcttctaggccatattaattcagccagaactgaacacctgacccaagggcagcaagcaatcatcagagcatagagctgacagaacatgatggaccacggacaccaccaggccttccagatctgaaatgcaaacaaggaaacagaagcttctaggcatcagaaggtgtggggagcagcacagtactcagaggagtgaggagcgtggcgcctgctgggaggaaggcctggccatggtatgttcttggatttctggcagcagccctcattggtccacgtgcgtccccactacagactccttgacttgagccagcttgagtgggtctctactcttttctattgtgttttgccacttggctgcttcctggccaagtcgcacctgactgcatgaacacctgttcaaacgtgtgttctctgttctctaagatgggtgaaagtcgatgccttctagtctcagtgaatttaacctgtgattttatgtctacgtatattgttcctttactgaacccaccacatgcgggccataaaatgagtgaaatcacagtgcaccctgttctcttatttttgaagtgtttcacgatttccagcatgtccatcagatggggggattgctaacttctctcttactcatgtacttacattctgtagttctcattgcatcactttggatgtttactttgaaaagcagaaactgtctctttaaacttggccctcaatgtcatttgcgtatctctgagaacaatagctatgtcccaccccagtttgtatttccgttggttgttggcacttttttctcattcccccatctcattaccttgtctgttttctggcactcactataatcagccttgcactagagctgtttgtggacttggcttcaccccctcctcctcagccctcccccacccattaaattgtgagctcttagaagacaggggtggcctttcatgtctgatcccctaccaaatctagcacagtgccttgcatcaagtagatttcaataaatatatgttaaatggcaaaaaaaaa

SEQ ID NO: 414825 - DNA, 2765 bp, Homo sapiens
cagccggtgactctagaactagaaagagattggttcataggcttctgctgtgggcagctaggggaaaattcacccatgtgttctggcatcacttcctatagccacacctaagtgagggcaacagagcagaggctcggagaggaaccctgcccctccgatggcttgtgcgttatgctgatagaagctggcagcactgccctgggctatgatttgcaacagccatgcccaggaggagcactaaagcaaaggtttggagggcagtggaacccttctgaaagcctgtgtggcatagaagtagaagctggtcctcctgggtctgagctaccatttccagtgggctcccccaagaggaacagcagcaagggctagcgaggaacctgcccctccagtggcccacagaagccacagatagaagccagccccaccagggctgtgctgtgacttcccagcagctgtggctggggacagggacactaggagggcctggcaaggaagtgtgcccttctcgtgggcccaccaaggctgaggcagagcttcctagcagacacaacttggaagggcttctcaggcacccatcctgacccccaggctggagaggagccatagttgtgaatctgtgtctgaaatcactactttcttctcggatcctttttctcttttcgagttgttaggatgtgttttgtacagctgtcatttgataaagaaggttgacctctaccaggggcaagtctggcacctttacctagaagtactctgccatgtcttgcccgttcatttatcgtttgttgggtttcatgagggatcccattgaagtagatcccttttatgaagggatcccattgaatgcagcattaactcagaacgtagcataaagtcgtcactgctcccagctgggacgtggtgtcttggcatcccttcctgccgtccttgactctttcccatcttcagttctataattttctcccaaacaaatgctcttttagagttaacactaaagatctggtctttgccgtcaaggttgacagaacagctgttcatggtgtttgcggtgaaacccgtgttctctttcaatgcagtctgtggctttaacgtgtgtcctgtaatttcgccaagttcatttcttgcctctggtaacttgggggtggatttccttgggctctctaggtgtactgctatgtcagatgcaaaatgtcacccagcttcctgtcacatatccttgtctgtgcattcatgcatctacctcattccggttttctttctaatctcatgtattcctgttgtgaggaaatgtgttcttttcccgatccttttgtagttcatacacgtgacaattgggtttccacgcacgtgcatgagatgttcctccttcaaaccttgttactatgtcagcacattaactgcctggcatggaaaaagaaaaaaaaaaaagaaatatgttcttttcctaccatttgaaaaaaatcctccattgcttttattagagttttgaatacttgtgaaaattttcaaaagaaagtaattgattaccatttttgctgcttattacgatgagctgtgtccattagctgtgtcaccccactcttgcatttccagaatagtccctacccaattgcagcgggcatgtttttgagtggtgttgcattccatgtgcttgattttgtcctagaactggcacagcgcctgccctacctgcagccctgggttgtggccctgttgcgtaccatgtgatttgccaccccgcttctaggccatattaattcagccagaactgaacacctgacccaagggcagcaagcaatcatcagagcatagagctgacagaacatgatggaccacggacaccaccaggccttccagatctgaaatgcaaacaaggaaacagaagcttctaggcatcagaaggtgtggggagcagcacagtactcagaggagtgaggagcgtggcgcctgctgggaggaaggcctggccatggtatgttcttggatttctggcagcagccctcattggtccacgtgcgtccccactacagactccttgacttgagccagcttgagtgggtctctactcttttctattgtgttttgccacttggctgcttcctggccaagtcgcacctgactgcatgaacacctgttcaaacgtgtgttctctgttctctaagatgggtgaaagtcgatgccttctagtctcagtgaatttaacctgtgattttatgtctacgtatattgttcctttactgaacccaccacatgcgggccataaaatgagtgaaatcacagtgcaccctgttctcttatttttgaagtgtttcacgatttccagcatgtccatcagatggggggattgctaacttctctcttactcatgtacttacattctgtagttctcattgcatcactttggatgtttactttgaaaagcagaaactgtctctttaaacttggccctcaatgtcatttgcgtatctctgagaacaatagctatgtcccaccccagtttgtatttccgttggttgttggcacttttttctcattcccccatctcattaccttgtctgttttctggcactcactataatcagccttgcactagagctgtttgtggacttggcttcaccccctcctcctcagccctcccccacccattaaattgtgagctcttagaagacaggggtggcctttcatgtctgatcccctaccaaatctagcacagtgccttgcatcaagtagatttcaataaatatatgttaaatggcaaaaaaaaa

SEQ ID NO: 414826 - DNA, 2765 bp, Homo sapiens
cagccggtgactctagaactagaaagagattggttcataggcttctgctgtgggcagctaggggaaaattcacccatgtgttctggcatcacttcctatagccacacctaagtgagggcaacagagcagaggctcggagaggaaccctgcccctccgatggcttgtgcgttatgctgatagaagctggcagcactgccctgggctatgatttgcaacagccatgcccaggaggagcactaaagcaaaggtttggagggcagtggaacccttctgaaagcctgtgtggcatagaagtagaagctggtcctcctgggtctgagctaccatttccagtgggctcccccaagaggaacagcagcaagggctagcgaggaacctgcccctccagtggcccacagaagccacagatagaagccagccccaccagggctgtgctgtgacttcccagcagctgtggctggggacagggacactaggagggcctggcaaggaagtgtgcccttctcgtgggcccaccaaggctgaggcagagcttcctagcagacacaacttggaagggcttctcaggcacccatcctgacccccaggctggagaggagccaaaagcacttgttacatagtgattccttttgccctgtgggcctcagttcttgcagtagttgtgaatctgtgtctgaaatcactactttcttctcggatcctttttctcttttcgagttgttaggatgtgttttgtacagctgtcatttgataaagaaggttgacctctaccaggggcaagtctggcacctttacctagaagtactctgccatgtcttgcccgttcatttatcgtttgttgggtttcatgagggatcccattgaagtagatcccttttatgaagggatcccattgaatgcagcattaactcagaacgtagcataaagtcgtcactgctcccagctgggacgtggtgtcttggcatcccttcctgccgtccttgactctttcccatcttcagttctataattttctcccaaacaaatgctcttttagagttaacactaaagatctggtctttgccgtcaaggttgacagaacagctgttcatggtgtttgcggtgaaacccgtgttctctttcaatgcagtctgtggctttaacgtgtgtcctgtaatttcgccaagttcatttcttgcctctggtaacttgggggtggatttccttgggctctctaggtgtactgctatgtcagatgcaaaatgtcacccagcttcctgtcacatatccttgtctgtgcattcatgcatctacctcattccggttttctttctaatctcatgtattcctgttgtgaggaaatgtgttcttttcccgatccttttgtagttcatacacgtgacaattgggtttccacgcacgtgcatgagatgttcctccttcaaaccttgttactatgtcagcacattaactgcctggcatggaaaaagaaaaaaaaaaaagaaatatgttcttttcctaccatttgaaaaaaatcctccattgcttttattagagttttgaatacttgtgaaaattttcttagctgtgtcaccccactcttgcatttccagaatagtccctacccaattgcagcgggcatgtttttgagtggtgttgcattccatgtgcttgattttgtcctagaactggcacagcgcctgccctacctgcagccctgggttgtggccctgttgcgtaccatgtgatttgccaccccgcttctaggccatattaattcagccagaactgaacacctgacccaagggcagcaagcaatcatcagagcatagagctgacagaacatgatggaccacggacaccaccaggccttccagatctgaaatgcaaacaaggaaacagaagcttctaggcatcagaaggtgtggggagcagcacagtactcagaggagtgaggagcgtggcgcctgctgggaggaaggcctggccatggtatgttcttggatttctggcagcagccctcattggtccacgtgcgtccccactacagactccttgacttgagccagcttgagtgggtctctactcttttctattgtgttttgccacttggctgcttcctggccaagtcgcacctgactgcatgaacacctgttcaaacgtgtgttctctgttctctaagatgggtgaaagtcgatgccttctagtctcagtgaatttaacctgtgattttatgtctacgtatattgttcctttactgaacccaccacatgcgggccataaaatgagtgaaatcacagtgcaccctgttctcttatttttgaagtgtttcacgatttccagcatgtccatcagatggggggattgctaacttctctcttactcatgtacttacattctgtagttctcattgcatcactttggatgtttactttgaaaagcagaaactgtctctttaaacttggccctcaatgtcatttgcgtatctctgagaacaatagctatgtcccaccccagtttgtatttccgttggttgttggcacttttttctcattcccccatctcattaccttgtctgttttctggcactcactataatcagccttgcactagagctgtttgtggacttggcttcaccccctcctcctcagccctcccccacccattaaattgtgagctcttagaagacaggggtggcctttcatgtctgatcccctaccaaatctagcacagtgccttgcatcaagtagatttcaataaatatatgttaaatggcaaaaaaaaa

SEQ ID NO: 414827 - DNA, 2517 bp, Homo sapiens
cagccggtgactctagaactagaaagagattggttcataggcttctgctgtgggcagctaggggaaaattcacccatgtgttctggcatcacttcctatagccacacctaagtgagggcaacagagcagaggctcggagaggaaccctgcccctccgatggcttgtgcgttatgctgatagaagctggcagcactgccctgggctatgatttgcaacagccatgcccaggaggagcactaaagcaaaggtttggagggcagtggaacccttctgaaagcctgtgtggcatagaagtagaagctggtcctcctgggtctgagctaccatttccagtgggctcccccaagaggaacagcagcaagggctagcgaggaacctgcccctccagtggcccacagaagccacagatagaagccagccccaccagggctgtgctgtgacttcccagcagctgtggctggggacagggacactaggagggcctggcaaggaagtgtgcccttctcgtgggcccaccaaggctgaggcagagcttcctagcagacacaacttggaagggcttctcaggcacccatcctgacccccaggctggagaggagccaaaagcacttgttacatagtgattccttttgccctgtgggcctcagttcttgcagtagttgtgaatctgtgtctgaaatcactactttcttctcggatcctttttctcttttcgagttgttaggatgtgttttgtacagctgtcatttgataaagaaggttgacctctaccaggggcaagtctggcacctttacctagaagtactctgccatgtcttgcccgttcatttatcgtttgttgggtttcatgagggatcccattgaagtagatcccttttatgaagggatcccattgaatgcagcattaactcagaacgtagcataaagtcgtcactgctcccagctgggacgtggtgtcttggcatcccttcctgccgtccttgactctttcccatcttcagttctataattttctcccaaacaaatgctcttttagagttaacactaaagatctggtctttgccgtcaaggttgacagaacagctgttcatggtgtttgcggtgaaacccgtgttctctttcaatgcagtctgtggctttaacgtgtgtcctgtaatttcgccaagttcatttcttgcctctggtaacttgggggtggatttccttgggctctctaggtgtactgctatgtcagatgcaaaatgtcacccagcttcctgtcacatatccttgtctgtgcattcatgcatctacctcattccggttttctttctaatctcatgtattcctgttgtgaggaaatgtgttcttttcccgatccttttgtagttcatacacgtgacaattgggtttccacgcacgtgcatgagatgttcctccttcaaaccttgttactatgtcagcacattaactgcctggcatggaaaaagaaaaaaaaaaaagaaatatgttcttttcctaccatttgaaaaaaatcctccattgcttttattagagttttgaatacttgtgaaaattttcaaaagaaagtaattgattaccatttttgctgcttattacgatgagctgtgtccattagctgtgtcaccccactcttgcatttccagaatagtccctacccaattgcagcgggcatgtttttgagtggtgttgcattccatgtgcttgattttgtcctagaactggcacagcgcctgccctacctgcagccctgggttgtggccctgttgcgtaccatgtgatttgccaccccgcttctaggccatattaattcagccagaactgaacacctgacccaagggcagcaagcaatcatcagagcatagagctgacagaacatgatggaccacggacaccaccaggccttccagatctgaaatgcaaacaaggaaacagaagcttctaggcatcagaaggtgtggggagcagcacagtactcagaggagtgaggagcgtggcgcctgctgggaggaaggcctggccatgatgagtggccaactctggagcccaggatgttgcttcccagtctggtggtgaatcctccacaatctgagctggccctctggtgcccaaagcagactcctggggtccctgtattgggcacttacccacttcctgctggccgcagcatgacacctgatgctcctagagcagccaactgaattccagaagaaaggcttcagtggtgtgttttccagaaggaacctggctcctaggattaacagttgggtcaaatctcaaaaactctttgcccttaactgctgaaaactgccagcatctatagcagtcatagtcacaagatttcctttaaatttttcagcaattgttttcctaaggcattctgtaaagtctggcttgaagtttgtttagttgagataaaaatgtgtttgactgcactccagcctgagagacagagtgacatattgtctcaaaaataaataaacaaataagttttttaaaacatgtttgagaaccac

SEQ ID NO: 414828 - DNA, 2028 bp, Homo sapiens
  misc_feature (1969)..(1969): n is a, c, g, or t
  misc_feature (1971)..(1971): n is a, c, g, or t
  misc_feature (1975)..(1975): n is a, c, g, or t
  misc_feature (1991)..(1991): n is a, c, g, or t
  misc_feature (1995)..(1995): n is a, c, g, or t
  misc_feature (1997)..(1998): n is a, c, g, or t
  misc_feature (2002)..(2002): n is a, c, g, or t
  misc_feature (2013)..(2013): n is a, c, g, or t
cagccggtgactctagaactagaaagagattggttcataggcttctgctgtgggcagctaggggaaaattcacccatgtgttctggcatcacttcctatagccacacctaagtgagggcaacagagcagaggctcggagaggaaccctgcccctccgatggcttgtgcgttatgctgatagaagctggcagcactgccctgggctatgatttgcaacagccatgcccaggaggagcactaaagcaaaggtttggagggcagtggaacccttctgaaagcctgtgtggcatagaagtagaagctggtcctcctgggtctgagctaccatttccagtgggctcccccaagaggaacagcagcaagggctagcgaggaacctgcccctccagtggcccacagaagccacagatagaagccagccccaccagggctgtgctgtgacttcccagcagctgtggctggggacagggacactaggagggcctggcaaggaagtgtgcccttctcgtgggcccaccaaggctgaggcagagcttcctagcagacacaacttggaagggcttctcaggcacccatcctgacccccaggctggagaggagccaaaagcacttgttacatagtgattccttttgccctgtgggcctcagttcttgcagtagttgtgaatctgtgtctgaaatcactactttcttctcggatcctttttctcttttcgagttgttaggatgtgttttgtacagctgtcatttgataaagaaggttgacctctaccaggggcaagtctggcacctttacctagaagtactctgccatgtcttgcccgttcatttatcgtttgttgggtttcatgagggatcccattgaagtagatcccttttatgaagggatcccattgaatgcagcattaactcagaacgtagcataaagtcgtcactgctcccagctgggacgtggtgtcttggcatcccttcctgccgtccttgactctttcccatcttcagttctataattttctcccaaacaaatgctcttttagagttaacactaaagatctggtctttgccgtcaaggttgacagaacagctgttcatggtgtttgcggtgaaacccgtgttctctttcaatgcagtctgtggctttaacgtgtgtcctgtaatttcgccaagttcatttcttgcctctggtaacttgggggtggatttccttgggctctctaggtgtactgctatgtcagatgcaaaatgtcacccagcttcctgtcacatatccttgtctgtgcattcatgcatctacctcattccggttttctttctaatctcatgtattcctgttgtgaggaaatgtgttcttttcccgatccttttgtagttcatacacgtgacaattgggtttccacgcacgtgcatgagatgttcctccttcaaaccttgttactatgtcagcacattaactgcctggcatggaaaaagaaaaaaaaaaaagaaatatgttcttttcctaccatttgaaaaaaatcctccattgcttttattagagttttgaatacttgtgaaaattttcaaaagaaagtaattgattaccatttttgctgcttattacgatgagctgtgtccattagctgtgtcaccccactcttgcatttccagaatagtccctacccaattgcagcgggcatgtttttgagtggtgttgcattccatgtgcttgattttgtcctagaactggcacagcgcctgccctacctgcagccctgggttgtggccctgttgcgtaccatgtgatttgccaccccgcttctaggccatattaattcagccagaactgaacacctgacccaagggcagcaagcaatcatcagagcatagagctgacagaacatgatggaccacggacaccaccaggccttccagatctgaaatgcaaacaaggaaacagaagcttctaggcatcagaagaaggcctgccatngnatgntctggatttctgccancccntnnttgntcacgtgcgtncccactacgctcttg

SEQ ID NO: 414829 - DNA, 994 bp, Homo sapiens
ggcagggtttggtttgggtgtcttcagatttccttgtcttgaggtcctcacaattactctacagctcagaacagcaactgctgaggctgccttgggaagaggatgatcctaaacaaagctctgatgctgggggccctcgccctgaccaccgtgatgagcccttgtggaggtgaagacattgtggctgaccatgttgcctcttacggtgtaaacttgtaccagtcttatggtccctctgggcagtacagccatgaatttgatggagacgaggagttctatgtggacctggagaggaaggagactgtctggcagttgcctctgttccgcagatttagaagatttgacccgcaatttgcactgacaaacatcgctgtgctaaaacataacttgaacatcgtgattaaacgctccaactctaccgctgctaccaatgaggttcctgaggtcacagtgttttccaagtctcccgtgacactgggtcagcccaacaccctcatctgtcttgtggacaacatctttcctcctgtggtcaacatcacctggctgagcaatgggcactcagtcacagaaggtgtttctgagaccagcttcctctccaagagtgatcattccttcttcaagatcagttacctcaccttcctcccttctgctgatgagatttatgactgcaaggtggagcactggggcctggatgagcctcttctgaaacactgggagcctgagattccaacacctatgtcagagctcacagagactgtggtctgcgccctggggttgtctgtgggcctcgtgggcattgtggtggggaccgtcttgatcatccgaggcctgcgttcagttggtgcttccagacaccaagggcccttgtgaatcccatcctgaaaaggaaggtgttacctactaagagatgcctggggtaagccgcccagctacctaattcctcagtaacatcgatctaaaatctccatggaagcaataaattccctttaagaga

SEQ ID NO: 414830 - DNA, 1418 bp, Homo sapiens
ggcagggtttggtttgggtgtcttcagatttccttgtcttgaggtcctcacaattactctacagctcagaacagcaactgctgaggctgccttgggaagaggatgatcctaaacaaagctctgatgctgggggccctcgccctgaccaccgtgatgagcccttgtggaggtgaagacattgtggctgaccatgttgcctcttacggtgtaaacttgtaccagtcttatggtccctctgggcagtacagccatgaatttgatggagacgaggagttctatgtggacctggagaggaaggagactgtctggcagttgcctctgttccgcagatttagaagatttgacccgcaatttgcactgacaaacatcgctgtgctaaaacataacttgaacatcgtgattaaacgctccaactctaccgctgctaccaatgaggttcctgaggtcacagtgttttccaagtctcccgtgacactgggtcagcccaacaccctcatctgtcttgtggacaacatctttcctcctgtggtcaacatcacctggctgagcaatgggcactcagtcacagaaggtgtttctgagaccagcttcctctccaagagtgatcattccttcttcaagatcagttacctcaccttcctcccttctgctgatgagatttatgactgcaaggtggagcactggggcctggatgagcctcttctgaaacactgggagcctgagattccaacacctatgtcagagctcacagagactgtggtctgcgccctggggttgtctgtgggcctcgtgggcattgtggtggggaccgtcttgatcatccgaggcctgcgttcagttggtgcttccagacaccaagggcccttgtgaatcccatcctgaaaaggaaggtgttacctactaagagatgcctggggtaagccgcccagctacctaattcctcagtaacatcgatctaaaatctccatggaagcaataaattccctttaagagatctatgtcaaatttttctatctttcatccggggctgactgaacctatggctaagaattgtgacactctcatgtttcaagccaatttcatctcatttcccagatcatatttcatatccagtaacacagaagcaaccaagtacaatatagcctgataatatgttgatttcttagctgacattaatatttctttcttctttgtgttctcacccttggcactgccgcccatccctcaattcaggcaacaatgaagttaatggatactctctgccctttgctcagaattgttatagcaaaaattttaaaaccaaaaaataagtttgtactaatttcaatatggcttttaaaagtatgatggagaaataaattaggataaaggaactttgaatcacaaaaatatcaaaagtaaaaatttattctcaaaac

SEQ ID NO: 414831 - DNA, 1789 bp, Homo sapiens
ggcagggtttggtttgggtgtcttcagatttccttgtcttgaggtcctcacaattactctacagctcagaacagcaactgctgaggctgccttgggaagaggatgatcctaaacaaagctctgatgctgggggccctcgccctgaccaccgtgatgagcccttgtggaggtgaagacattgtggctgaccatgttgcctcttacggtgtaaacttgtaccagtcttatggtccctctgggcagtacagccatgaatttgatggagacgaggagttctatgtggacctggagaggaaggagactgtctggcagttgcctctgttccgcagatttagaagatttgacccgcaatttgcactgacaaacatcgctgtgctaaaacataacttgaacatcgtgattaaacgctccaactctaccgctgctaccaatgaggttcctgaggtcacagtgttttccaagtctcccgtgacactgggtcagcccaacaccctcatctgtcttgtggacaacatctttcctcctgtggtcaacatcacctggctgagcaatgggcactcagtcacagaaggtgtttctgagaccagcttcctctccaagagtgatcattccttcttcaagatcagttacctcaccttcctcccttctgctgatgagatttatgactgcaaggtggagcactggggcctggatgagcctcttctgaaacactgggagcctgagattccaacacctatgtcagagctcacagagactgtggtctgcgccctggggttgtctgtgggcctcgtgggcattgtggtggggaccgtcttgatcatccgaggcctgcgttcagttggtgcttccagacaccaagggcccttgtgaatcccatcctgaaaaggaaggtaagattgagatttgttagagctgaagctgcaggaaggaaagtgggaggaggctgtggacatgaatgtggttgaaagttgtaggggaattgggaagtggcatgatgatgacacaggagcccccttggacccatcgatctcatgtctgtcctgttgcaggtgcatcaccatctacagcagcggaagagtggacttgctacatgacctagcactattctctggcccgatttatcataccctttttctcctgcaaatgtttctcctcttaccttttctctgctttttttttcttaagcttctgtatcccctcagagctcacaaatgcctttgaattctttccctgacctcctgatttttttttcttttctcaggtgttacctactaagagatgcctggggtaagccgcccagctacctaattcctcagtaacatcgatctaaaatctccatggaagcaataaattccctttaagagatctatgtcaaatttttctatctttcatccggggctgactgaacctatggctaagaattgtgacactctcatgtttcaagccaatttcatctcatttcccagatcatatttcatatccagtaacacagaagcaaccaagtacaatatagcctgataatatgttgatttcttagctgacattaatatttctttcttctttgtgttctcacccttggcactgccgcccatccctcaattcaggcaacaatgaagttaatggatactctctgccctttgctcagaattgttatagcaaaaattttaaaaccaaaaaataagtttgtactaatttcaatatggcttttaaaagtatgatggagaaataaattaggataaaggaactttgaatcacaaaaatatcaaaagtaaaaatttattctcaaaac

SEQ ID NO: 414832 - DNA, 1206 bp, Homo sapiens
ggcagggtttggtttgggtgtcttcagatttccttgtcttgaggtcctcacaattactctacagctcagaacagcaactgctgaggctgccttgggaagaggatgatcctaaacaaagctctgatgctgggggccctcgccctgaccaccgtgatgagcccttgtggaggtgaagacattgtggctgaccatgttgcctcttacggtgtaaacttgtaccagtcttatggtccctctgggcagtacagccatgaatttgatggagacgaggagttctatgtggacctggagaggaaggagactgtctggcagttgcctctgttccgcagatttagaagatttgacccgcaatttgcactgacaaacatcgctgtgctaaaacataacttgaacatcgtgattaaacgctccaactctaccgctgctaccaatgaggttcctgaggtcacagtgttttccaagtctcccgtgacactgggtcagcccaacaccctcatctgtcttgtggacaacatctttcctcctgtggtcaacatcacctggctgagcaatgggcactcagtcacagaaggtgtttctgagaccagcttcctctccaagagtgatcattccttcttcaagatcagttacctcaccttcctcccttctgctgatgagatttatgactgcaaggtggagcactggggcctggatgagcctcttctgaaacactgggagcctgagattccaacacctatgtcagagctcacagagactgtggtctgcgccctggggttgtctgtgggcctcgtgggcattgtggtggggaccgtcttgatcatccgaggcctgcgttcagttggtgcttccagacaccaagggcccttgtgaatcccatcctgaaaaggaaggtgcatcaccatctacagcagcggaagagtggacttgctacatgacctagcactattctctggcccgatttatcataccctttttctcctgcaaatgtttctcctcttaccttttctctgctttttttttcttaagcttctgtatcccctcagagctcacaaatgcctttgaattctttccctgacctcctgatttttttttcttttctcaggtgttacctactaagagatgcctggggtaagccgcccagctacctaattcctcagtaacatcgatctaaaatctccatggaagcaataaattccctttaagaga

SEQ ID NO: 414833 - DNA, 996 bp, Homo sapiens
  misc_feature (17)..(17): n is a, c, g, or t
ttttgacccgcagtgcnactgagaaacatggctgtggcaaaacacaacttgaacatcatgattaaacgctacaactctaccgctgctaccaatgaggttcctgaggtcacagtgttttccaagtctcccgtgacactgggtcagcccaacaccctcatttgtcttgtggaggtgaagacattgtggctgaccatgttgcctcttacggtgtaaacttgtaccagtcttatggtccctctgggcagtacagccatgaatttgatggagacgaggagttctatgtggacctggagaggaaggagactgtctggcagttgcctctgttccgcagatttagaagatttgacccgcaatttgcactgacaaacatcgctgtgctaaaacataacttgaacatcgtgattaaacgctccaactctaccgctgctaccaatgaggttcctgaggtcacagtgttttccaagtctcccgtgacactgggtcagcccaacaccctcatctgtcttgtggacaacatctttcctcctgtggtcaacatcacctggctgagcaatgggcactcagtcacagaaggtgtttctgagaccagcttcctctccaagagtgatcattccttcttcaagatcagttacctcaccttcctcccttctgctgatgagatttatgactgcaaggtggagcactggggcctggatgagcctcttctgaaacactgggagcctgagattccaacacctatgtcagagctcacagagactgtggtctgcgccctggggttgtctgtgggcctcgtgggcattgtggtggggaccgtcttgatcatccgaggcctgcgttcagttggtgcttccagacaccaagggcccttgtgaatcccatcctgaaaaggaaggtgttacctactaagagatgcctggggtaagccgcccagctacctaattcctcagtaacatcgatctaaaatctccatggaagcaataaattccctttaagaga

SEQ ID NO: 414834 - DNA, 770 bp, Homo sapiens
tacgtgtcattatctcggatctatcattcagagtagtccatgacgagctcgtatatcgaaattaggccccgacctgactgtctggcagttgcctctgttccgcagatttagaagatttgacccgcaatttgcactgacaaacatcgctgtgctaaaacataacttgaacatcgtgattaaacgctccaactctaccgctgctaccaatgaggttcctgaggtcacagtgttttccaagtctcccgtgacactgggtcagcccaacaccctcatctgtcttgtggacaacatctttcctcctgtggtcaacatcacctggctgagcaatgggcactcagtcacagaaggtgtttctgagaccagcttcctctccaagagtgatcattccttcttcaagatcagttacctcaccttcctcccttctgctgatgagatttatgactgcaaggtggagcactggggcctggatgagcctcttctgaaacactgggagcctgagattccaacacctatgtcagagctcacagagactgtggtctgcgccctggggttgtctgtgggcctcgtgggcattgtggtggggaccgtcttgatcatccgaggcctgcgttcagttggtgcttccagacaccaagggcccttgtgaatcccatcctgaaaaggaaggtgttacctactaagagatgcctggggtaagccgcccagctacctaattcctcagtaacatcgatctaaaatctccatggaagcaataaattccctttaagaga

SEQ ID NO: 414835 - DNA, 819 bp, Homo sapiens
ggcagggtttggtttgggtgtcttcagatttccttgtcttgaggtcctcacaattactctacagctcagaacagcaactgctgaggctgccttgggaagaggatgatcctaaacaaagctctgatgctgggggccctcgccctgaccaccgtgatgagcccttgtggaggtgaagacattgtggctgaccatgttgcctcttacggtgtaaacttgtaccagtcttatggtccctctgggcagtacagccatgaatttgatggagacgaggagttctatgtggacctggagaggaaggagactgtctggcagttgcctctgttccgcagatttagaagatttgacccgcaatttgcactgacaaacatcgctgtgctaaaacataacttgaacatcgtgattaaacgctccaactctaccgctgctaccaatgaggttcctgaggtcacagtgttttccaagtctcccgtgacactgggtcagcccaacaccctcatctgtcttgtggacaacatctttcctcctgtggtcaacatcacctggctgagcaatgggcactcagtcacagaaggtgtttctgagaccagcttcctctccaagagtgatcattccttcttcaagatcagttacctcaccttcctcccttctgctgatgagatttatgactgcaaggtggagcactggggcctggatgagcctcttctgaaacactggggtgttacctactaagagatgcctggggtaagccgcccagctacctaattcctcagtaacatcgatctaaaatctccatggaagcaataaattccctttaagaga

SEQ ID NO: 414836 - DNA, 1297 bp, Homo sapiens
ggcagggtttggtttgggtgtcttcagatttccttgtcttgaggtcctcacaattactctacagctcagaacagcaactgctgaggctgccttgggaagaggatgatcctaaacaaagctctgatgctgggggccctcgccctgaccaccgtgatgagcccttgtggaggtgaagacattgtggctgaccatgttgcctcttacggtgtaaacttgtaccagtcttatggtccctctgggcagtacagccatgaatttgatggagacgaggagttctatgtggacctggagaggaaggagactgtctggcagttgcctctgttccgcagatttagaagatttgacccgcaatttgcactgacaaacatcgctgtgctaaaacataacttgaacatcgtgattaaacgctccaactctaccgctgctaccaatggcactcagtcacagaaggtgtttctgagaccagcttcctctccaagagtgatcattccttcttcaagatcagttacctcaccttcctcccttctgctgatgagatttatgactgcaaggtggagcactggggcctggatgagcctcttctgaaacactgggagcctgagattccaacacctatgtcagagctcacagagactgtggtctgcgccctggggttgtctgtgggcctcgtgggcattgtggtggggaccgtcttgatcatccgaggcctgcgttcagttggtgcttccagacaccaagggcccttgtgaatcccatcctgaaaaggaaggtgttacctactaagagatgcctggggtaagccgcccagctacctaattcctcagtaacatcgatctaaaatctccatggaagcaataaattccctttaagagatctatgtcaaatttttctatctttcatccggggctgactgaacctatggctaagaattgtgacactctcatgtttcaagccaatttcatctcatttcccagatcatatttcatatccagtaacacagaagcaaccaagtacaatatagcctgataatatgttgatttcttagctgacattaatatttctttcttctttgtgttctcacccttggcactgccgcccatccctcaattcaggcaacaatgaagttaatggatactctctgccctttgctcagaattgttatagcaaaaattttaaaaccaaaaaataagtttgtactaatttcaatatggcttttaaaagtatgatggagaaataaattaggataaaggaactttgaatcacaaaaatatcaaaagtaaaaatttattctcaaaac

SEQ ID NO: 414837 - DNA, 990 bp, Homo sapiens
gtgatctcgaggatttgcccaggtagattagaacattgccttgcattgcactgacaaacatcgctgtgctaaaacataacttgaacatcgtgattaaacgctccaactctaccgctgctaccaatggcactcagtcacagaaggtgtttctgagaccagcttcctctccaagagtgatcattccttcttcaagatcagttacctcaccttcctcccttctgctgatgagatttatgactgcaaggtggagcactggggcctggatgagcctcttctgaaacactgggagcctgagattccaacacctatgtcagagctcacagagactgtggtctgcgccctggggttgtctgtgggcctcgtgggcattgtggtggggaccgtcttgatcatccgaggcctgcgttcagttggtgcttccagacaccaagggcccttgtgaatcccatcctgaaaaggaaggtgttacctactaagagatgcctggggtaagccgcccagctacctaattcctcagtaacatcgatctaaaatctccatggaagcaataaattccctttaagagatctatgtcaaatttttctatctttcatccggggctgactgaacctatggctaagaattgtgacactctcatgtttcaagccaatttcatctcatttcccagatcatatttcatatccagtaacacagaagcaaccaagtacaatatagcctgataatatgttgatttcttagctgacattaatatttctttcttctttgtgttctcacccttggcactgccgcccatccctcaattcaggcaacaatgaagttaatggatactctctgccctttgctcagaattgttatagcaaaaattttaaaaccaaaaaataagtttgtactaatttcaatatggcttttaaaagtatgatggagaaataaattaggataaaggaactttgaatcacaaaaatatcaaaagtaaaaatttattctcaaaac

SEQ ID NO: 414838 - DNA, 783 bp, Homo sapiens
gtcagaggattagcccaggtagatttatgactgcaaggtggagcactggggcctggatgagcctcttctgaaacactgggagcctgagattccaacacctatgtcagagctcacagagactgtggtctgcgccctggggttgtctgtgggcctcgtgggcattgtggtggggaccgtcttgatcatccgaggcctgcgttcagttggtgcttccagacaccaagggcccttgtgaatcccatcctgaaaaggaaggtgttacctactaagagatgcctggggtaagccgcccagctacctaattcctcagtaacatcgatctaaaatctccatggaagcaataaattccctttaagagatctatgtcaaatttttctatctttcatccggggctgactgaacctatggctaagaattgtgacactctcatgtttcaagccaatttcatctcatttcccagatcatatttcatatccagtaacacagaagcaaccaagtacaatatagcctgataatatgttgatttcttagctgacattaatatttctttcttctttgtgttctcacccttggcactgccgcccatccctcaattcaggcaacaatgaagttaatggatactctctgccctttgctcagaattgttatagcaaaaattttaaaaccaaaaaataagtttgtactaatttcaatatggcttttaaaagtatgatggagaaataaattaggataaaggaactttgaatcacaaaaatatcaaaagtaaaaatttattctcaaaac

SEQ ID NO: 414839 - DNA, 876 bp, Homo sapiens
ggcagggtttggtttgggtgtcttcagatttccttgtcttgaggtcctcacaattactctacagctcagaacagcaactgctgaggctgccttgggaagaggatgatcctaaacaaagctctgatgctgggggccctcgccctgaccaccgtgatgagcccttgtggaggtgaagacattgtggctgaccatgttgcctcttacggtgtaaacttgtaccagtcttatggtccctctgggcagtacagccatgaatttgatggagacgaggagttctatgtggacctggagaggaaggagactgtctggcagttgcctctgttccgcagatttagaagatttgacccgcaatttgcactgacaaacatcgctgtgctaaaacataacttgaacatcgtgattaaacgctccaactctaccgctgctaccaatggagaggaaatgctggtaggaagactcttccaggatgtaatgcagaagaagctcagggcagagctattcacactttacaccagtgctgtttcctcaccatagaggttcctgaggtcacagtgttttccaagtctcccgtgacactgggtcagcccaacaccctcatctgtcttgtggacaacatctttcctcctgtggtcaacatcacctggctgagcaatgggcactcagtcacagaaggtgtttctgagaccagcttcctctccaagagtgatcattccttcttcaagatcagttacctcaccttcctcccttctgctgatgagatttatgactgcaaggtggagcactggggcctggatgagcctcttctgaaacactggggcctttttgactgggggcctgagaattcagacctttgcagttcctggggctgtgcctggg

SEQ ID NO: 414840 - DNA, 1216 bp, Homo sapiens
ggcagggtttggtttgggtgtcttcagatttccttgtcttgaggtcctcacaattactctacagctcagaacagcaactgctgaggctgccttgggaagaggatgatcctaaacaaagctctgatgctgggggccctcgccctgaccaccgtgatgagcccttgtggaggtgaagacattgtggctgaccatgttgcctcttacggtgtaaacttgtaccagtcttatggtccctctgggcagtacagccatgaatttgatggagacgaggagttctatgtggacctggagaggaaggagactgtctggcagttgcctctgttccgcagatttagaagatttgacccgcaatttgcactgacaaacatcgctgtgctaaaacataacttgaacatcgtgattaaacgctccaactctaccgctgctaccaatgaggttcctgaggtcacagtgttttccaagtctcccgtgacactgggtcagcccaacaccctcatctgtcttgtggacaacatctttcctcctgtggtcaacatcacctggctgagcaatgggcactcagtcacagaaggtgtttctgagaccagcttcctctccaagagtgatcattccttcttcaagatcagttacctcaccttcctcccttctgctgatgagatttatgactgcaaggtggagcactggggcctggatgagcctcttctgaaacactgggagcctgagattccaacacctatgtcagagctcacagagactgtggtctgcgccctggggttgtctgtgggcctcgtgggcattgtggtggggaccgtcttgatcatccgaggcctgcgttcagttggtgcttccagacaccaagggcccttgtgaatcccatcctgaaaaggaaggtgttacctactaagagatgcctggggtaagccgcccagctacctaattcctcagtaacatcgatctaaaatctccatggaagcaataaattccctttaagagaaacaacaaacagaaaaaaaaaacacacaagcaaacacaaagaaaaaaacactctgcggggagcatatctattgcggggggggcgcagcaaaacagagcgtatataaaagggcgcacaggggccaagacgtgttcccggacgcacccagtctctgttgcccacaagggtggaaaacccggggggccccccaaaggggagagcgcgattacatctcaaaacacg

SEQ ID NO: 414841 - DNA, 984 bp, Homo sapiens
agcatttggaactataaacgggtaaaaagggggtttcgctcgggttacgggatcagtcaaacagcaactgctgaggctgccttgggaagaggatgatcctaaacaaagctctgatgctgggggccctcgccctgaccaccgtgatgagcccttgtggaggtgaagacattgtggctgaccatgttgcctcttacggtgtaaacttgtaccagtcttatggtccctctgggcagtacagccatgaatttgatggagacgaggagttctatgtggacctggagaggaaggagactgtctggcagttgcctctgttccgcagatttagaagatttgacccgcaatttgcactgacaaacatcgctgtgctaaaacataacttgaacatcgtgattaaacgctccaactctaccgctgctaccaatgaggttcctgaggtcacagtgttttccaagtctcccgtgacactgggtcagcccaacaccctcatctgtcttgtggacaacatctttcctcctgtggtcaacatcacctggctgagcaatgggcactcagtcacagaaggtgtttctgagaccagcttcctctccaagagtgatcattccttcttcaagatcagttacctcaccttcctcccttctgctgatgagatttatgactgcaaggtggagcactggggcctggatgagcctcttctgaaacactgggagcctgagattccaacacctatgtcagagctcacagagactgtggtctgcgccctggggttgtctgtgggcctcgtgggcattgtggtggggaccgtcttgatcatccgaggcctgcgttcagttggtgcttccagacaccaagggcccttgtgaatcccatcctgaaaaggaaggtgttacctactaagagatgcctggggtaagccgcccagctacctaattcctcagtaacatcgatctaaaatctccatggaagcaataaattccctttaagaga

SEQ ID NO: 414842 - DNA, 1630 bp, Homo sapiens
ggcagggtttggtttgggtgtcttcagatttccttgtcttgaggtcctcacaattactctacagctcagaacagcaactgctgaggctgccttgggaagaggatgatcctaaacaaagctctgatgctgggggccctcgccctgaccaccgtgatgagcccttgtggaggtgaagacattgtggctgaccatgttgcctcttacggtgtaaacttgtaccagtcttatggtccctctgggcagtacagccatgaatttgatggagacgaggagttctatgtggacctggagaggaaggagactgtctggcagttgcctctgttccgcagatttagaagatttgacccgcaatttgcactgacaaacatcgctgtgctaaaacataacttgaacatcgtgattaaacgctccaactctaccgctgctaccaatgaggttcctgaggtcacagtgttttccaagtctcccgtgacactgggtcagcccaacaccctcatctgtcttgtggacaacatctttcctcctgtggtcaacatcacctggctgagcaatgggcactcagtcacagaaggtgtttctgagaccagcttcctctccaagagtgatcattccttcttcaagatcagttacctcaccttcctcccttctgctgatgagatttatgactgcaaggtggagcactggggcctggatgagcctcttctgaaacactgggagcctgagattccaacacctatgtcagagctcacagagactgtggtctgcgccctggggttgtctgtgggcctcgtgggcattgtggtggggaccgtcttgatcatccgaggcctgcgttcagttggtgcttccagacaccaagggcccttgtgaatcccatcctgaaaaggaaggtgcatcaccatctacagcagcggaagagtggacttgctacatgacctagcactattctctggcccgatttatcataccctttttctcctgcaaatgtttctcctcttaccttttctctgctttttttttcttaagcttctgtatcccctcagagctcacaaatgcctttgaattctttccctgacctcctgatttttttttcttttctcaggtgttacctactaagagatgcctggggtaagccgcccagctacctaattcctcagtaacatcgatctaaaatctccatggaagcaataaattccctttaagagatctatgtcaaatttttctatctttcatccggggctgactgaacctatggctaagaattgtgacactctcatgtttcaagccaatttcatctcatttcccagatcatatttcatatccagtaacacagaagcaaccaagtacaatatagcctgataatatgttgatttcttagctgacattaatatttctttcttctttgtgttctcacccttggcactgccgcccatccctcaattcaggcaacaatgaagttaatggatactctctgccctttgctcagaattgttatagcaaaaattttaaaaccaaaaaataagtttgtactaatttcaatatggcttttaaaagtatgatggagaaataaattaggataaaggaactttgaatcacaaaaatatcaaaagtaaaaatttattctcaaaac

SEQ ID NO: 414843 - DNA, 1086 bp, Homo sapiens
ggcagggtttggtttgggtgtcttcagatttccttgtcttgaggtcctcacaattactctacagctcagaacagcaactgctgaggctgccttgggaagaggatgatcctaaacaaagctctgatgctgggggccctcgccctgaccaccgtgatgagcccttgtggaggtgaagacattgtggctgaccatgttgcctcttacggtgtaaacttgtaccagtcttatggtccctctgggcagtacagccatgaatttgatggagacgaggagttctatgtggacctggagaggaaggagactgtctggcagttgcctctgttccgcagatttagaagatttgacccgcaatttgcactgacaaacatcgctgtgctaaaacataacttgaacatcgtgattaaacgctccaactctaccgctgctaccaatgaggttcctgaggtcacagtgttttccaagtctcccgtgacactgggtcagcccaacaccctcatctgtcttgtggacaacatctttcctcctgtggtcaacatcacctggctgagcaatgggcactcagtcacagaaggtgtttctgagaccagcttcctctccaagagtgatcattccttcttcaagatcagttacctcaccttcctcccttctgctgatgagatttatgactgcaaggtggagcactggggcctggatgagcctcttctgaaacactgggagcctgagattccaacacctatgtcagagctcacagagactgtggtctgcgccctggggttgtctgtgggcctcgtgggcattgtggtggggaccgtcttgatcatccgaggcctgcgttcagttggtgcttccagacaccaagggcccttgtgaatcccatcctgaaaaggaagtgccattgcatttaccgggcccttataatgggctgtgttaatgactatccctcttttttgggcccaattattaaatatccttttttctcaaaatatttttccttaaccttttttttggaattaaacttgtttttcccctaagggttcaaaagtgctttaaattttttcctggaccccgggattttttttttttttt

SEQ ID NO: 414844 - DNA, 1243 bp, Homo sapiens
ggcagggtttggtttgggtgtcttcagatttccttgtcttgaggtcctcacaattactctacagctcagaacagcaactgctgaggctgccttgggaagaggatgatcctaaacaaagctctgatgctgggggccctcgccctgaccaccgtgatgagcccttgtggaggtgaagacattgtggctgaccatgttgcctcttacggtgtaaacttgtaccagtcttatggtccctctgggcagtacagccatgaatttgatggagacgaggagttctatgtggacctggagaggaaggagactgtctggcagttgcctctgttccgcagatttagaagatttgacccgcaatttgcactgacaaacatcgctgtgctaaaacataacttgaacatcgtgattaaacgctccaactctaccgctgctaccaatgaggttcctgaggtcacagtgttttccaagtctcccgtgacactgggtcagcccaacaccctcatctgtcttgtggacaacatctttcctcctgtggtcaacatcacctggctgagcaatgggcactcagtcacagaaggtgtttctgagaccagcttcctctccaagagtgatcattccttcttcaagatcagttacctcaccttcctcccttctgctgatgagatttatgactgcaaggtggagcactggggcctggatgagcctcttctgaaacactggggtgttacctactaagagatgcctggggtaagccgcccagctacctaattcctcagtaacatcgatctaaaatctccatggaagcaataaattccctttaagagatctatgtcaaatttttctatctttcatccggggctgactgaacctatggctaagaattgtgacactctcatgtttcaagccaatttcatctcatttcccagatcatatttcatatccagtaacacagaagcaaccaagtacaatatagcctgataatatgttgatttcttagctgacattaatatttctttcttctttgtgttctcacccttggcactgccgcccatccctcaattcaggcaacaatgaagttaatggatactctctgccctttgctcagaattgttatagcaaaaattttaaaaccaaaaaataagtttgtactaatttcaatatggcttttaaaagtatgatggagaaataaattaggataaaggaactttgaatcacaaaaatatcaaaagtaaaaatttattctcaaaac

SEQ ID NO: 414845 - DNA, 541 bp, Homo sapiens
ggctgaccttagaggacccgtgatgttatgcccaacaccctcatctgtcttgtggacaacatctttcctcctgtggtcaacatcacctggctgagcaatgggcactcagtcacagaaggtgtttctgagaccagcttcctctccaagagtgatcattccttcttcaagatcagttacctcaccttcctcccttctgctgatgagatttatgactgcaaggtggagcactggggcctggatgagcctcttctgaaacactgggagcctgagattccaacacctatgtcagagctcacagagactgtggtctgcgccctggggttgtctgtgggcctcgtgggcattgtggtggggaccgtcttgatcatccgaggcctgcgttcagttggtgcttccagacaccaagggcccttgtgaatcccatcctgaaaaggaaggtgttacctactaagagatgcctggggtaagccgcccagctacctaattcctcagtaacatcgatctaaaatctccatggaagcaataaattccctttaagaga

SEQ ID NO: 414846 - DNA, 825 bp, Homo sapiens
ggcagggtttggtttgggtgtcttcagatttccttgtcttgaggtcctcacaattactctacagctcagaacagcaactgctgaggctgccttgggaagaggatgatcctaaacaaagctctgatgctgggggccctcgccctgaccaccgtgatgagcccttgtggaggtgaagacattgtggctgaccatgttgcctcttacggtgtaaacttgtaccagtcttatggtccctctgggcagtacagccatgaatttgatggagacgaggagttctatgtggacctggagaggaaggagactgtctggcagttgcctctgttccgcagatttagaagatttgacccgcaatttgcactgacaaacatcgctgtgctaaaacataacttgaacatcgtgattaaacgctccaactctaccgctgctaccaatgaggttcctgaggtcacagtgttttccaagtctcccgtgacactgggtcagcccaacaccctcatctgtcttgtggacaacatctttcctcctgtggtcaacatcacctggctgagcaatgggcactcagtcacagaaggtgtttctgagaccagcttcctctccaagagtgatcattccttcttcaagatcagttacctcaccttcctcccttctgctgatgagatttatgactgcaaggtggagcactggggcctggatgagcctcttctgaaacactggggatggtgtccacccatgtgatctcctcatccttgcatagagtgtgccaggtctggttgtcaggtttcccagagtggagcagccggcgttggcagcgatgtctgtcggtct

SEQ ID NO: 414847 - DNA, 1336 bp, Homo sapiens
ggctgaccttagaggacccgtgatgttatgcccaacaccctcatctgtcttgtggacaacatctttcctcctgtggtcaacatcacctggctgagcaatgggcactcagtcacagaaggtgtttctgagaccagcttcctctccaagagtgatcattccttcttcaagatcagttacctcaccttcctcccttctgctgatgagatttatgactgcaaggtggagcactggggcctggatgagcctcttctgaaacactgggagcctgagattccaacacctatgtcagagctcacagagactgtggtctgcgccctggggttgtctgtgggcctcgtgggcattgtggtggggaccgtcttgatcatccgaggcctgcgttcagttggtgcttccagacaccaagggcccttgtgaatcccatcctgaaaaggaaggtaagattgagatttgttagagctgaagctgcaggaaggaaagtgggaggaggctgtggacatgaatgtggttgaaagttgtaggggaattgggaagtggcatgatgatgacacaggagcccccttggacccatcgatctcatgtctgtcctgttgcaggtgcatcaccatctacagcagcggaagagtggacttgctacatgacctagcactattctctggcccgatttatcataccctttttctcctgcaaatgtttctcctcttaccttttctctgctttttttttcttaagcttctgtatcccctcagagctcacaaatgcctttgaattctttccctgacctcctgatttttttttcttttctcaggtgttacctactaagagatgcctggggtaagccgcccagctacctaattcctcagtaacatcgatctaaaatctccatggaagcaataaattccctttaagagatctatgtcaaatttttctatctttcatccggggctgactgaacctatggctaagaattgtgacactctcatgtttcaagccaatttcatctcatttcccagatcatatttcatatccagtaacacagaagcaaccaagtacaatatagcctgataatatgttgatttcttagctgacattaatatttctttcttctttgtgttctcacccttggcactgccgcccatccctcaattcaggcaacaatgaagttaatggatactctctgccctttgctcagaattgttatagcaaaaattttaaaaccaaaaaataagtttgtactaatttcaatatggcttttaaaagtatgatggagaaataaattaggataaaggaactttgaatcacaaaaatatcaaaagtaaaaatttattctcaaaac

SEQ ID NO: 414848 - DNA, 1093 bp, Homo sapiens
atgcaggccatgatccgggccatggagacgctgaagatcctctacaagttggagcagaacaaggccaatgcgctccagatccgagaggtggacgtggagaaggtgaccacctttgagcatcggtacgtcagcgccatcaagaccctgtgggacgaccccggcatccacgagtgctacgaccgcaggcgcgagtaccagctctcggactcggccaagtactgcgtgaccgacgtagactgcatcgccacctcgagctacctgcccacccagcaggacgtgctgcgggtccgcgtgcccaccaccggcgtctttcgacctggagaacatcatcttcaggatggcggatgttgggggacagcggtcggcgcagaggaagtggatccactgctttgagaacctgacgtccatcccgtttctcgtcgccctcagtgaatacgaccaagtcctggtggagtcggacaacgagaaccggatggaggagagcaaagccctgttccggaccatcatcgactacccctggttccagaactcccccgtcatcaccttcctcaacaagaaggacctgctggaggacaatatcctgtactcacacatggtggactacttccccgagttcgaagggccccagcaggacgcccaggcggcgcgggagttcatcctgaagatgttagtggacatgaaccccgacagcgacaagatcatcgactcccacttcacgtacgccaccgacacgaagaacatccgcttcgtgttcgcggccgtgaaggacaccatcctgcagctcagcctcaaggagtacaacctggtctgaaagcgcccaggcccagggagacgggacggagacaagggccgggacaaaccttccttcacacccaacccgcggctgccggccaggcagcgctgctgagcccgggcggggcctctgcccgcggaggatttttttttttttttaatatttttaacaaatggtttttatttcacagttatcaggggatgtatatctgtctgcacacttcgcgcaccttctcaccttttgtcaacgtcaaagggagtctttttctggccttgacttacggttcgcttttttctaaaa

SEQ ID NO: 414849 - DNA, 419 bp, Homo sapiens
ctacaagattctaacaatcagtgttaacaagaaatacaaaccatggctacaaaatatgggattttttcatttttctcccagaaaaattcccatgtatgtcaaatattgtcacacaaacaaaaagtatttgtgaattaacttaaaacacttgtcacaattaacttgacatgatctagatgataaccaacaaagtcttcccagggtgaacggcaaacattaaacaatgccaaatttccattctaattttaacatcataaccaatgtctttatttccaatattaccttgctgttttcatactttcaaaataaaactaataatcacgtaacaggccgggcgcggtggctcatgcctgtaggcgggtggatcacgaggtcaggagatcgagaccatcctggctactacggtgaaaccccgtctc

SEQ ID NO: 414850 - DNA, 591 bp, Homo sapiens
ccgctgtcaagatgcttctggccatggtccttacctctgccctgctcctgtgctccgtggcaggccaggggtgtccaaccttggcggggatcctggacatcaacttcctcatcaacaagatgcaggaagatccagcttccaagtgccactgcagtgctaatgtgaccagttgtctctgtttgggcattccctctgacaactgcaccagaccatgcttcagtgagagactgtctcagatgaccaataccaccatgcaaacaagatacccactgattttcagtcgggtgaaaaaatcagttgaagtactaaagaacaacaagtgtccatatttttcctgtgaacagccatgcaaccaaaccacggcaggcaacgcgctgacatttctgaagagtcttctggaaattttccagaaagaaaagatgagagggatgagaggcaagatatgaagatgaaatattatttatcctatttattaaatttaaaaagctttctctttaagttgctacaatttaaaaatcaagtaagctactctaaatcagtatcagttgtgattatttgtttaacattgtatgtctttattttgaaataaat

SEQ ID NO: 414851 - DNA, 741 bp, Homo sapiens
ctatgctgtctttacaccacatgagctagcctggacctgcccacctatttgctctgtgtctcaagccacttcccttcccatccccacaatcctcaccaccgactctggctcttggcaggtaggcttctggggctgcttggctctacatcatttgagtcactctgtccttatcaactttcatccccacagtatttttcctgtgaacagccatgcaaccaaaccacggcaggcaacgcgctgacatttctgaagagtcttctggaaattttccagaaagaaaagatgagagggatgagaggcaagatatgaagatgaaatattatttatcctatttattaaatttaaaaagctttctctttaagttgctacaatttaaaaatcaagtaagctactctaaatcagtatcagttgtgattatttgtttaacattgtatgtctttattttgaaataaatacatatgtggaaaaaacaacatgagctggtctcttggcaattattcatttcttgctgctcagaacaaagaaagctacaagtgttgttaaggggaagaatagatcagagactcctgtaggagtctctgtgataagactcctgatgctgaatacagaccctcaggctcataggctgtggctggagctgcaggagggctgcagggagcagttacaaagaatgtctatgaggaccatctgagggttgccactaggggaggctgaaggcatgtctgacactgctaagagggc

SEQ ID NO: 414852 - DNA, 284 bp, Homo sapiens
attattagtttatggtgctttaaacctatcaaaatagttgtaagtaaatggatttcttgttctcccaataacaattctctgagctaggatagatgtctttctggccattttacaggtgatgacactgacatagggactgagtgggtagcttaagttccatggttaccaggagcaggacccacgtttcctgtctcccagtctcatcctttttccactgaccaggttggttgctcccttggaaagcagtccctgagagttgacttagaagttcagggggaagaggt

SEQ ID NO: 414853 - DNA, 6177 bp, Homo sapiens
cagccgtttccggagtctgcgctgcgcccggttccgccattgcggctctcctggcccctggagcctccgcccccgacccgagctctttcgtctgcctgccagtttcctgcgtccccggagaggatcctgctgagcccagcctcccccctccccttctcctcctctcccttggagagcccgggcagccactgccccgcagccccagtgacaggaggagaccataacccccgacagcgccatggcccagattctgccaattcgttttcaggagcatctccagctccagaacctgggtatcaacccagcaaacattggcttcagtaccctgactatggagtctgacaaattcatctgcattagagaaaaagtaggagagcaggcccaggtggtaatcattgatatgaatgacccaagtaatccaattcgaagaccaatttcagcagacagcgccatcatgaatccagctagcaaagtaattgcactgaaagctgggaaaactcttcagatttttaacattgaaatgaaaagtaaaatgaaggctcataccatgactgatgatgtcaccttttggaaatggatctctttgaatacggttgctcttgttacggataatgcagtttatcactggagtatggaaggagagtctcagccagtgaaaatgtttgatcgccattctagccttgcagggtgccagattatcaattaccgtacagatgcaaaacaaaagtggttacttctgactggtatatctgcacagcaaaatcgtgtggtgggagctatgcagctatattctgtagataggaaagtgtctcagcccattgaaggacatgcagctagctttgcacagtttaagatggaaggaaatgcagaagaatcaacgttattttgttttgcagttcggggccaagctggagggaagttacatattattgaagttggcacaccacctacagggaaccagccctttccaaagaaggcagtggatgtcttctttcctccagaagcacaaaatgattttcctgttgcaatgcagatcagtgaaaagcatgatgtggtgttcttgataaccaagtatggttatatccacctctatgatcttgagactggtacctgcatctacatgaatagaatcagtggagaaacaatttttgttactgcacctcatgaagccacagctggaataattggagtaaacagaaagggacaagttctgtcagtgtgtgtggaagaagaaaacataattccttacatcaccaatgttctacaaaatcctgatttggctctgagaatggctgtacgtaataacttagccggtgctgaagaactctttgcccggaaatttaatgctctttttgcccagggaaattactcggaggcagcaaaggtggctgctaatgcaccaaagggaattcttcgtactccagacactatccgtcggttccagagtgtcccagcccagccaggtcaaacttctcctctacttcagtactttggtatccttttggaccagggacagctcaacaaatacgaatccttagagctttgtaggcctgtacttcagcaagggcgaaaacagcttttggagaaatggttaaaagaagataagctggaatgttctgaagaactgggtgatcttgtgaaatctgtggaccctacattggcacttagtgtgtacctaagggctaacgtcccaaataaagtcattcagtgctttgcagaaacaggtcaagtccaaaagattgttttatatgctaaaaaagttggatacactccagattggatatttctgctgagaaatgtaatgcgaatcagtccagatcagggacagcagtttgcccaaatgttagttcaagatgaagagcctcttgctgacatcacacagattgtagatgtctttatggaatacaatctaattcagcagtgtactgcattcttgcttgatgctctgaagaataatcgcccatctgaaggtcctttacagacgcggttacttgagatgaaccttatgcatgcgcctcaagttgcagatgctattctaggcaatcagatgttcacacattatgaccgggctcatattgctcaactgtgtgaaaaggctggcctactgcagcgtgcattagaacatttcactgatttatatgatataaaacgtgcagtggttcacacccatcttcttaaccctgagtggttagtcaactactttggttccttatcagtagaagactccctagaatgtctcagagccatgctgtctgccaacatccgtcagaatctgcagatttgtgttcaggtggcttctaaatatcatgaacaactgtcaactcagtctctgattgaactttttgaatctttcaagagttttgaaggtctcttttattttctgggatccattgttaactttagccaggacccagatgtgcactttaaatatattcaggcagcttgcaagactgggcaaatcaaagaagtagaaagaatctgtagagaaagcaactgctacgatcctgagcgagtcaagaattttcttaaggaagcaaaactaacagatcagctaccacttatcattgtgtgtgatcgatttgactttgtccatgatttggtgctctatttatatagaaataatcttcaaaagtatatagagatatatgtacagaaggtgaatccaagtcgacttcctgtagttattggaggattacttgatgttgactgttctgaagatgtcataaaaaacttgattcttgttgtaagaggtcaattctctactgatgagcttgttgctgaggttgaaaaaagaaacagattgaaactgcttctgccttggctagaggccagaattcatgagggctgtgaggagcctgctactcacaatgccttagccaaaatctacatagacagtaataacaacccggagagatttcttcgtgaaaatccctactatgacagtcgcgttgttggaaagtattgtgagaagagagatccacatctggcctgtgttgcttatgaacgtggccaatgtgatctggaacttattaatgtttgcaatgagaattccctcttcaaaagtctttctcgctacctggtacgtcgaaaggatccagaattgtggggcagcgtgctgctggaaagcaatccttacaggagacccctaattgaccaggttgtacaaacagctttgtctgagactcaggaccctgaagaagtgtcagtaactgtaaaggctttcatgactgcagaccttcctaatgaactcattgaactgctggagaaaattgtccttgataactctgtattcagtgaacacaggaatctgcaaaacctccttatcctcactgcaattaaggctgaccgtacacgtgttatggagtatattaaccgcctggataattatgatgccccagatattgccaatatcgccatcagcaatgagctgtttgaagaagcatttgccattttccggaaatttgatgtcaatacttcagcagttcaggtcttaattgagcatattggaaacttggatcgggcatatgagtttgctgaacgttgcaatgaacctgcggtctggagtcaacttgcaaaagcccagttgcagaaaggaatggtgaaagaagccattgattcttatatcaaagcagatgatccttcctcctacatggaagttgttcaggctgccaatactagtggaaactgggaagaactggtgaagtacttgcagatggcccgtaagaaggctcgagagtcctatgtggagacagaactgatattcgcactggctaaaacaaaccgccttgcagagttagaagaatttatcaatggaccaaataatgctcatatccaacaagttggtgaccgttgttatgatgaaaaaatgtatgatgctgctaagttgttgtacaataatgtttccaattttggacgtttggcatctaccctggttcacctgggtgaatatcaggcagctgttgatggggctaggaaagctaacagtactcgaacatggaaagaggtctgcttcgcctgtgtagatgggaaagaattccgtcttgctcagatgtgtggacttcatattgttgtacatgcagatgaattagaagaacttatcaactactatcaggatcgtggctattttgaagagctgatcaccatgttggaagcagcactgggacttgagcgagctcacatgggaatgtttactgaattagctattctatactctaaatttaagcctcagaaaatgagggagcacctggagctgttctggtctagagtgaatattcccaaggtgctaagagctgcagaacaagctcatctttgggcagaactggtgtttttgtatgacaagtatgaagaatatgataatgccataattaccatgatgaatcatccaactgatgcctggaaagaagggcaattcaaagatatcattaccaaggttgccaatgtggaactatactacagagcaatacagttctacttagaattcaagcctctgttgttaaatgatttgctgatggtgctgtctccacggttggatcacactcgtgcagtcaattatttcagcaaggttaaacagctaccactggtgaaaccgtatttgcgttcagttcagaaccataacaacaaatctgtgaatgaatcattgaacaatctttttattacagaagaagattatcaggctctgcgaacatcaatagatgcttatgacaactttgacaatatctcgcttgctcagcgtttggaaaaacatgaactcattgagttcaggagaattgctgcttatctcttcaaaggcaacaatcgctggaaacagagtgtagagctgtgcaagaaagacagcctttacaaggatgcaatgcagtatgcttctgaatctaaagatactgaattggctgaagaactcctgcagtggtttttgcaggaagaaaaaagagagtgctttggagcttgtctgtttacctgttacgatcttttaaggccagatgtcgtcctagaaactgcatggaggcacaatatcatggattttgccatgccctatttcatccaggtcatgaaggagtacttgacaaaggtggataaattagatgcttcagaatcactgagaaaagaagaagaacaagctacagagacacaacccattgtttatggtcagccccagttgatgctgacagcaggacccagtgttgccgtccctccccaggcaccttttggttatggttataccgcaccaccgtatggacagccacagcctggctttgggtacagcatgtgagatgaagcgctgatcctgtagtcacctattttcgtactgaaacatcgtctttacccacttctcagtttataatgggggaaaacaggcaacgtgttcttgtaacctttatttcatgaaggacttctttttgtttctaactataaacttggatcacctatgttaaaaccttatttcacattccacatcattttagaatttattttcgaaggggaatagtttcaatgttttattcacttgggctttttttcttccccctctttctttaaagaactgctcaatattcaatctgttgtgaagaacctgatttgcactctgtagtgtttaaagaaacaaagaaactctaatattgaatctcttaaatttagtgtatgtaaacagcttacaaatacgtattgtctaaatgcatttaaatctgttttattcaaagaaaagctaaagcaaaaacactggcatatgaccatgcaagactgtcagtgccaacaaagacaacactaatcagcacatcgtacactggattgcagtgcttcccagattattgaaaaatgttacagacaacttgcctgatttttaaatgagcgtaaaaggccctctaacctatgcaggtttccccattatgcatatagaaaatgctagtatgttttgctcacttcatatgtaacaggtgcccttatgttgtgctgtatcctgtgctttttctgtgggaccattccattcaggagcaaagagcaccatgattccaatcttgtgtgtgtttactaacccttccctgaggtttgtgtatgttggatattgtggtgttttagatcactgagtgtacagaagagagaaattcaaacaaaatattgctgttcttcagttttgtttgtggaatttgaaattactcaaatttaaaataaattactggactgtgg

SEQ ID NO: 414854 - DNA, 621 bp, Homo sapiens
actgtgctatctaagttttgaattgtctttcctcttatcagtttcatgttatataagagcttgggatatccatatttaaatgtgctgtagaaatgaaggaaactttaaatattagcttataatttttcaaataaccctcttgttctggaattttaccatctctaaaatggaattagactgaatgtttttattttctgtttgtagattcattattttactaaagtgttgattttctttctgtagatcagtgaaaagcatgatgtggtgttcttgataaccaagtatggttatatccacctctatgatcttgagactggtacctgcatctacatgaatagaatcagtggagaaacaatttttgttactgcacctcatgaagccacagctggaataattggagtaaacagaaagggacaagtaaggaaaccttgaaacttaagcaataaaataagataacctgatgagttgggaacaatcctgtccttttgagaaattactccccaagattaaaaaatagaaaataaacatattactgttagtttttttccaaaaagtaaatagtaactttggatattagaaaataatatatatcaaagcacgatgtaagctgataaaaaaaaa

SEQ ID NO: 414855 - DNA, 1489 bp, Homo sapiens
cggactttctttcgccaggctgtttcttacgccaggctgtttctttcgccaggtgtgatggtggatgcctataagatcctagctgctactcaggaggcaggaggctgaggcatgagaatcacttgaacctgtgaggcaaaggttgtagtgagccaagatcacgtcactgcactccatcctgggtgacagaatgagactcttgtctcaaaaaacaaaaaaacctatttagtttcatccaggacattaagtgaaagtgtttaatgtgagtgcaggtcagtgaagaatacaatggtgcccctgctttgatttgtgggaggtgccatcagttttccccaccactgcttttgcaccctcagtgcaaatatcaacacagagaaaaaaaaaataataatagtattatgaaaacattgactctgtggagaccctgtgggttctgcagagtatactttgaaaactataagattatgagttctataaaataccaagtacagatgaactagaaaacaagcatatatccacaattaccagaattttcatagtattccttttagtagatatgccatgacagttacttagccaccccatgccatcctgttgggaatgccactacctttgaatttggagccatcagtctatctgaggcaaacctcagaaattacctgagccagaatcatgcacttagcactgagttcaactcagtcttaacgttgcattttgttgcatcacttttgcagccagtaaacattctgtttagaaatagttgctattgtggcatcattcacagttgcaatttttctcctgtgctgtcatatgcctgtgcgaagtgtattaaatgaatcaaatattagaaatttcaaggctgtctttagtgttctgcccacaatactccaccaatgaccttagaccttgagatggtgctataacgctgcttatattgcagttaaccatagagaggtggagccacttaaaatgggcctattaccaaaattctccctggcatcattacagttcttggggatacactgattttagaaattactgtcagtatcctcctaaaagaaggcttaaatagtttctaacaagatgactatcaggaagctatgtggcttggggagttgggaccctctgcctcatattctgggtaactggtataacatagtaattattaggattgtatcaagtgtatctaaagatcaaaagggaaaaaaggcacccttaattgtcaaagttagttctaggaaaaaatactagcagggatgacaaactacgttcactttacagttaccataaattcttacttgggcccacccatttccatctgttaaggtccataaggttactcaagtttcagtggcttcattgttacaagaaaggggggaagtgagaaactttaataggctgtgatttagaaccactgctgattaacctttggccagtatgggtcagggaaggtgaacatgaaacactgcacagtaggttgtatcaatgc

SEQ ID NO: 414856 - DNA, 239 bp, Homo sapiens
gcggcgcctactactactactactgctcgaattcaagcttctaacgatgtacggggacatgattccaatcttgtgtgtgtttactaacccttccctgaggtttgtgtatgttggatattgtggtgttttagatcactgagtgtacagaagagagaaattcaaacaaaatattgctgttcttcagttttgtttgtggaatttgaaattactcaaatttaaaataaattactggactgtgg

SEQ ID NO: 414857 - DNA, 248 bp, Homo sapiens
cactgtgggaagtactgctcactcattaaacatcagagaattcatactggagaaaaaccttataaatgccgactaagtgatattgtggtgttttagatcactgagtgtacagaagagagaaattcaaacaaaatattgctgttcttcagttttgtttgtggaatttgaaattactcaaatttaaaataaattactggactgtggaaataacatagaattgaagttttaattaaataccactcaaacga

SEQ ID NO: 414858 - DNA, 6526 bp, Homo sapiens
cagccgtttccggagtctgcgctgcgcccggttccgccattgcggctctcctggcccctggagcctccgcccccgacccgagctctttcgtctgcctgccagtttcctgcgtccccggagaggatcctgctgagcccagcctcccccctccccttctcctcctctcccttggagagcccgggcagccactgccccgcagccccagtgacaggaggagaccataacccccgacagcgccatggcccagattctgccaattcgttttcaggagcatctccagctccagaacctgggtatcaacccagcaaacattggcttcagtaccctgactatggagtctgacaaattcatctgcattagagaaaaagtaggagagcaggcccaggtggtaatcattgatatgaatgacccaagtaatccaattcgaagaccaatttcagcagacagcgccatcatgaatccagctagcaaagtaattgcactgaaagctgggaaaactcttcagatttttaacattgaaatgaaaagtaaaatgaaggctcataccatgactgatgatgtcaccttttggaaatggatctctttgaatacggttgctcttgttacggataatgcagtttatcactggagtatggaaggagagtctcagccagtgaaaatgtttgatcgccattctagccttgcagggtgccagattatcaattaccgtacagatgcaaaacaaaagtggttacttctgactggtatatctgcacagcaaaatcgtgtggtgggagctatgcagctatattctgtagataggaaagtgtctcagcccattgaaggacatgcagctagctttgcacagtttaagatggaaggaaatgcagaagaatcaacgttattttgttttgcagttcggggccaagctggagggaagttacatattattgaagttggcacaccacctacagggaaccagccctttccaaagaaggcagtggatgtcttctttcctccagaagcacaaaatgattttcctgttgcaatgcagatcagtgaaaagcatgatgtggtgttcttgataaccaagtatggttatatccacctctatgatcttgagactggtacctgcatctacatgaatagaatcagtggagaaacaatttttgttactgcacctcatgaagccacagctggaataattggagtaaacagaaagggacaagttctgtcagtgtgtgtggaagaagaaaacataattccttacatcaccaatgttctacaaaatcctgatttggctctgagaatggctgtacgtaataacttagccggtgctgaagaactctttgcccggaaatttaatgctctttttgcccagggaaattactcggaggcagcaaaggtggctgctaatgcaccaaagggaattcttcgtactccagacactatccgtcggttccagagtgtcccagcccagccaggtcaaacttctcctctacttcagtactttggtatccttttggaccagggacagctcaacaaatacgaatccttagagctttgtaggcctgtacttcagcaagggcgaaaacagcttttggagaaatggttaaaagaagataagctggaatgttctgaagaactgggtgatcttgtgaaatctgtggaccctacattggcacttagtgtgtacctaagggctaacgtcccaaataaagtcattcagtgctttgcagaaacaggtcaagtccaaaagattgttttatatgctaaaaaagttggatacactccagattggatatttctgctgagaaatgtaatgcgaatcagtccagatcagggacagcagtttgcccaaatgttagttcaagatgaagagcctcttgctgacatcacacagattgtagatgtctttatggaatacaatctaattcagcagtgtactgcattcttgcttgatgctctgaagaataatcgcccatctgaaggtcctttacagacgcggttacttgagatgaaccttatgcatgcgcctcaagttgcagatgctattctaggcaatcagatgttcacacattatgaccgggctcatattgctcaactgtgtgaaaaggctggcctactgcagcgtgcattagaacatttcactgatttatatgatataaaacgtgcagtggttcacacccatcttcttaaccctgagtggttagtcaactactttggttccttatcagtagaagactccctagaatgtctcagagccatgctgtctgccaacatccgtcagaatctgcagatttgtgttcaggtggcttctaaatatcatgaacaactgtcaactcagtctctgattgaactttttgaatctttcaagagttttgaaggtctcttttattttctgggatccattgttaactttagccaggacccagatgtgcactttaaatatattcaggcagcttgcaagactgggcaaatcaaagaagtagaaagaatctgtagagaaagcaactgctacgatcctgagcgagtcaagaattttcttaaggaagcaaaactaacagatcagctaccacttatcattgtgtgtgatcgatttgactttgtccatgatttggtgctctatttatatagaaataatcttcaaaagtatatagagatatatgtacagaaggtgaatccaagtcgacttcctgtagttattggaggattacttgatgttgactgttctgaagatgtcataaaaaacttgattcttgttgtaagaggtcaattctctactgatgagcttgttgctgaggttgaaaaaagaaacagattgaaactgcttctgccttggctagaggccagaattcatgagggctgtgaggagcctgctactcacaatgccttagccaaaatctacatagacagtaataacaacccggagagatttcttcgtgaaaatccctactatgacagtcgcgttgttggaaagtattgtgagaagagagatccacatctggcctgtgttgcttatgaacgtggccaatgtgatctggaacttattaatgtttgcaatgagaattccctcttcaaaagtctttctcgctacctggtacgtcgaaaggatccagaattgtggggcagcgtgctgctggaaagcaatccttacaggagacccctaattgaccaggttgtacaaacagctttgtctgagactcaggaccctgaagaagtgtcagtaactgtaaaggctttcatgactgcagaccttcctaatgaactcattgaactgctggagaaaattgtccttgataactctgtattcagtgaacacaggaatctgcaaaacctccttatcctcactgcaattaaggctgaccgtacacgtgttatggagtatattaaccgcctggataattatgatgccccagatattgccaatatcgccatcagcaatgagctgtttgaagaagcatttgccattttccggaaatttgatgtcaatacttcagcagttcaggtcttaattgagcatattggaaacttggatcgggcatatgagtttgctgaacgttgcaatgaacctgcggtctggagtcaacttgcaaaagcccagttgcagaaaggaatggtgaaagaagccattgattcttatatcaaagcagatgatccttcctcctacatggaagttgttcaggctgccaatactagtggaaactgggaagaactggtgaagtacttgcagatggcccgtaagaaggctcgagagtcctatgtggagacagaactgatattcgcactggctaaaacaaaccgccttgcagagttagaagaatttatcaatggaccaaataatgctcatatccaacaagttggtgaccgttgttatgatgaaaaaatgtatgatgctgctaagttgttgtacaataatgtttccaattttggacgtttggcatctaccctggttcacctgggtgaatatcaggcagctgttgatggggctaggaaagctaacagtactcgaacatggaaagaggtctgcttcgcctgtgtagatgggaaagaattccgtcttgctcagatgtgtggacttcatattgttgtacatgcagatgaattagaagaacttatcaactactatcaggatcgtggctattttgaagagctgatcaccatgttggaagcagcactgggacttgagcgagctcacatgggaatgtttactgaattagctattctatactctaaatttaagcctcagaaaatgagggagcacctggagctgttctggtctagagtgaatattcccaaggtgctaagagctgcagaacaagctcatctttgggcagaactggtgtttttgtatgacaagtatgaagaatatgataatgccataattaccatgatgaatcatccaactgatgcctggaaagaagggcaattcaaagatatcattaccaaggttgccaatgtggaactatactacagagcaatacagttctacttagaattcaagcctctgttgttaaatgatttgctgatggtgctgtctccacggttggatcacactcgtgcagtcaattatttcagcaaggttaaacagctaccactggtgaaaccgtatttgcgttcagttcagaaccataacaacaaatctgtgaatgaatcattgaacaatctttttattacagaagaagattatcaggctctgcgaacatcaatagatgcttatgacaactttgacaatatctcgcttgctcagcgtttggaaaaacatgaactcattgagttcaggagaattgctgcttatctcttcaaaggcaacaatcgctggaaacagagtgtagagctgtgcaagaaagacagcctttacaaggatgcaatgcagtatgcttctgaatctaaagatactgaattggctgaagaactcctgcagtggtttttgcaggaagaaaaaagagagtgctttggagcttgtctgtttacctgttacgatcttttaaggccagatgtcgtcctagaaactgcatggaggcacaatatcatggattttgccatgccctatttcatccaggtcatgaaggagtacttgacaaaggtggataaattagatgcttcagaatcactgagaaaagaagaagaacaagctacagagacacaacccattgtttatggtcagccccagttgatgctgacagcaggacccagtgttgccgtccctccccaggcaccttttggttatggttataccgcaccaccgtatggacagccacagcctggctttgggtacagcatgtgagatgaagcgctgatcctgtagtcacctattttcgtactgaaacatcgtctttacccacttctcagtttataatgggggaaaacaggcaacgtgttcttgtaacctttatttcatgaaggacttctttttgtttctaactataaacttggatcacctatgttaaaaccttatttcacattccacatcattttagaatttattttcgaaggggaatagtttcaatgttttattcacttgggctttttttcttccccctctttctttaaagaactgctcaatattcaatctgttgtgaagaacctgatttgcactctgtagtgtttaaagaaacaaagaaactctaatattgaatctcttaaatttagtgtatgtaaacagcttacaaatacgtattgtctaaatgcatttaaatctgttttattcaaagaaaagctaaagcaaaaacactggcatatgaccatgcaagactgtcagtgccaacaaagacaacactaatcagcacatcgtacactggattgcagtgcttcccagattattgaaaaatgttacagacaacttgcctgatttttaaatgagcgtaaaaggccctctaacctatgcaggtttccccattatgcatatagaaaatgctagtatgttttgctcacttcatatgtaacaggtgcccttatgttgtgctgtatcctgtgctttttctgtgggaccattccattcaggagcaaagagcaccatgattccaatcttgtgtgtgtttactaacccttccctgaggtttgtgtatgttggatattgtggtgttttagatcactgagtgtacagaagagagaaattcaaacaaaatattgctgttcttcagttttgtttgtggaatttgaaattactcaaatttaaaataaattactggactgtggaaataacatagaattgaagttttaattaaataccactcaaacgaaaagaacagtagtttttgtagttttatattggatactgaggcattagggaggcatgaaaggaagaggaatgaggattgagacatgtgaagacattgtgcattatatcaatgtgcattcctgtagttcattaacaaggtacatgcaatagtctaaagaaccagagtcactactatagtggcttaacatttaatctgtctccaatattttaaccaagtgacaccgaggtttttatcgaagcatttcacttaaatgaacaaatcatggctgttatattaacttgaaataaaatatatttaaacatgta

SEQ ID NO: 414859 - DNA, 6669 bp, Homo sapiens
cagccgtttccggagtctgcgctgcgcccggttccgccattgcggctctcctggcccctggagcctccgcccccgacccgagctctttcgtctgcctgccagtttcctgcgtccccggagaggatcctgctgagcccagcctcccccctccccttctcctcctctcccttggagagcccgggcagccactgccccgcagccccagtgacaggaggagaccataacccccgacagcgccatggcccagattctgccaattcgttttcaggagcatctccagctccagaacctgggtatcaacccagcaaacattggcttcagtaccctgactatggagtctgacaaattcatctgcattagagaaaaagtaggagagcaggcccaggtggtaatcattgatatgaatgacccaagtaatccaattcgaagaccaatttcagcagacagcgccatcatgaatccagctagcaaagtaattgcactgaaagctgggaaaactcttcagatttttaacattgaaatgaaaagtaaaatgaaggctcataccatgactgatgatgtcaccttttggaaatggatctctttgaatacggttgctcttgttacggataatgcagtttatcactggagtatggaaggagagtctcagccagtgaaaatgtttgatcgccattctagccttgcagggtgccagattatcaattaccgtacagatgcaaaacaaaagtggttacttctgactggtatatctgcacagcaaaatcgtgtggtgggagctatgcagctatattctgtagataggaaagtgtctcagcccattgaaggacatgcagctagctttgcacagtttaagatggaaggaaatgcagaagaatcaacgttattttgttttgcagttcggggccaagctggagggaagttacatattattgaagttggcacaccacctacagggaaccagccctttccaaagaaggcagtggatgtcttctttcctccagaagcacaaaatgattttcctgttgcaatgcagatcagtgaaaagcatgatgtggtgttcttgataaccaagtatggttatatccacctctatgatcttgagactggtacctgcatctacatgaatagaatcagtggagaaacaatttttgttactgcacctcatgaagccacagctggaataattggagtaaacagaaagggacaaaactgagtactttagaagacactggagccttttctgtttcctgtagcagatcttactaaggactggttgctagaaatctgctagaacagtctttaagtatgataacgataaaactgtggattcagtatgtggggaaacctaaggttctgtcagtgtgtgtggaagaagaaaacataattccttacatcaccaatgttctacaaaatcctgatttggctctgagaatggctgtacgtaataacttagccggtgctgaagaactctttgcccggaaatttaatgctctttttgcccagggaaattactcggaggcagcaaaggtggctgctaatgcaccaaagggaattcttcgtactccagacactatccgtcggttccagagtgtcccagcccagccaggtcaaacttctcctctacttcagtactttggtatccttttggaccagggacagctcaacaaatacgaatccttagagctttgtaggcctgtacttcagcaagggcgaaaacagcttttggagaaatggttaaaagaagataagctggaatgttctgaagaactgggtgatcttgtgaaatctgtggaccctacattggcacttagtgtgtacctaagggctaacgtcccaaataaagtcattcagtgctttgcagaaacaggtcaagtccaaaagattgttttatatgctaaaaaagttggatacactccagattggatatttctgctgagaaatgtaatgcgaatcagtccagatcagggacagcagtttgcccaaatgttagttcaagatgaagagcctcttgctgacatcacacagattgtagatgtctttatggaatacaatctaattcagcagtgtactgcattcttgcttgatgctctgaagaataatcgcccatctgaaggtcctttacagacgcggttacttgagatgaaccttatgcatgcgcctcaagttgcagatgctattctaggcaatcagatgttcacacattatgaccgggctcatattgctcaactgtgtgaaaaggctggcctactgcagcgtgcattagaacatttcactgatttatatgatataaaacgtgcagtggttcacacccatcttcttaaccctgagtggttagtcaactactttggttccttatcagtagaagactccctagaatgtctcagagccatgctgtctgccaacatccgtcagaatctgcagatttgtgttcaggtggcttctaaatatcatgaacaactgtcaactcagtctctgattgaactttttgaatctttcaagagttttgaaggtctcttttattttctgggatccattgttaactttagccaggacccagatgtgcactttaaatatattcaggcagcttgcaagactgggcaaatcaaagaagtagaaagaatctgtagagaaagcaactgctacgatcctgagcgagtcaagaattttcttaaggaagcaaaactaacagatcagctaccacttatcattgtgtgtgatcgatttgactttgtccatgatttggtgctctatttatatagaaataatcttcaaaagtatatagagatatatgtacagaaggtgaatccaagtcgacttcctgtagttattggaggattacttgatgttgactgttctgaagatgtcataaaaaacttgattcttgttgtaagaggtcaattctctactgatgagcttgttgctgaggttgaaaaaagaaacagattgaaactgcttctgccttggctagaggccagaattcatgagggctgtgaggagcctgctactcacaatgccttagccaaaatctacatagacagtaataacaacccggagagatttcttcgtgaaaatccctactatgacagtcgcgttgttggaaagtattgtgagaagagagatccacatctggcctgtgttgcttatgaacgtggccaatgtgatctggaacttattaatgtttgcaatgagaattccctcttcaaaagtctttctcgctacctggtacgtcgaaaggatccagaattgtggggcagcgtgctgctggaaagcaatccttacaggagacccctaattgaccaggttgtacaaacagctttgtctgagactcaggaccctgaagaagtgtcagtaactgtaaaggctttcatgactgcagaccttcctaatgaactcattgaactgctggagaaaattgtccttgataactctgtattcagtgaacacaggaatctgcaaaacctccttatcctcactgcaattaaggctgaccgtacacgtgttatggagtatattaaccgcctggataattatgatgccccagatattgccaatatcgccatcagcaatgagctgtttgaagaagcatttgccattttccggaaatttgatgtcaatacttcagcagttcaggtcttaattgagcatattggaaacttggatcgggcatatgagtttgctgaacgttgcaatgaacctgcggtctggagtcaacttgcaaaagcccagttgcagaaaggaatggtgaaagaagccattgattcttatatcaaagcagatgatccttcctcctacatggaagttgttcaggctgccaatactagtggaaactgggaagaactggtgaagtacttgcagatggcccgtaagaaggctcgagagtcctatgtggagacagaactgatattcgcactggctaaaacaaaccgccttgcagagttagaagaatttatcaatggaccaaataatgctcatatccaacaagttggtgaccgttgttatgatgaaaaaatgtatgatgctgctaagttgttgtacaataatgtttccaattttggacgtttggcatctaccctggttcacctgggtgaatatcaggcagctgttgatggggctaggaaagctaacagtactcgaacatggaaagaggtctgcttcgcctgtgtagatgggaaagaattccgtcttgctcagatgtgtggacttcatattgttgtacatgcagatgaattagaagaacttatcaactactatcaggatcgtggctattttgaagagctgatcaccatgttggaagcagcactgggacttgagcgagctcacatgggaatgtttactgaattagctattctatactctaaatttaagcctcagaaaatgagggagcacctggagctgttctggtctagagtgaatattcccaaggtgctaagagctgcagaacaagctcatctttgggcagaactggtgtttttgtatgacaagtatgaagaatatgataatgccataattaccatgatgaatcatccaactgatgcctggaaagaagggcaattcaaagatatcattaccaaggttgccaatgtggaactatactacagagcaatacagttctacttagaattcaagcctctgttgttaaatgatttgctgatggtgctgtctccacggttggatcacactcgtgcagtcaattatttcagcaaggttaaacagctaccactggtgaaaccgtatttgcgttcagttcagaaccataacaacaaatctgtgaatgaatcattgaacaatctttttattacagaagaagattatcaggctctgcgaacatcaatagatgcttatgacaactttgacaatatctcgcttgctcagcgtttggaaaaacatgaactcattgagttcaggagaattgctgcttatctcttcaaaggcaacaatcgctggaaacagagtgtagagctgtgcaagaaagacagcctttacaaggatgcaatgcagtatgcttctgaatctaaagatactgaattggctgaagaactcctgcagtggtttttgcaggaagaaaaaagagagtgctttggagcttgtctgtttacctgttacgatcttttaaggccagatgtcgtcctagaaactgcatggaggcacaatatcatggattttgccatgccctatttcatccaggtcatgaaggagtacttgacaaaggtggataaattagatgcttcagaatcactgagaaaagaagaagaacaagctacagagacacaacccattgtttatggtcagccccagttgatgctgacagcaggacccagtgttgccgtccctccccaggcaccttttggttatggttataccgcaccaccgtatggacagccacagcctggctttgggtacagcatgtgagatgaagcgctgatcctgtagtcacctattttcgtactgaaacatcgtctttacccacttctcagtttataatgggggaaaacaggcaacgtgttcttgtaacctttatttcatgaaggacttctttttgtttctaactataaacttggatcacctatgttaaaaccttatttcacattccacatcattttagaatttattttcgaaggggaatagtttcaatgttttattcacttgggctttttttcttccccctctttctttaaagaactgctcaatattcaatctgttgtgaagaacctgatttgcactctgtagtgtttaaagaaacaaagaaactctaatattgaatctcttaaatttagtgtatgtaaacagcttacaaatacgtattgtctaaatgcatttaaatctgttttattcaaagaaaagctaaagcaaaaacactggcatatgaccatgcaagactgtcagtgccaacaaagacaacactaatcagcacatcgtacactggattgcagtgcttcccagattattgaaaaatgttacagacaacttgcctgatttttaaatgagcgtaaaaggccctctaacctatgcaggtttccccattatgcatatagaaaatgctagtatgttttgctcacttcatatgtaacaggtgcccttatgttgtgctgtatcctgtgctttttctgtgggaccattccattcaggagcaaagagcaccatgattccaatcttgtgtgtgtttactaacccttccctgaggtttgtgtatgttggatattgtggtgttttagatcactgagtgtacagaagagagaaattcaaacaaaatattgctgttcttcagttttgtttgtggaatttgaaattactcaaatttaaaataaattactggactgtggaaataacatagaattgaagttttaattaaataccactcaaacgaaaagaacagtagtttttgtagttttatattggatactgaggcattagggaggcatgaaaggaagaggaatgaggattgagacatgtgaagacattgtgcattatatcaatgtgcattcctgtagttcattaacaaggtacatgcaatagtctaaagaaccagagtcactactatagtggcttaacatttaatctgtctccaatattttaaccaagtgacaccgaggtttttatcgaagcatttcacttaaatgaacaaatcatggctgttatattaacttgaaataaaatatatttaaacatgta

SEQ ID NO: 414860 - DNA, 6221 bp, Homo sapiens
cagccgtttccggagtctgcgctgcgcccggttccgccattgcggctctcctggcccctggagcctccgcccccgacccgagctctttcgtctgcctgccagtttcctgcgtccccggagaggatcctgctgagcccagcctcccccctccccttctcctcctctcccttggagagcccgggcagccactgccccgcagccccagtgacaggaggagaccataacccccgacagcgccatggcccagattctgccaattcgttttcaggagcatctccagctccagaacctgggtatcaacccagcaaacattggcttcagtaccctgactatggagtctgacaaattcatctgcattagagaaaaagtaggagagcaggcccaggtggtaatcattgatatgaatgacccaagtaatccaattcgaagaccaatttcagcagacagcgccatcatgaatccagctagcaaagtaattgcactgaaagctgggaaaactcttcagatttttaacattgaaatgaaaagtaaaatgaaggctcataccatgactgatgatgtcaccttttggaaatggatctctttgaatacggttgctcttgttacggataatgcagtttatcactggagtatggaaggagagtctcagccagtgaaaatgtttgatcgccattctagccttgcagggtgccagattatcaattaccgtacagatgcaaaacaaaagtggttacttctgactggtatatctgcacagcaaaatcgtgtggtgggagctatgcagctatattctgtagataggaaagtgtctcagcccattgaaggacatgcagctagctttgcacagtttaagatggaaggaaatgcagaagaatcaacgttattttgttttgcagttcggggccaagctggagggaagttacatattattgaagttggcacaccacctacagggaaccagccctttccaaagaaggcagtggatgtcttctttcctccagaagcacaaaatgattttcctgttgcaatgcagatcagtgaaaagcatgatgtggtgttcttgataaccaagtatggttatatccacctctatgatcttgagactggtacctgcatctacatgaatagaatcagtggagaaacaatttttgttactgcacctcatgaagccacagctggaataattggagtaaacagaaagggacaagttctgtcagtgtgtgtggaagaagaaaacataattccttacatcaccaatgttctacaaaatcctgatttggctctgagaatggctgtacgtaataacttagccggtgctgaagaactctttgcccggaaatttaatgctctttttgcccagggaaattactcggaggcagcaaaggtggctgctaatgcaccaaagggaattcttcgtactccagacactatccgtcggttccagagtgtcccagcccagccaggtcaaacttctcctctacttcagtactttggtatccttttggaccagggacagctcaacaaatacgaatccttagagctttgtaggcctgtacttcagcaagggcgaaaacagcttttggagaaatggttaaaagaagataagctggaatgttctgaagaactgggtgatcttgtgaaatctgtggaccctacattggcacttagtgtgtacctaagggctaacgtcccaaataaagtcattcagtgctttgcagaaacaggtcaagtccaaaagattgttttatatgctaaaaaagttggatacactccagattggatatttctgctgagaaatgtaatgcgaatcagtccagatcagggacagcagtttgcccaaatgttagttcaagatgaagagcctcttgctgacatcacacagattgtagatgtctttatggaatacaatctaattcagcagtgtactgcattcttgcttgatgctctgaagaataatcgcccatctgaaggtcctttacagacgcggttacttgagatgaaccttatgcatgcgcctcaagttgcagatgctattctaggcaatcagatgttcacacattatgaccgggctcatattgctcaactgtgtgaaaaggctggcctactgcagcgtgcattagaacatttcactgatttatatgatataaaacgtgcagtggttcacacccatcttcttaaccctgagtggttagtcaactactttggttccttatcagtagaagactccctagaatgtctcagagccatgctgtctgccaacatccgtcagaatctgcagatttgtgttcaggtggcttctaaatatcatgaacaactgtcaactcagtctctgattgaactttttgaatctttcaagagttttgaaggtctcttttattttctgggatccattgttaactttagccaggacccagatgtgcactttaaatatattcaggcagcttgcaagactgggcaaatcaaagaagtagaaagaatctgtagagaaagcaactgctacgatcctgagcgagtcaagaattttcttaaggaagcaaaactaacagatcagctaccacttatcattgtgtgtgatcgatttgactttgtccatgatttggtgctctatttatatagaaataatcttcaaaagtatatagagatatatgtacagaaggtgaatccaagtcgacttcctgtagttattggaggattacttgatgttgactgttctgaagatgtcataaaaaacttgattcttgttgtaagaggtcaattctctactgatgagcttgttgctgaggttgaaaaaagaaacagattgaaactgcttctgccttggctagaggccagaattcatgagggctgtgaggagcctgctactcacaatgccttagccaaaatctacatagacagtaataacaacccggagagatttcttcgtgaaaatccctactatgacagtcgcgttgttggaaagtattgtgagaagagagatccacatctggcctgtgttgcttatgaacgtggccaatgtgatctggaacttattaatgtttgcaatgagaattccctcttcaaaagtctttctcgctacctggtacgtcgaaaggatccagaattgtggggcagcgtgctgctggaaagcaatccttacaggagacccctaattgaccaggttgtacaaacagctttgtctgagactcaggaccctgaagaagtgtcagtaactgtaaaggctttcatgactgcagaccttcctaatgaactcattgaactgctggagaaaattgtccttgataactctgtattcagtgaacacaggaatctgcaaaacctccttatcctcactgcaattaaggctgaccgtacacgtgttatggagtatattaaccgcctggataattatgatgccccagatattgccaatatcgccatcagcaatgagctgtttgaagaagcatttgccattttccggaaatttgatgtcaatacttcagcagttcaggtcttaattgagcatattggaaacttggatcgggcatatgagtttgctgaacgttgcaatgaacctgcggtctggagtcaacttgcaaaagcccagttgcagaaaggaatggtgaaagaagccattgattcttatatcaaagcagatgatccttcctcctacatggaagttgttcaggctgccaatactagtggaaactgggaagaactggtgaagtacttgcagatggcccgtaagaaggctcgagagtcctatgtggagacagaactgatattcgcactggctaaaacaaaccgccttgcagagttagaagaatttatcaatggaccaaataatgctcatatccaacaagttggtgaccgttgttatgatgaaaaaatgtatgatgctgctaagttgttgtacaataatgtttccaattttggacgtttggcatctaccctggttcacctgggtgaatatcaggcagctgttgatggggctaggaaagctaacagtactcgaacatggaaagaggtctgcttcgcctgtgtagatgggaaagaattccgtcttgctcagatgtgtggacttcatattgttgtacatgcagatgaattagaagaacttatcaactactatcaggatcgtggctattttgaagagctgatcaccatgttggaagcagcactgggacttgagcgagctcacatgggaatgtttactgaattagctattctatactctaaatttaagcctcagaaaatgagggagcacctggagctgttctggtctagagtgaatattcccaaggtgctaagagctgcagaacaagctcatctttgggcagaactggtgtttttgtatgacaagtatgaagaatatgataatgccataattaccatgatgaatcatccaactgatgcctggaaagaagggcaattcaaagatatcattaccaaggttgccaatgtggaactatactacagagcaatacagttctacttagaattcaagcctctgttgttaaatgatttgctgatggtgctgtctccacggttggatcacactcgtgcagtcaattatttcagcaaggttaaacagctaccactggtgaaaccgtatttgcgttcagttcagaaccataacaacaaatctgtgaatgaatcattgaacaatctttttattacagaagaagattatcaggctctgcgaacatcaatagatgcttatgacaactttgacaatatctcgcttgctcagcgtttggaaaaacatgaactcattgagttcaggagaattgctgcttatctcttcaaaggcaacaatcgctggaaacagagtgtagagctgtgcaagaaagacagcctttacaaggatgcaatgcagtatgcttctgaatctaaagatactgaattggctgaagaactcctgcagtggtttttgcaggaagaaaaaagagagtgctttggagcttgtctgtttacctgttacgatcttttaaggccagatgtcgtcctagaaactgcatggaggcacaatatcatggattttgccatgccctatttcatccaggtcatgaaggagtacttgacaaaggtggataaattagatgcttcagaatcactgagaaaagaagaagaacaagctacagagacacaacccattgtttatggtcagccccagttgatgctgacagcaggacccagtgttgccgtccctccccaggcaccttttggttatggttataccgcaccaccgtatggacagccacagcctggctttgggtacagcatgtgagatgaagcgctgatcctgtagtcacctattttcgtactgaaacatcgtctttacccacttctcagtttataatgggggaaaacaggcaacgtgttcttgtaacctttatttcatgaaggacttctttttgtttctaactataaacttggatcacctatgttaaaaccttatttcacattccacatcattttagaatttattttcgaaggggaatagtttcaatgttttattcacttgggctttttttcttccccctctttctttaaagaactgctcaatattcaatctgttgtgaagaacctgatttgcactctgtagtgtttaaagaaacaaagaaactctaatattgaatctcttaaatttagtgtatgtaaacagcttacaaatacgtattgtctaaatgcatttaaatctgttttattcaaagaaaagctaaagcaaaaacactggcatatgaccatgcaagactgtcagtgccaacaaagacaacactaatcagcacatcgtacactggattgcagtgcttcccagattattgaaaaatgttacagacaacttgcctgatttttaaatgagcgtaaaaggccctctaacctatgcaggtttccccattatgcatatagaaaatgctagtatgttttgctcacttcatatgtaacaggtgcccttatgttgtgctgtatcctgtgctttttctgtgggaccattccattcaggagcaaagagcaccatgattccaatcttgtgtgtgtttactaacccttccctgaggtttgtgtatgttggatattgtggtgttttagatcactgagtgtacagaagagagaaattcaaacaaaatattgctgttcttcagttttgtttgtggaatttgaaattactcaaatttaaaataaattactggactgtggaaataacatagaattgaagttttaattaaataccactcaaacga

SEQ ID NO: 414861 - DNA, 4602 bp, Homo sapiens
atagacactagaggatctccgaaaagtatcggccaatctaaatgtccatttagacgtactctgatacttcacataacccttatgacatgcgcctgcgttgcagatgctattctaggcaatcagatgttcacacattatgaccgggctcatattgctcaactgtgtgaaaaggctggcctactgcagcgtgcattagaacatttcactgatttatatgatataaaacgtgcagtggttcacacccatcttcttaaccctgagtggttagtcaactactttggttccttatcagtagaagactccctagaatgtctcagagccatgctgtctgccaacatccgtcagaatctgcagatttgtgttcaggtggcttctaaatatcatgaacaactgtcaactcagtctctgattgaactttttgaatctttcaagagttttgaaggtctcttttattttctgggatccattgttaactttagccaggacccagatgtgcactttaaatatattcaggcagcttgcaagactgggcaaatcaaagaagtagaaagaatctgtagagaaagcaactgctacgatcctgagcgagtcaagaattttcttaaggaagcaaaactaacagatcagctaccacttatcattgtgtgtgatcgatttgactttgtccatgatttggtgctctatttatatagaaataatcttcaaaagtatatagagatatatgtacagaaggtgaatccaagtcgacttcctgtagttattggaggattacttgatgttgactgttctgaagatgtcataaaaaacttgattcttgttgtaagaggtcaattctctactgatgagcttgttgctgaggttgaaaaaagaaacagattgaaactgcttctgccttggctagaggccagaattcatgagggctgtgaggagcctgctactcacaatgccttagccaaaatctacatagacagtaataacaacccggagagatttcttcgtgaaaatccctactatgacagtcgcgttgttggaaagtattgtgagaagagagatccacatctggcctgtgttgcttatgaacgtggccaatgtgatctggaacttattaatgtttgcaatgagaattccctcttcaaaagtctttctcgctacctggtacgtcgaaaggatccagaattgtggggcagcgtgctgctggaaagcaatccttacaggagacccctaattgaccaggttgtacaaacagctttgtctgagactcaggaccctgaagaagtgtcagtaactgtaaaggctttcatgactgcagaccttcctaatgaactcattgaactgctggagaaaattgtccttgataactctgtattcagtgaacacaggaatctgcaaaacctccttatcctcactgcaattaaggctgaccgtacacgtgttatggagtatattaaccgcctggataattatgatgccccagatattgccaatatcgccatcagcaatgagctgtttgaagaagcatttgccattttccggaaatttgatgtcaatacttcagcagttcaggtcttaattgagcatattggaaacttggatcgggcatatgagtttgctgaacgttgcaatgaacctgcggtctggagtcaacttgcaaaagcccagttgcagaaaggaatggtgaaagaagccattgattcttatatcaaagcagatgatccttcctcctacatggaagttgttcaggctgccaatactagtggaaactgggaagaactggtgaagtacttgcagatggcccgtaagaaggctcgagagtcctatgtggagacagaactgatattcgcactggctaaaacaaaccgccttgcagagttagaagaatttatcaatggaccaaataatgctcatatccaacaagttggtgaccgttgttatgatgaaaaaatgtatgatgctgctaagttgttgtacaataatgtttccaattttggacgtttggcatctaccctggttcacctgggtgaatatcaggcagctgttgatggggctaggaaagctaacagtactcgaacatggaaagaggtctgcttcgcctgtgtagatgggaaagaattccgtcttgctcagatgtgtggacttcatattgttgtacatgcagatgaattagaagaacttatcaactactatcaggatcgtggctattttgaagagctgatcaccatgttggaagcagcactgggacttgagcgagctcacatgggaatgtttactgaattagctattctatactctaaatttaagcctcagaaaatgagggagcacctggagctgttctggtctagagtgaatattcccaaggtgctaagagctgcagaacaagctcatctttgggcagaactggtgtttttgtatgacaagtatgaagaatatgataatgccataattaccatgatgaatcatccaactgatgcctggaaagaagggcaattcaaagatatcattaccaaggttgccaatgtggaactatactacagagcaatacagttctacttagaattcaagcctctgttgttaaatgatttgctgatggtgctgtctccacggttggatcacactcgtgcagtcaattatttcagcaaggttaaacagctaccactggtgaaaccgtatttgcgttcagttcagaaccataacaacaaatctgtgaatgaatcattgaacaatctttttattacagaagaagattatcaggctctgcgaacatcaatagatgcttatgacaactttgacaatatctcgcttgctcagcgtttggaaaaacatgaactcattgagttcaggagaattgctgcttatctcttcaaaggcaacaatcgctggaaacagagtgtagagctgtgcaagaaagacagcctttacaaggatgcaatgcagtatgcttctgaatctaaagatactgaattggctgaagaactcctgcagtggtttttgcaggaagaaaaaagagagtgctttggagcttgtctgtttacctgttacgatcttttaaggccagatgtcgtcctagaaactgcatggaggcacaatatcatggattttgccatgccctatttcatccaggtcatgaaggagtacttgacaaaggtggataaattagatgcttcagaatcactgagaaaagaagaagaacaagctacagagacacaacccattgtttatggtcagccccagttgatgctgacagcaggacccagtgttgccgtccctccccaggcaccttttggttatggttataccgcaccaccgtatggacagccacagcctggctttgggtacagcatgtgagatgaagcgctgatcctgtagtcacctattttcgtactgaaacatcgtctttacccacttctcagtttataatgggggaaaacaggcaacgtgttcttgtaacctttatttcatgaaggacttctttttgtttctaactataaacttggatcacctatgttaaaaccttatttcacattccacatcattttagaatttattttcgaaggggaatagtttcaatgttttattcacttgggctttttttcttccccctctttctttaaagaactgctcaatattcaatctgttgtgaagaacctgatttgcactctgtagtgtttaaagaaacaaagaaactctaatattgaatctcttaaatttagtgtatgtaaacagcttacaaatacgtattgtctaaatgcatttaaatctgttttattcaaagaaaagctaaagcaaaaacactggcatatgaccatgcaagactgtcagtgccaacaaagacaacactaatcagcacatcgtacactggattgcagtgcttcccagattattgaaaaatgttacagacaacttgcctgatttttaaatgagcgtaaaaggccctctaacctatgcaggtttccccattatgcatatagaaaatgctagtatgttttgctcacttcatatgtaacaggtgcccttatgttgtgctgtatcctgtgctttttctgtgggaccattccattcaggagcaaagagcaccatgattccaatcttgtgtgtgtttactaacccttccctgaggtttgtgtatgttggatattgtggtgttttagatcactgagtgtacagaagagagaaattcaaacaaaatattgctgttcttcagttttgtttgtggaatttgaaattactcaaatttaaaataaattactggactgtggaaataacatagaattgaagttttaattaaataccactcaaacgaaaagaacagtagtttttgtagttttatattggatactgaggcattagggaggcatgaaaggaagaggaatgaggattgagacatgtgaagacattgtgcattatatcaatgtgcattcctgtagttcattaacaaggtacatgcaatagtctaaagaaccagagtcactactatagtggcttaacatttaatctgtctccaatattttaaccaagtgacaccgaggtttttatcgaagcatttcacttaaatgaacaaatcatggctgttatattaacttgaaataaaatatatttaaacatgta

SEQ ID NO: 414862 - DNA, 4055 bp, Homo sapiens
cgactctacgaggatcccctttacgctacgatcctgagcgagtcaagaataatcttaaggaagcaaaactaacagatcagctaccacttatcattgtgtgtgatcgatttgactttgtccatgatttggtgctctatttatatagaaataatcttcaaaagtatatagagatatatgtacagaaggtgaatccaagtcgacttcctgtagttattggaggattacttgatgttgactgttctgaagatgtcataaaaaacttgattcttgttgtaagaggtcaattctctactgatgagcttgttgctgaggttgaaaaaagaaacagattgaaactgcttctgccttggctagaggccagaattcatgagggctgtgaggagcctgctactcacaatgccttagccaaaatctacatagacagtaataacaacccggagagatttcttcgtgaaaatccctactatgacagtcgcgttgttggaaagtattgtgagaagagagatccacatctggcctgtgttgcttatgaacgtggccaatgtgatctggaacttattaatgtttgcaatgagaattccctcttcaaaagtctttctcgctacctggtacgtcgaaaggatccagaattgtggggcagcgtgctgctggaaagcaatccttacaggagacccctaattgaccaggttgtacaaacagctttgtctgagactcaggaccctgaagaagtgtcagtaactgtaaaggctttcatgactgcagaccttcctaatgaactcattgaactgctggagaaaattgtccttgataactctgtattcagtgaacacaggaatctgcaaaacctccttatcctcactgcaattaaggctgaccgtacacgtgttatggagtatattaaccgcctggataattatgatgccccagatattgccaatatcgccatcagcaatgagctgtttgaagaagcatttgccattttccggaaatttgatgtcaatacttcagcagttcaggtcttaattgagcatattggaaacttggatcgggcatatgagtttgctgaacgttgcaatgaacctgcggtctggagtcaacttgcaaaagcccagttgcagaaaggaatggtgaaagaagccattgattcttatatcaaagcagatgatccttcctcctacatggaagttgttcaggctgccaatactagtggaaactgggaagaactggtgaagtacttgcagatggcccgtaagaaggctcgagagtcctatgtggagacagaactgatattcgcactggctaaaacaaaccgccttgcagagttagaagaatttatcaatggaccaaataatgctcatatccaacaagttggtgaccgttgttatgatgaaaaaatgtatgatgctgctaagttgttgtacaataatgtttccaattttggacgtttggcatctaccctggttcacctgggtgaatatcaggcagctgttgatggggctaggaaagctaacagtactcgaacatggaaagaggtctgcttcgcctgtgtagatgggaaagaattccgtcttgctcagatgtgtggacttcatattgttgtacatgcagatgaattagaagaacttatcaactactatcaggatcgtggctattttgaagagctgatcaccatgttggaagcagcactgggacttgagcgagctcacatgggaatgtttactgaattagctattctatactctaaatttaagcctcagaaaatgagggagcacctggagctgttctggtctagagtgaatattcccaaggtgctaagagctgcagaacaagctcatctttgggcagaactggtgtttttgtatgacaagtatgaagaatatgataatgccataattaccatgatgaatcatccaactgatgcctggaaagaagggcaattcaaagatatcattaccaaggttgccaatgtggaactatactacagagcaatacagttctacttagaattcaagcctctgttgttaaatgatttgctgatggtgctgtctccacggttggatcacactcgtgcagtcaattatttcagcaaggttaaacagctaccactggtgaaaccgtatttgcgttcagttcagaaccataacaacaaatctgtgaatgaatcattgaacaatctttttattacagaagaagattatcaggctctgcgaacatcaatagatgcttatgacaactttgacaatatctcgcttgctcagcgtttggaaaaacatgaactcattgagttcaggagaattgctgcttatctcttcaaaggcaacaatcgctggaaacagagtgtagagctgtgcaagaaagacagcctttacaaggatgcaatgcagtatgcttctgaatctaaagatactgaattggctgaagaactcctgcagtggtttttgcaggaagaaaaaagagagtgctttggagcttgtctgtttacctgttacgatcttttaaggccagatgtcgtcctagaaactgcatggaggcacaatatcatggattttgccatgccctatttcatccaggtcatgaaggagtacttgacaaaggtggataaattagatgcttcagaatcactgagaaaagaagaagaacaagctacagagacacaacccattgtttatggtcagccccagttgatgctgacagcaggacccagtgttgccgtccctccccaggcaccttttggttatggttataccgcaccaccgtatggacagccacagcctggctttgggtacagcatgtgagatgaagcgctgatcctgtagtcacctattttcgtactgaaacatcgtctttacccacttctcagtttataatgggggaaaacaggcaacgtgttcttgtaacctttatttcatgaaggacttctttttgtttctaactataaacttggatcacctatgttaaaaccttatttcacattccacatcattttagaatttattttcgaaggggaatagtttcaatgttttattcacttgggctttttttcttccccctctttctttaaagaactgctcaatattcaatctgttgtgaagaacctgatttgcactctgtagtgtttaaagaaacaaagaaactctaatattgaatctcttaaatttagtgtatgtaaacagcttacaaatacgtattgtctaaatgcatttaaatctgttttattcaaagaaaagctaaagcaaaaacactggcatatgaccatgcaagactgtcagtgccaacaaagacaacactaatcagcacatcgtacactggattgcagtgcttcccagattattgaaaaatgttacagacaacttgcctgatttttaaatgagcgtaaaaggccctctaacctatgcaggtttccccattatgcatatagaaaatgctagtatgttttgctcacttcatatgtaacaggtgcccttatgttgtgctgtatcctgtgctttttctgtgggaccattccattcaggagcaaagagcaccatgattccaatcttgtgtgtgtttactaacccttccctgaggtttgtgtatgttggatattgtggtgttttagatcactgagtgtacagaagagagaaattcaaacaaaatattgctgttcttcagttttgtttgtggaatttgaaattactcaaatttaaaataaattactggactgtggaaataacatagaattgaagttttaattaaataccactcaaacgaaaagaacagtagtttttgtagttttatattggatactgaggcattagggaggcatgaaaggaagaggaatgaggattgagacatgtgaagacattgtgcattatatcaatgtgcattcctgtagttcattaacaaggtacatgcaatagtctaaagaaccagagtcactactatagtggcttaacatttaatctgtctccaatattttaaccaagtgacaccgaggtttttatcgaagcatttcacttaaatgaacaaatcatggctgttatattaacttgaaataaaatatatttaaacatgta

SEQ ID NO: 414863 - DNA, 3893 bp, Homo sapiens
cttctacttctttttaaccacaggtgaatccaagtcgacttcctgtagttattggaggattacttgatgttgactgttctgaagatgtcataaaaaacttgattcttgttgtaagaggtcaattctctactgatgagcttgttgctgaggttgaaaaaagaaacagattgaaactgcttctgccttggctagaggccagaattcatgagggctgtgaggagcctgctactcacaatgccttagccaaaatctacatagacagtaataacaacccggagagatttcttcgtgaaaatccctactatgacagtcgcgttgttggaaagtattgtgagaagagagatccacatctggcctgtgttgcttatgaacgtggccaatgtgatctggaacttattaatgtttgcaatgagaattccctcttcaaaagtctttctcgctacctggtacgtcgaaaggatccagaattgtggggcagcgtgctgctggaaagcaatccttacaggagacccctaattgaccaggttgtacaaacagctttgtctgagactcaggaccctgaagaagtgtcagtaactgtaaaggctttcatgactgcagaccttcctaatgaactcattgaactgctggagaaaattgtccttgataactctgtattcagtgaacacaggaatctgcaaaacctccttatcctcactgcaattaaggctgaccgtacacgtgttatggagtatattaaccgcctggataattatgatgccccagatattgccaatatcgccatcagcaatgagctgtttgaagaagcatttgccattttccggaaatttgatgtcaatacttcagcagttcaggtcttaattgagcatattggaaacttggatcgggcatatgagtttgctgaacgttgcaatgaacctgcggtctggagtcaacttgcaaaagcccagttgcagaaaggaatggtgaaagaagccattgattcttatatcaaagcagatgatccttcctcctacatggaagttgttcaggctgccaatactagtggaaactgggaagaactggtgaagtacttgcagatggcccgtaagaaggctcgagagtcctatgtggagacagaactgatattcgcactggctaaaacaaaccgccttgcagagttagaagaatttatcaatggaccaaataatgctcatatccaacaagttggtgaccgttgttatgatgaaaaaatgtatgatgctgctaagttgttgtacaataatgtttccaattttggacgtttggcatctaccctggttcacctgggtgaatatcaggcagctgttgatggggctaggaaagctaacagtactcgaacatggaaagaggtctgcttcgcctgtgtagatgggaaagaattccgtcttgctcagatgtgtggacttcatattgttgtacatgcagatgaattagaagaacttatcaactactatcaggatcgtggctattttgaagagctgatcaccatgttggaagcagcactgggacttgagcgagctcacatgggaatgtttactgaattagctattctatactctaaatttaagcctcagaaaatgagggagcacctggagctgttctggtctagagtgaatattcccaaggtgctaagagctgcagaacaagctcatctttgggcagaactggtgtttttgtatgacaagtatgaagaatatgataatgccataattaccatgatgaatcatccaactgatgcctggaaagaagggcaattcaaagatatcattaccaaggttgccaatgtggaactatactacagagcaatacagttctacttagaattcaagcctctgttgttaaatgatttgctgatggtgctgtctccacggttggatcacactcgtgcagtcaattatttcagcaaggttaaacagctaccactggtgaaaccgtatttgcgttcagttcagaaccataacaacaaatctgtgaatgaatcattgaacaatctttttattacagaagaagattatcaggctctgcgaacatcaatagatgcttatgacaactttgacaatatctcgcttgctcagcgtttggaaaaacatgaactcattgagttcaggagaattgctgcttatctcttcaaaggcaacaatcgctggaaacagagtgtagagctgtgcaagaaagacagcctttacaaggatgcaatgcagtatgcttctgaatctaaagatactgaattggctgaagaactcctgcagtggtttttgcaggaagaaaaaagagagtgctttggagcttgtctgtttacctgttacgatcttttaaggccagatgtcgtcctagaaactgcatggaggcacaatatcatggattttgccatgccctatttcatccaggtcatgaaggagtacttgacaaaggtggataaattagatgcttcagaatcactgagaaaagaagaagaacaagctacagagacacaacccattgtttatggtcagccccagttgatgctgacagcaggacccagtgttgccgtccctccccaggcaccttttggttatggttataccgcaccaccgtatggacagccacagcctggctttgggtacagcatgtgagatgaagcgctgatcctgtagtcacctattttcgtactgaaacatcgtctttacccacttctcagtttataatgggggaaaacaggcaacgtgttcttgtaacctttatttcatgaaggacttctttttgtttctaactataaacttggatcacctatgttaaaaccttatttcacattccacatcattttagaatttattttcgaaggggaatagtttcaatgttttattcacttgggctttttttcttccccctctttctttaaagaactgctcaatattcaatctgttgtgaagaacctgatttgcactctgtagtgtttaaagaaacaaagaaactctaatattgaatctcttaaatttagtgtatgtaaacagcttacaaatacgtattgtctaaatgcatttaaatctgttttattcaaagaaaagctaaagcaaaaacactggcatatgaccatgcaagactgtcagtgccaacaaagacaacactaatcagcacatcgtacactggattgcagtgcttcccagattattgaaaaatgttacagacaacttgcctgatttttaaatgagcgtaaaaggccctctaacctatgcaggtttccccattatgcatatagaaaatgctagtatgttttgctcacttcatatgtaacaggtgcccttatgttgtgctgtatcctgtgctttttctgtgggaccattccattcaggagcaaagagcaccatgattccaatcttgtgtgtgtttactaacccttccctgaggtttgtgtatgttggatattgtggtgttttagatcactgagtgtacagaagagagaaattcaaacaaaatattgctgttcttcagttttgtttgtggaatttgaaattactcaaatttaaaataaattactggactgtggaaataacatagaattgaagttttaattaaataccactcaaacgaaaagaacagtagtttttgtagttttatattggatactgaggcattagggaggcatgaaaggaagaggaatgaggattgagacatgtgaagacattgtgcattatatcaatgtgcattcctgtagttcattaacaaggtacatgcaatagtctaaagaaccagagtcactactatagtggcttaacatttaatctgtctccaatattttaaccaagtgacaccgaggtttttatcgaagcatttcacttaaatgaacaaatcatggctgttatattaacttgaaataaaatatatttaaacatgta

SEQ ID NO: 414864 - DNA, 3140 bp, Homo sapiens
acatcatagaggatcccccttcgaaacccagtagcaatgagctgtttgaagaagcatttgccattttccggaaatttgatgtcaatacttcagcagttcaggtcttaattgagcatattggaaacttggatcgggcatatgagtttgctgaacgttgcaatgaacctgcggtctggagtcaacttgcaaaagcccagttgcagaaaggaatggtgaaagaagccattgattcttatatcaaagcagatgatccttcctcctacatggaagttgttcaggctgccaatactagtggaaactgggaagaactggtgaagtacttgcagatggcccgtaagaaggctcgagagtcctatgtggagacagaactgatattcgcactggctaaaacaaaccgccttgcagagttagaagaatttatcaatggaccaaataatgctcatatccaacaagttggtgaccgttgttatgatgaaaaaatgtatgatgctgctaagttgttgtacaataatgtttccaattttggacgtttggcatctaccctggttcacctgggtgaatatcaggcagctgttgatggggctaggaaagctaacagtactcgaacatggaaagaggtctgcttcgcctgtgtagatgggaaagaattccgtcttgctcagatgtgtggacttcatattgttgtacatgcagatgaattagaagaacttatcaactactatcaggatcgtggctattttgaagagctgatcaccatgttggaagcagcactgggacttgagcgagctcacatgggaatgtttactgaattagctattctatactctaaatttaagcctcagaaaatgagggagcacctggagctgttctggtctagagtgaatattcccaaggtgctaagagctgcagaacaagctcatctttgggcagaactggtgtttttgtatgacaagtatgaagaatatgataatgccataattaccatgatgaatcatccaactgatgcctggaaagaagggcaattcaaagatatcattaccaaggttgccaatgtggaactatactacagagcaatacagttctacttagaattcaagcctctgttgttaaatgatttgctgatggtgctgtctccacggttggatcacactcgtgcagtcaattatttcagcaaggttaaacagctaccactggtgaaaccgtatttgcgttcagttcagaaccataacaacaaatctgtgaatgaatcattgaacaatctttttattacagaagaagattatcaggctctgcgaacatcaatagatgcttatgacaactttgacaatatctcgcttgctcagcgtttggaaaaacatgaactcattgagttcaggagaattgctgcttatctcttcaaaggcaacaatcgctggaaacagagtgtagagctgtgcaagaaagacagcctttacaaggatgcaatgcagtatgcttctgaatctaaagatactgaattggctgaagaactcctgcagtggtttttgcaggaagaaaaaagagagtgctttggagcttgtctgtttacctgttacgatcttttaaggccagatgtcgtcctagaaactgcatggaggcacaatatcatggattttgccatgccctatttcatccaggtcatgaaggagtacttgacaaaggtggataaattagatgcttcagaatcactgagaaaagaagaagaacaagctacagagacacaacccattgtttatggtcagccccagttgatgctgacagcaggacccagtgttgccgtccctccccaggcaccttttggttatggttataccgcaccaccgtatggacagccacagcctggctttgggtacagcatgtgagatgaagcgctgatcctgtagtcacctattttcgtactgaaacatcgtctttacccacttctcagtttataatgggggaaaacaggcaacgtgttcttgtaacctttatttcatgaaggacttctttttgtttctaactataaacttggatcacctatgttaaaaccttatttcacattccacatcattttagaatttattttcgaaggggaatagtttcaatgttttattcacttgggctttttttcttccccctctttctttaaagaactgctcaatattcaatctgttgtgaagaacctgatttgcactctgtagtgtttaaagaaacaaagaaactctaatattgaatctcttaaatttagtgtatgtaaacagcttacaaatacgtattgtctaaatgcatttaaatctgttttattcaaagaaaagctaaagcaaaaacactggcatatgaccatgcaagactgtcagtgccaacaaagacaacactaatcagcacatcgtacactggattgcagtgcttcccagattattgaaaaatgttacagacaacttgcctgatttttaaatgagcgtaaaaggccctctaacctatgcaggtttccccattatgcatatagaaaatgctagtatgttttgctcacttcatatgtaacaggtgcccttatgttgtgctgtatcctgtgctttttctgtgggaccattccattcaggagcaaagagcaccatgattccaatcttgtgtgtgtttactaacccttccctgaggtttgtgtatgttggatattgtggtgttttagatcactgagtgtacagaagagagaaattcaaacaaaatattgctgttcttcagttttgtttgtggaatttgaaattactcaaatttaaaataaattactggactgtggaaataacatagaattgaagttttaattaaataccactcaaacgaaaagaacagtagtttttgtagttttatattggatactgaggcattagggaggcatgaaaggaagaggaatgaggattgagacatgtgaagacattgtgcattatatcaatgtgcattcctgtagttcattaacaaggtacatgcaatagtctaaagaaccagagtcactactatagtggcttaacatttaatctgtctccaatattttaaccaagtgacaccgaggtttttatcgaagcatttcacttaaatgaacaaatcatggctgttatattaacttgaaataaaatatatttaaacatgta

SEQ ID NO: 414865 - DNA, 6886 bp, Homo sapiens
  misc_feature (5127)..(5127): n is a, c, g, or t
cagccgtttccggagtctgcgctgcgcccggttccgccattgcggctctcctggcccctggagcctccgcccccgacccgagctctttcgtctgcctgccagtttcctgcgtccccggagaggatcctgctgagcccagcctcccccctccccttctcctcctctcccttggagagcccgggcagccactgccccgcagccccagtgacaggaggagaccataacccccgacagcgccatggcccagattctgccaattcgttttcaggagcatctccagctccagaacctgggtatcaacccagcaaacattggcttcagtaccctgactatggagtctgacaaattcatctgcattagagaaaaagtaggagagcaggcccaggtggtaatcattgatatgaatgacccaagtaatccaattcgaagaccaatttcagcagacagcgccatcatgaatccagctagcaaagtaattgcactgaaagctgggaaaactcttcagatttttaacattgaaatgaaaagtaaaatgaaggctcataccatgactgatgatgtcaccttttggaaatggatctctttgaatacggttgctcttgttacggataatgcagtttatcactggagtatggaaggagagtctcagccagtgaaaatgtttgatcgccattctagccttgcagggtgccagattatcaattaccgtacagatgcaaaacaaaagtggttacttctgactggtatatctgcacagcaaaatcgtgtggtgggagctatgcagctatattctgtagataggaaagtgtctcagcccattgaaggacatgcagctagctttgcacagtttaagatggaaggaaatgcagaagaatcaacgttattttgttttgcagttcggggccaagctggagggaagttacatattattgaagttggcacaccacctacagggaaccagccctttccaaagaaggcagtggatgtcttctttcctccagaagcacaaaatgattttcctgttgcaatgcagatcagtgaaaagcatgatgtggtgttcttgataaccaagtatggttatatccacctctatgatcttgagactggtacctgcatctacatgaatagaatcagtggagaaacaatttttgttactgcacctcatgaagccacagctggaataattggagtaaacagaaagggacaagttctgtcagtgtgtgtggaagaagaaaacataattccttacatcaccaatgttctacaaaatcctgatttggctctgagaatggctgtacgtaataacttagccggtgctgaagaactctttgcccggaaatttaatgctctttttgcccagggaaattactcggaggcagcaaaggtggctgctaatgcaccaaagggaattcttcgtactccagacactatccgtcggttccagagtgtcccagcccagccaggtcaaacttctcctctacttcagtactttggtatccttttggaccagggacagctcaacaaatacgaatccttagagctttgtaggcctgtacttcagcaagggcgaaaacagcttttggagaaatggttaaaagaagataagctggaatgttctgaagaactgggtgatcttgtgaaatctgtggaccctacattggcacttagtgtgtacctaagggctaacgtcccaaataaagtcattcagtgctttgcagaaacaggtcaagtccaaaagattgttttatatgctaaaaaagttggatacactccagattggatatttctgctgagaaatgtaatgcgaatcagtccagatcagggacagcagtttgcccaaatgttagttcaagatgaagagcctcttgctgacatcacacagattgtagatgtctttatggaatacaatctaattcagcagtgtactgcattcttgcttgatgctctgaagaataatcgcccatctgaaggtcctttacagacgcggttacttgagatgaaccttatgcatgcgcctcaagttgcagatgctattctaggcaatcagatgttcacacattatgaccgggctcatattgctcaactgtgtgaaaaggctggcctactgcagcgtgcattagaacatttcactgatttatatgatataaaacgtgcagtggttcacacccatcttcttaaccctgagtggttagtcaactactttggttccttatcagtagaagactccctagaatgtctcagagccatgctgtctgccaacatccgtcagaatctgcagatttgtgttcaggtggcttctaaatatcatgaacaactgtcaactcagtctctgattgaactttttgaatctttcaagagttttgaaggtctcttttattttctgggatccattgttaactttagccaggacccagatgtgcactttaaatatattcaggcagcttgcaagactgggcaaatcaaagaagtagaaagaatctgtagagaaagcaactgctacgatcctgagcgagtcaagaattttcttaaggaagcaaaactaacagatcagctaccacttatcattgtgtgtgatcgatttgactttgtccatgatttggtgctctatttatatagaaataatcttcaaaagtatatagagatatatgtacagaaggtgaatccaagtcgacttcctgtagttattggaggattacttgatgttgactgttctgaagatgtcataaaaaacttgattcttgttgtaagaggtcaattctctactgatgagcttgttgctgaggttgaaaaaagaaacagattgaaactgcttctgccttggctagaggccagaattcatgagggctgtgaggagcctgctactcacaatgccttagccaaaatctacatagacagtaataacaacccggagagatttcttcgtgaaaatccctactatgacagtcgcgttgttggaaagtattgtgagaagagagatccacatctggcctgtgttgcttatgaacgtggccaatgtgatctggaacttattaatgtttgcaatgagaattccctcttcaaaagtctttctcgctacctggtacgtcgaaaggatccagaattgtggggcagcgtgctgctggaaagcaatccttacaggagacccctaattgaccaggttgtacaaacagctttgtctgagactcaggaccctgaagaagtgtcagtaactgtaaaggctttcatgactgcagaccttcctaatgaactcattgaactgctggagaaaattgtccttgataactctgtattcagtgaacacaggaatctgcaaaacctccttatcctcactgcaattaaggctgaccgtacacgtgttatggagtatattaaccgcctggataattatgatgccccagatattgccaatatcgccatcagcaatgagctgtttgaagaagcatttgccattttccggaaatttgatgtcaatacttcagcagttcaggtcttaattgagcatattggaaacttggatcgggcatatgagtttgctgaacgttgcaatgaacctgcggtctggagtcaacttgcaaaagcccagttgcagaaaggaatggtgaaagaagccattgattcttatatcaaagcagatgatccttcctcctacatggaagttgttcaggctgccaatactagtggaaactgggaagaactggtgaagtacttgcagatggcccgtaagaaggctcgagagtcctatgtggagacagaactgatattcgcactggctaaaacaaaccgccttgcagagttagaagaatttatcaatggaccaaataatgctcatatccaacaagttggtgaccgttgttatgatgaaaaaatgtatgatgctgctaagttgttgtacaataatgtttccaattttggacgtttggcatctaccctggttcacctgggtgaatatcaggcagctgttgatggggctaggaaagctaacagtactcgaacatggaaagaggtctgcttcgcctgtgtagatgggaaagaattccgtcttgctcagatgtgtggacttcatattgttgtacatgcagatgaattagaagaacttatcaactactatcaggatcgtggctattttgaagagctgatcaccatgttggaagcagcactgggacttgagcgagctcacatgggaatgtttactgaattagctattctatactctaaatttaagcctcagaaaatgagggagcacctggagctgttctggtctagagtgaatattcccaaggtgctaagagctgcagaacaagctcatctttgggcagaactggtgtttttgtatgacaagtatgaagaatatgataatgccataattaccatgatgaatcatccaactgatgcctggaaagaagggcaattcaaagatatcattaccaaggttgccaatgtggaactatactacagagcaatacagttctacttagaattcaagcctctgttgttaaatgatttgctgatggtgctgtctccacggttggatcacactcgtgcagtcaattatttcagcaaggttaaacagctaccactggtgaaaccgtatttgcgttcagttcagaaccataacaacaaatctgtgaatgaatcattgaacaatctttttattacagaagaagattatcaggctctgcgaacatcaatagatgcttatgacaactttgacaatatctcgcttgctcagcgtttggaaaaacatgaactcattgagttcaggagaattgctgcttatctcttcaaaggcaacaatcgctggaaacagagtgtagagctgtgcaagaaagacagcctttacaaggttgataaagttgcggggcaggggctgttttaaaccaggcctaaaatggtgttacaagtgattataatctataaataaaagtattggttttgtgaatatgagagctgactttaaggcaatttaagttaatggatttcttgattctaggggctctcttatgttaaggtcaaacttgtctggggaaaaaaaagcttttagcttatctcttctttgaaaattttaatttaaatgatacaactaggaggcttttttccccttgcaaaaccagatttatattggaaagnttccattgtttttcttggtttactagttcagtatgtggggtctaatgtttttgactttcactatttctttgaataggatgcaatgcagtatgcttctgaatctaaagatactgaattggctgaagaactcctgcagtggtttttgcaggaagaaaaaagagagtgctttggagcttgtctgtttacctgttacgatcttttaaggccagatgtcgtcctagaaactgcatggaggcacaatatcatggattttgccatgccctatttcatccaggtcatgaaggagtacttgacaaaggtggataaattagatgcttcagaatcactgagaaaagaagaagaacaagctacagagacacaacccattgtttatggtcagccccagttgatgctgacagcaggacccagtgttgccgtccctccccaggcaccttttggttatggttataccgcaccaccgtatggacagccacagcctggctttgggtacagcatgtgagatgaagcgctgatcctgtagtcacctattttcgtactgaaacatcgtctttacccacttctcagtttataatgggggaaaacaggcaacgtgttcttgtaacctttatttcatgaaggacttctttttgtttctaactataaacttggatcacctatgttaaaaccttatttcacattccacatcattttagaatttattttcgaaggggaatagtttcaatgttttattcacttgggctttttttcttccccctctttctttaaagaactgctcaatattcaatctgttgtgaagaacctgatttgcactctgtagtgtttaaagaaacaaagaaactctaatattgaatctcttaaatttagtgtatgtaaacagcttacaaatacgtattgtctaaatgcatttaaatctgttttattcaaagaaaagctaaagcaaaaacactggcatatgaccatgcaagactgtcagtgccaacaaagacaacactaatcagcacatcgtacactggattgcagtgcttcccagattattgaaaaatgttacagacaacttgcctgatttttaaatgagcgtaaaaggccctctaacctatgcaggtttccccattatgcatatagaaaatgctagtatgttttgctcacttcatatgtaacaggtgcccttatgttgtgctgtatcctgtgctttttctgtgggaccattccattcaggagcaaagagcaccatgattccaatcttgtgtgtgtttactaacccttccctgaggtttgtgtatgttggatattgtggtgttttagatcactgagtgtacagaagagagaaattcaaacaaaatattgctgttcttcagttttgtttgtggaatttgaaattactcaaatttaaaataaattactggactgtggaaataacatagaattgaagttttaattaaataccactcaaacgaaaagaacagtagtttttgtagttttatattggatactgaggcattagggaggcatgaaaggaagaggaatgaggattgagacatgtgaagacattgtgcattatatcaatgtgcattcctgtagttcattaacaaggtacatgcaatagtctaaagaaccagagtcactactatagtggcttaacatttaatctgtctccaatattttaaccaagtgacaccgaggtttttatcgaagcatttcacttaaatgaacaaatcatggctgttatattaacttgaaataaaatatatttaaacatgta

SEQ ID NO: 414866 - DNA, 2862 bp, Homo sapiens
cctacactagtgtcactgccatcacatgtgacactgacactggtaatcactcaatgccgtagaaggcctcaatcctatgtggagacagaactgatattcgcactggctaaaacaaaccgccttgcagagttagaagaatttatcaatggaccaaataatgctcatatccaacaagttggtgaccgttgttatgatgaaaaaatgtatgatgctgctaagttgttgtacaataatgtttccaattttggacgtttggcatctaccctggttcacctgggtgaatatcaggcagctgttgatggggctaggaaagctaacagtactcgaacatggaaagaggtctgcttcgcctgtgtagatgggaaagaattccgtcttgctcagatgtgtggacttcatattgttgtacatgcagatgaattagaagaacttatcaactactatcaggatcgtggctattttgaagagctgatcaccatgttggaagcagcactgggacttgagcgagctcacatgggaatgtttactgaattagctattctatactctaaatttaagcctcagaaaatgagggagcacctggagctgttctggtctagagtgaatattcccaaggtgctaagagctgcagaacaagctcatctttgggcagaactggtgtttttgtatgacaagtatgaagaatatgataatgccataattaccatgatgaatcatccaactgatgcctggaaagaagggcaattcaaagatatcattaccaaggttgccaatgtggaactatactacagagcaatacagttctacttagaattcaagcctctgttgttaaatgatttgctgatggtgctgtctccacggttggatcacactcgtgcagtcaattatttcagcaaggttaaacagctaccactggtgaaaccgtatttgcgttcagttcagaaccataacaacaaatctgtgaatgaatcattgaacaatctttttattacagaagaagattatcaggctctgcgaacatcaatagatgcttatgacaactttgacaatatctcgcttgctcagcgtttggaaaaacatgaactcattgagttcaggagaattgctgcttatctcttcaaaggcaacaatcgctggaaacagagtgtagagctgtgcaagaaagacagcctttacaaggatgcaatgcagtatgcttctgaatctaaagatactgaattggctgaagaactcctgcagtggtttttgcaggaagaaaaaagagagtgctttggagcttgtctgtttacctgttacgatcttttaaggccagatgtcgtcctagaaactgcatggaggcacaatatcatggattttgccatgccctatttcatccaggtcatgaaggagtacttgacaaaggtggataaattagatgcttcagaatcactgagaaaagaagaagaacaagctacagagacacaacccattgtttatggtcagccccagttgatgctgacagcaggacccagtgttgccgtccctccccaggcaccttttggttatggttataccgcaccaccgtatggacagccacagcctggctttgggtacagcatgtgagatgaagcgctgatcctgtagtcacctattttcgtactgaaacatcgtctttacccacttctcagtttataatgggggaaaacaggcaacgtgttcttgtaacctttatttcatgaaggacttctttttgtttctaactataaacttggatcacctatgttaaaaccttatttcacattccacatcattttagaatttattttcgaaggggaatagtttcaatgttttattcacttgggctttttttcttccccctctttctttaaagaactgctcaatattcaatctgttgtgaagaacctgatttgcactctgtagtgtttaaagaaacaaagaaactctaatattgaatctcttaaatttagtgtatgtaaacagcttacaaatacgtattgtctaaatgcatttaaatctgttttattcaaagaaaagctaaagcaaaaacactggcatatgaccatgcaagactgtcagtgccaacaaagacaacactaatcagcacatcgtacactggattgcagtgcttcccagattattgaaaaatgttacagacaacttgcctgatttttaaatgagcgtaaaaggccctctaacctatgcaggtttccccattatgcatatagaaaatgctagtatgttttgctcacttcatatgtaacaggtgcccttatgttgtgctgtatcctgtgctttttctgtgggaccattccattcaggagcaaagagcaccatgattccaatcttgtgtgtgtttactaacccttccctgaggtttgtgtatgttggatattgtggtgttttagatcactgagtgtacagaagagagaaattcaaacaaaatattgctgttcttcagttttgtttgtggaatttgaaattactcaaatttaaaataaattactggactgtggaaataacatagaattgaagttttaattaaataccactcaaacgaaaagaacagtagtttttgtagttttatattggatactgaggcattagggaggcatgaaaggaagaggaatgaggattgagacatgtgaagacattgtgcattatatcaatgtgcattcctgtagttcattaacaaggtacatgcaatagtctaaagaaccagagtcactactatagtggcttaacatttaatctgtctccaatattttaaccaagtgacaccgaggtttttatcgaagcatttcacttaaatgaacaaatcatggctgttatattaacttgaaataaaatatatttaaacatgta

SEQ ID NO: 414867 - DNA, 6547 bp, Homo sapiens
cagccgtttccggagtctgcgctgcgcccggttccgccattgcggctctcctggcccctggagcctccgcccccgacccgagctctttcgtctgcctgccagtttcctgcgtccccggagaggatcctgctgagcccagcctcccccctccccttctcctcctctcccttggagagcccgggcagccactgccccgcagccccagtgacaggaggagaccataacccccgacagcgccatggcccagattctgccaattcgttttcaggagcatctccagctccagaacctgggtatcaacccagcaaacattggcttcagtaccctgactatggagtctgacaaattcatctgcattagagaaaaagtaggagagcaggcccaggtggtaatcattgatatgaatgacccaagtaatccaattcgaagaccaatttcagcagacagcgccatcatgaatccagctagcaaagtaattgcactgaaagctgggaaaactcttcagatttttaacattgaaatgaaaagtaaaatgaaggctcataccatgactgatgatgtcaccttttggaaatggatctctttgaatacggttgctcttgttacggataatgcagtttatcactggagtatggaaggagagtctcagccagtgaaaatgtttgatcgccattctagccttgcagggtgccagattatcaattaccgtacagatgcaaaacaaaagtggttacttctgactggtatatctgcacagcaaaatcgtgtggtgggagctatgcagctatattctgtagataggaaagtgtctcagcccattgaaggacatgcagctagctttgcacagtttaagatggaaggaaatgcagaagaatcaacgttattttgttttgcagttcggggccaagctggagggaagttacatattattgaagttggcacaccacctacagggaaccagccctttccaaagaaggcagtggatgtcttctttcctccagaagcacaaaatgattttcctgttgcaatgcagatcagtgaaaagcatgatgtggtgttcttgataaccaagtatggttatatccacctctatgatcttgagactggtacctgcatctacatgaatagaatcagtggagaaacaatttttgttactgcacctcatgaagccacagctggaataattggagtaaacagaaagggacaagttctgtcagtgtgtgtggaagaagaaaacataattccttacatcaccaatgttctacaaaatcctgatttggctctgagaatggctgtacgtaataacttagccggtgctgaagaactctttgcccggaaatttaatgctctttttgcccagggaaattactcggaggcagcaaaggtggctgctaatgcaccaaagggaattcttcgtactccagacactatccgtcggttccagagtgtcccagcccagccaggtcaaacttctcctctacttcagtactttggtatccttttggaccagggacagctcaacaaatacgaatccttagagctttgtaggcctgtacttcagcaagggcgaaaacagcttttggagaaatggttaaaagaagataagctggaatgttctgaagaactgggtgatcttgtgaaatctgtggaccctacattggcacttagtgtgtacctaagggctaacgtcccaaataaagtcattcagtgctttgcagaaacaggtcaagtccaaaagattgttttatatgctaaaaaagttggatacactccagattggatatttctgctgagaaatgtaatgcgaatcagtccagatcagggacagcagtttgcccaaatgttagttcaagatgaagagcctcttgctgacatcacacagattgtagatgtctttatggaatacaatctaattcagcagtgtactgcattcttgcttgatgctctgaagaataatcgcccatctgaaggtcctttacagacgcggttacttgagatgaaccttatgcatgcgcctcaagttgcagatgctattctaggcaatcagatgttcacacattatgaccgggctcatattgctcaactgtgtgaaaaggctggcctactgcagcgtgcattagaacatttcactgatttatatgatataaaacgtgcagtggttcacacccatcttcttaaccctgagtggttagtcaactactttggttccttatcagtagaagactccctagaatgtctcagagccatgctgtctgccaacatccgtcagaatctgcagatttgtgttcaggtggcttctaaatatcatgaacaactgtcaactcagtctctgattgaactttttgaatctttcaagagttttgaaggtctcttttattttctgggatccattgttaactttagccaggacccagatgtgcactttaaatatattcaggcagcttgcaagactgggcaaatcaaagaagtagaaagaatctgtagagaaagcaactgctacgatcctgagcgagtcaagaattttcttaaggaagcaaaactaacagatcagctaccacttatcattgtgtgtgatcgatttgactttgtccatgatttggtgctctatttatatagaaataatcttcaaaagtatatagagatatatgtacagaaggtgaatccaagtcgacttcctgtagttattggaggattacttgatgttgactgttctgaagatgtcataaaaaacttgattcttgttgtaagaggtcaattctctactgatgagcttgttgctgaggttgaaaaaagaaacagattgaaactgcttctgccttggctagaggccagaattcatgagggctgtgaggagcctgctactcacaatgccttagccaaaatctacatagacagtaataacaacccggagagatttcttcgtgaaaatccctactatgacagtcgcgttgttggaaagtattgtgagaagagagatccacatctggcctgtgttgcttatgaacgtggccaatgtgatctggaacttattaatgtttgcaatgagaattccctcttcaaaagtctttctcgctacctggtacgtcgaaaggatccagaattgtggggcagcgtgctgctggaaagcaatccttacaggagacccctaattgaccaggttgtacaaacagctttgtctgagactcaggaccctgaagaagtgtcagtaactgtaaaggctttcatgactgcagaccttcctaatgaactcattgaactgctggagaaaattgtccttgataactctgtattcagtgaacacaggaatctgcaaaacctccttatcctcactgcaattaaggctgaccgtacacgtgttatggagtatattaaccgcctggataattatgatgccccagatattgccaatatcgccatcagcaatgagctgtttgaagaagcatttgccattttccggaaatttgatgtcaatacttcagcagttcaggtcttaattgagcatattggaaacttggatcgggcatatgagtttgctgaacgttgcaatgaacctgcggtctggagtcaacttgcaaaagcccagttgcagaaaggaatggtgaaagaagccattgattcttatatcaaagcagatgatccttcctcctacatggaagttgttcaggctgccaatactagtggaaactgggaagaactggtgaagtacttgcagatggcccgtaagaaggctcgagagtcctatgtggagacagaactgatattcgcactggctaaaacaaaccgccttgcagagttagaagaatttatcaatggaccaaataatgctcatatccaacaagttggtgaccgttgttatgatgaaaaaatgtatgatgctgctaagttgttgtacaataatgtttccaattttggacgtttggcatctaccctggttcacctgggtgaatatcaggcagctgttgatggggctaggaaagctaacagtactcgaacatggaaagaggtctgcttcgcctgtgtagatgggaaagaattccgtcttgctcagatgtgtggacttcatattgttgtacatgcagatgaattagaagaacttatcaactactatcaggatcgtggctattttgaagagctgatcaccatgttggaagcagcactgggacttgagcgagctcacatgggaatgtttactgaattagctattctatactctaaatttaagcctcagaaaatgagggagcacctggagctgttctggtctagagtgaatattcccaaggtgctaagagctgcagaacaagctcatctttgggcagaactggtgtttttgtatgacaagtatgaagaatatgataatgccataattaccatgatgaatcatccaactgatgcctggaaagaagggcaattcaaagatatcattaccaaggttgccaatgtggaactatactacagagcaatacagttctacttagaattcaagcctctgttgttaaatgatttgctgatggtgctgtctccacggttggatcacactcgtgcagtcaattatttcagcaaggttaaacagctaccactggtgaaaccgtatttgcgttcagttcagaaccataacaacaaatctgtgaatgaatcattgaacaatctttttattacagaagaagattatcaggctctgcgaacatcaatagatgcttatgacaactttgacaatatctcgcttgctcagcgtttggaaaaacatgaactcattgagttcaggagaattgctgcttatctcttcaaaggcaacaatcgctggaaacagagtgtagagctgtgcaagaaagacagcctttacaaggatgcaatgcagtatgcttctgaatctaaagatactgaattggctgaagaactcctgcagtggtttttgcaggaagaaaaaagagagtgctttggagcttgtctgtttacctgttacgatcttttaaggccagatgtcgtcctagaaactgcatggaggcacaatatcatggattttgccatgccctatttcatccaggtcatgaaggagtacttgacaaaggttgatgcaataaaggaaaaggtggataaattagatgcttcagaatcactgagaaaagaagaagaacaagctacagagacacaacccattgtttatggtcagccccagttgatgctgacagcaggacccagtgttgccgtccctccccaggcaccttttggttatggttataccgcaccaccgtatggacagccacagcctggctttgggtacagcatgtgagatgaagcgctgatcctgtagtcacctattttcgtactgaaacatcgtctttacccacttctcagtttataatgggggaaaacaggcaacgtgttcttgtaacctttatttcatgaaggacttctttttgtttctaactataaacttggatcacctatgttaaaaccttatttcacattccacatcattttagaatttattttcgaaggggaatagtttcaatgttttattcacttgggctttttttcttccccctctttctttaaagaactgctcaatattcaatctgttgtgaagaacctgatttgcactctgtagtgtttaaagaaacaaagaaactctaatattgaatctcttaaatttagtgtatgtaaacagcttacaaatacgtattgtctaaatgcatttaaatctgttttattcaaagaaaagctaaagcaaaaacactggcatatgaccatgcaagactgtcagtgccaacaaagacaacactaatcagcacatcgtacactggattgcagtgcttcccagattattgaaaaatgttacagacaacttgcctgatttttaaatgagcgtaaaaggccctctaacctatgcaggtttccccattatgcatatagaaaatgctagtatgttttgctcacttcatatgtaacaggtgcccttatgttgtgctgtatcctgtgctttttctgtgggaccattccattcaggagcaaagagcaccatgattccaatcttgtgtgtgtttactaacccttccctgaggtttgtgtatgttggatattgtggtgttttagatcactgagtgtacagaagagagaaattcaaacaaaatattgctgttcttcagttttgtttgtggaatttgaaattactcaaatttaaaataaattactggactgtggaaataacatagaattgaagttttaattaaataccactcaaacgaaaagaacagtagtttttgtagttttatattggatactgaggcattagggaggcatgaaaggaagaggaatgaggattgagacatgtgaagacattgtgcattatatcaatgtgcattcctgtagttcattaacaaggtacatgcaatagtctaaagaaccagagtcactactatagtggcttaacatttaatctgtctccaatattttaaccaagtgacaccgaggtttttatcgaagcatttcacttaaatgaacaaatcatggctgttatattaacttgaaataaaatatatttaaacatgta

SEQ ID NO: 414868 - DNA, 6483 bp, Homo sapiens
cagccgtttccggagtctgcgctgcgcccggttccgccattgcggctctcctggcccctggagcctccgcccccgacccgagctctttcgtctgcctgccagtttcctgcgtccccggagaggatcctgctgagcccagcctcccccctccccttctcctcctctcccttggagagcccgggcagccactgccccgcagccccagtgacaggaggagaccataacccccgacagcgccatggcccagattctgccaattcgttttcaggagcatctccagctccagaacctgggtatcaacccagcaaacattggcttcagtaccctgactatggagtctgacaaattcatctgcattagagaaaaagtaggagagcaggcccaggtggtaatcattgatatgaatgacccaagtaatccaattcgaagaccaatttcagcagacagcgccatcatgaatccagctagcaaagtaattgcactgaaagctgggaaaactcttcagatttttaacattgaaatgaaaagtaaaatgaaggctcataccatgactgatgatgtcaccttttggaaatggatctctttgaatacggttgctcttgttacggataatgcagtttatcactggagtatggaaggagagtctcagccagtgaaaatgtttgatcgccattctagccttgcagggtgccagattatcaattaccgtacagatgcaaaacaaaagtggttacttctgactggtatatctgcacagcaaaatcgtgtggtgggagctatgcagctatattctgtagataggaaagtgtctcagcccattgaaggacatgcagctagctttgcacagtttaagatggaaggaaatgcagaagaatcaacgttattttgttttgcagttcggggccaagctggagggaagttacatattattgaagttggcacaccacctacagggaaccagccctttccaaagaaggcagtggatgtcttctttcctccagaagcacaaaatgattttcctgttgcaatgcagatcagtgaaaagcatgatgtggtgttcttgataaccaagtatggttatatccacctctatgatcttgagactggtacctgcatctacatgaatagaatcagtggagaaacaatttttgttactgcacctcatgaagccacagctggaataattggagtaaacagaaagggacaagttctgtcagtgtgtgtggaagaagaaaacataattccttacatcaccaatgttctacaaaatcctgatttggctctgagaatggctgtacgtaataacttagccggtgctgaagaactctttgcccggaaatttaatgctctttttgcccagggaaattactcggaggcagcaaaggtggctgctaatgcaccaaagggaattcttcgtactccagacactatccgtcggttccagagtgtcccagcccagccaggtcaaacttctcctctacttcagtactttggtatccttttggaccagggacagctcaacaaatacgaatccttagagctttgtaggcctgtacttcagcaagggcgaaaacagcttttggagaaatggttaaaagaagataagctggaatgttctgaagaactgggtgatcttgtgaaatctgtggaccctacattggcacttagtgtgtacctaagggctaacgtcccaaataaagtcattcagtgctttgcagaaacaggtcaagtccaaaagattgttttatatgctaaaaaagttggatacactccagattggatatttctgctgagaaatgtaatgcgaatcagtccagatcagggacagcagtttgcccaaatgttagttcaagatgaagagcctcttgctgacatcacacagattgtagatgtctttatggaatacaatctaattcagcagtgtactgcattcttgcttgatgctctgaagaataatcgcccatctgaaggtcctttacagacgcggttacttgagatgaaccttatgcatgcgcctcaagttgcagatgctattctaggcaatcagatgttcacacattatgaccgggctcatattgctcaactgtgtgaaaaggctggcctactgcagcgtgcattagaacatttcactgatttatatgatataaaacgtgcagtggttcacacccatcttcttaaccctgagtggttagtcaactactttggttccttatcagtagaagactccctagaatgtctcagagccatgctgtctgccaacatccgtcagaatctgcagatttgtgttcaggtggcttctaaatatcatgaacaactgtcaactcagtctctgattgaactttttgaatctttcaagagttttgaaggtctcttttattttctgggatccattgttaactttagccaggacccagatgtgcactttaaatatattcaggcagcttgcaagactgggcaaatcaaagaagtagaaagaatctgtagagaaagcaactgctacgatcctgagcgagtcaagaattttcttaaggaagcaaaactaacagatcagctaccacttatcattgtgtgtgatcgatttgactttgtccatgatttggtgctctatttatatagaaataatcttcaaaagtatatagagatatatgtacagaaggtgaatccaagtcgacttcctgtagttattggaggattacttgatgttgactgttctgaagatgtcataaaaaacttgattcttgttgtaagaggtcaattctctactgatgagcttgttgctgaggttgaaaaaagaaacagattgaaactgcttctgccttggctagaggccagaattcatgagggctgtgaggagcctgctactcacaatgccttagccaaaatctacatagacagtaataacaacccggagagatttcttcgtgaaaatccctactatgacagtcgcgttgttggaaagtattgtgagaagagagatccacatctggcctgtgttgcttatgaacgtggccaatgtgatctggaacttattaatgtttgcaatgagaattccctcttcaaaagtctttctcgctacctggtacgtcgaaaggatccagaattgtggggcagcgtgctgctggaaagcaatccttacaggagacccctaattgaccaggttgtacaaacagctttgtctgagactcaggaccctgaagaagtgtcagtaactgtaaaggctttcatgactgcagaccttcctaatgaactcattgaactgctggagaaaattgtccttgataactctgtattcagtgaacacaggaatctgcaaaacctccttatcctcactgcaattaaggctgaccgtacacgtgttatggagtatattaaccgcctggataattatgatgccccagatattgccaatatcgccatcagcaatgagctgtttgaagaagcatttgccattttccggaaatttgatgtcaatacttcagcagttcaggtcttaattgagcatattggaaacttggatcgggcatatgagtttgctgaacgttgcaatgaacctgcggtctggagtcaacttgcaaaagcccagttgcagaaaggaatggtgaaagaagccattgattcttatatcaaagcagatgatccttcctcctacatggaagttgttcaggctgccaatactagtggaaactgggaagaactggtgaagtacttgcagatggcccgtaagaaggctcgagagtcctatgtggagacagaactgatattcgcactggctaaaacaaaccgccttgcagagttagaagaatttatcaatggaccaaataatgctcatatccaacaagttggtgaccgttgttatgatgaaaaaatgtatgatgctgctaagttgttgtacaataatgtttccaattttggacgtttggcatctaccctggttcacctgggtgaatatcaggcagctgttgatggggctaggaaagctaacagtactcgaacatggaaagaggtctgcttcgcctgtgtagatgggaaagaattccgtcttgctcagatgtgtggacttcatattgttgtacatgcagatgaattagaagaacttatcaactactatcaggatcgtggctattttgaagagctgatcaccatgttggaagcagcactgggacttgagcgagctcacatgggaatgtttactgaattagctattctatactctaaatttaagcctcagaaaatgagggagcacctggagctgttctggtctagagtgaatattcccaaggtgctaagagctgcagaacaagctcatctttgggcagaactggtgtttttgtatgacaagtatgaagaatatgataatgccataattaccatgatgaatcatccaactgatgcctggaaagaagggcaattcaaagatatcattaccaaggttgccaatgtggaactatactacagagcaatacagttctacttagaattcaagcctctgttgttaaatgatttgctgatggtgctgtctccacggttggatcacactcgtgcagtcaattatttcagcaaggttaaacagctaccactggtgaaaccgtatttgcgttcagttcagaaccataacaacaaatctgtgaatgaatcattgaacaatctttttattacagaagaagattatcaggctctgcgaacatcaatagatgcttatgacaactttgacaatatctcgcttgctcagcgtttggaaaaacatgaactcattgagttcaggagaattgctgcttatctcttcaaaggcaacaatcgctggaaacagagtgtagagctgtgcaagaaagacagcctttacaaggatgcaatgcagtatgcttctgaatctaaagatactgaattggctgaagaactcctgcagtggtttttgcaggaagaaaaaagagagtgctttggagcttgtctgtttacctgttacgatcttttaaggccagatgtcgtcctagaaactgcatggaggcacaatatcatggattttgccatgccctatttcatccaggtcatgaaggagtacttgacaaaggtggataaattagatgcttcagaatcactgagagtcagccccagttgatgctgacagcaggacccagtgttgccgtccctccccaggcaccttttggttatggttataccgcaccaccgtatggacagccacagcctggctttgggtacagcatgtgagatgaagcgctgatcctgtagtcacctattttcgtactgaaacatcgtctttacccacttctcagtttataatgggggaaaacaggcaacgtgttcttgtaacctttatttcatgaaggacttctttttgtttctaactataaacttggatcacctatgttaaaaccttatttcacattccacatcattttagaatttattttcgaaggggaatagtttcaatgttttattcacttgggctttttttcttccccctctttctttaaagaactgctcaatattcaatctgttgtgaagaacctgatttgcactctgtagtgtttaaagaaacaaagaaactctaatattgaatctcttaaatttagtgtatgtaaacagcttacaaatacgtattgtctaaatgcatttaaatctgttttattcaaagaaaagctaaagcaaaaacactggcatatgaccatgcaagactgtcagtgccaacaaagacaacactaatcagcacatcgtacactggattgcagtgcttcccagattattgaaaaatgttacagacaacttgcctgatttttaaatgagcgtaaaaggccctctaacctatgcaggtttccccattatgcatatagaaaatgctagtatgttttgctcacttcatatgtaacaggtgcccttatgttgtgctgtatcctgtgctttttctgtgggaccattccattcaggagcaaagagcaccatgattccaatcttgtgtgtgtttactaacccttccctgaggtttgtgtatgttggatattgtggtgttttagatcactgagtgtacagaagagagaaattcaaacaaaatattgctgttcttcagttttgtttgtggaatttgaaattactcaaatttaaaataaattactggactgtggaaataacatagaattgaagttttaattaaataccactcaaacgaaaagaacagtagtttttgtagttttatattggatactgaggcattagggaggcatgaaaggaagaggaatgaggattgagacatgtgaagacattgtgcattatatcaatgtgcattcctgtagttcattaacaaggtacatgcaatagtctaaagaaccagagtcactactatagtggcttaacatttaatctgtctccaatattttaaccaagtgacaccgaggtttttatcgaagcatttcacttaaatgaacaaatcatggctgttatattaacttgaaataaaatatatttaaacatgta

SEQ ID NO: 414869 - DNA, 6225 bp, Homo sapiens
  misc_feature (6192)..(6192): n is a, c, g, or t
cagccgtttccggagtctgcgctgcgcccggttccgccattgcggctctcctggcccctggagcctccgcccccgacccgagctctttcgtctgcctgccagtttcctgcgtccccggagaggatcctgctgagcccagcctcccccctccccttctcctcctctcccttggagagcccgggcagccactgccccgcagccccagtgacaggaggagaccataacccccgacagcgccatggcccagattctgccaattcgttttcaggagcatctccagctccagaacctgggtatcaacccagcaaacattggcttcagtaccctgactatggagtctgacaaattcatctgcattagagaaaaagtaggagagcaggcccaggtggtaatcattgatatgaatgacccaagtaatccaattcgaagaccaatttcagcagacagcgccatcatgaatccagctagcaaagtaattgcactgaaagctgggaaaactcttcagatttttaacattgaaatgaaaagtaaaatgaaggctcataccatgactgatgatgtcaccttttggaaatggatctctttgaatacggttgctcttgttacggataatgcagtttatcactggagtatggaaggagagtctcagccagtgaaaatgtttgatcgccattctagccttgcagggtgccagattatcaattaccgtacagatgcaaaacaaaagtggttacttctgactggtatatctgcacagcaaaatcgtgtggtgggagctatgcagctatattctgtagataggaaagtgtctcagcccattgaaggacatgcagctagctttgcacagtttaagatggaaggaaatgcagaagaatcaacgttattttgttttgcagttcggggccaagctggagggaagttacatattattgaagttggcacaccacctacagggaaccagccctttccaaagaaggcagtggatgtcttctttcctccagaagcacaaaatgattttcctgttgcaatgcagatcagtgaaaagcatgatgtggtgttcttgataaccaagtatggttatatccacctctatgatcttgagactggtacctgcatctacatgaatagaatcagtggagaaacaatttttgttactgcacctcatgaagccacagctggaataattggagtaaacagaaagggacaagttctgtcagtgtgtgtggaagaagaaaacataattccttacatcaccaatgttctacaaaatcctgatttggctctgagaatggctgtacgtaataacttagccggtgctgaagaactctttgcccggaaatttaatgctctttttgcccagggaaattactcggaggcagcaaaggtggctgctaatgcaccaaagggaattcttcgtactccagacactatccgtcggttccagagtgtcccagcccagccaggtcaaacttctcctctacttcagtactttggtatccttttggaccagggacagctcaacaaatacgaatccttagagctttgtaggcctgtacttcagcaagggcgaaaacagcttttggagaaatggttaaaagaagataagctggaatgttctgaagaactgggtgatcttgtgaaatctgtggaccctacattggcacttagtgtgtacctaagggctaacgtcccaaataaagtcattcagtgctttgcagaaacaggtcaagtccaaaagattgttttatatgctaaaaaagttggatacactccagattggatatttctgctgagaaatgtaatgcgaatcagtccagatcagggacagcagtttgcccaaatgttagttcaagatgaagagcctcttgctgacatcacacagattgtagatgtctttatggaatacaatctaattcagcagtgtactgcattcttgcttgatgctctgaagaataatcgcccatctgaaggtcctttacagacgcggttacttgagatgaaccttatgcatgcgcctcaagttgcagatgctattctaggcaatcagatgttcacacattatgaccgggctcatattgctcaactgtgtgaaaaggctggcctactgcagcgtgcattagaacatttcactgatttatatgatataaaacgtgcagtggttcacacccatcttcttaaccctgagtggttagtcaactactttggttccttatcagtagaagactccctagaatgtctcagagccatgctgtctgccaacatccgtcagaatctgcagatttgtgttcaggtggcttctaaatatcatgaacaactgtcaactcagtctctgattgaactttttgaatctttcaagagttttgaaggtctcttttattttctgggatccattgttaactttagccaggacccagatgtgcactttaaatatattcaggcagcttgcaagactgggcaaatcaaagaagtagaaagaatctgtagagaaagcaactgctacgatcctgagcgagtcaagaattttcttaaggaagcaaaactaacagatcagctaccacttatcattgtgtgtgatcgatttgactttgtccatgatttggtgctctatttatatagaaataatcttcaaaagtatatagagatatatgtacagaaggtgaatccaagtcgacttcctgtagttattggaggattacttgatgttgactgttctgaagatgtcataaaaaacttgattcttgttgtaagaggtcaattctctactgatgagcttgttgctgaggttgaaaaaagaaacagattgaaactgcttctgccttggctagaggccagaattcatgagggctgtgaggagcctgctactcacaatgccttagccaaaatctacatagacagtaataacaacccggagagatttcttcgtgaaaatccctactatgacagtcgcgttgttggaaagtattgtgagaagagagatccacatctggcctgtgttgcttatgaacgtggccaatgtgatctggaacttattaatgtttgcaatgagaattccctcttcaaaagtctttctcgctacctggtacgtcgaaaggatccagaattgtggggcagcgtgctgctggaaagcaatccttacaggagacccctaattgaccaggttgtacaaacagctttgtctgagactcaggaccctgaagaagtgtcagtaactgtaaaggctttcatgactgcagaccttcctaatgaactcattgaactgctggagaaaattgtccttgataactctgtattcagtgaacacaggaatctgcaaaacctccttatcctcactgcaattaaggctgaccgtacacgtgttatggagtatattaaccgcctggataattatgatgccccagatattgccaatatcgccatcagcaatgagctgtttgaagaagcatttgccattttccggaaatttgatgtcaatacttcagcagttcaggtcttaattgagcatattggaaacttggatcgggcatatgagtttgctgaacgttgcaatgaacctgcggtctggagtcaacttgcaaaagcccagttgcagaaaggaatggtgaaagaagccattgattcttatatcaaagcagatgatccttcctcctacatggaagttgttcaggctgccaatactagtggaaactgggaagaactggtgaagtacttgcagatggcccgtaagaaggctcgagagtcctatgtggagacagaactgatattcgcactggctaaaacaaaccgccttgcagagttagaagaatttatcaatggaccaaataatgctcatatccaacaagttggtgaccgttgttatgatgaaaaaatgtatgatgctgctaagttgttgtacaataatgtttccaattttggacgtttggcatctaccctggttcacctgggtgaatatcaggcagctgttgatggggctaggaaagctaacagtactcgaacatggaaagaggtctgcttcgcctgtgtagatgggaaagaattccgtcttgctcagatgtgtggacttcatattgttgtacatgcagatgaattagaagaacttatcaactactatcaggatcgtggctattttgaagagctgatcaccatgttggaagcagcactgggacttgagcgagctcacatgggaatgtttactgaattagctattctatactctaaatttaagcctcagaaaatgagggagcacctggagctgttctggtctagagtgaatattcccaaggtgctaagagctgcagaacaagctcatctttgggcagaactggtgtttttgtatgacaagtatgaagaatatgataatgccataattaccatgatgaatcatccaactgatgcctggaaagaagggcaattcaaagatatcattaccaaggttgccaatgtggaactatactacagagcaatacagttctacttagaattcaagcctctgttgttaaatgatttgctgatggtgctgtctccacggttggatcacactcgtgcagtcaattatttcagcaaggttaaacagctaccactggtgaaaccgtatttgcgttcagttcagaaccataacaacaaatctgtgaatgaatcattgaacaatctttttattacagaagaagattatcaggctctgcgaacatcaatagatgcttatgacaactttgacaatatctcgcttgctcagcgtttggaaaaacatgaactcattgagttcaggagaattgctgcttatctcttcaaaggcaacaatcgctggaaacagagtgtagagctgtgcaagaaagacagcctttacaaggatgcaatgcagtatgcttctgaatctaaagatactgaattggctgaagaactcctgcagtggtttttgcaggaagaaaaaagagagtgctttggagcttgtctgtttacctgttacgatcttttaaggccagatgtcgtcctagaaactgcatggaggcacaatatcatggattttgccatgccctatttcatccaggtcatgaaggagtacttgacaaaggtggataaattagatgcttcagaatcactgagaaaagaagaagaacaagctacagagacacaacccattgtttatggtcagccccagttgatgctgacagcaggacccagtgttgccgtccctccccaggcaccttttggttatggttataccgcaccaccgtatggacagccacagcctggctttgggtacagcatgtgagatgaagcgctgatcctgtagtcacctattttcgtactgaaacatcgtctttacccacttctcagtttataatgggggaaaacaggcaacgtgttcttgtaacctttatttcatgaaggacttctttttgtttctaactataaacttggatcacctatgttaaaaccttatttcacattccacatcattttagaatttattttcgaaggggaatagtttcaatgttttattcacttgggctttttttcttccccctctttctttaaagaactgctcaatattcaatctgttgtgaagaacctgatttgcactctgtagtgtttaaagaaacaaagaaactctaatattgaatctcttaaatttagtgtatgtaaacagcttacaaatacgtattgtctaaatgcatttaaatctgttttattcaaagaaaagctaaagcaaaaacactggcatatgaccatgcaagactgtcagtgccaacaaagacaacactaatcagcacatcgtacactggattgcagtgcttcccagattattgaaaaatgttacagacaacttgcctgatttttaaatgagcgtaaaaggccctctaacctatgcaggtttccccattatgcatatagaaaatgctagtatgttttgctcacttcatatgtaacaggtgcccttatgttgtgctgtatcctgtgctttttctgtgggaccattccattcaggagcaaagagcaccatgattccaatcttgtgtgtgtttactaacccttccctgaggtttgtgtatgttggatattgtggtgttttagatcactgagtgtacagaagagagaaattcaaacaaaatattgctgttcttcagttttgtttgtggaatttgaaattactcaaatttaaaataaattactggactgtgggacaaacacaacaanaacaaacccaataacaccaccagcgaaaaaaaa

SEQ ID NO: 414870 - DNA, 1707 bp, Homo sapiens
ggcggacctaagcagctatccaaggatgcaatgcagtatgcttctgaatctaaagatactgaattggctgaagaactcctgcagtggtttttgcaggaagaaaaaagagagtgctttggagcttgtctgtttacctgttacgatcttttaaggccagatgtcgtcctagaaactgcatggaggcacaatatcatggattttgccatgccctatttcatccaggtcatgaaggagtacttgacaaaggtggataaattagatgcttcagaatcactgagaaaagaagaagaacaagctacagagacacaacccattgtttatggtcagccccagttgatgctgacagcaggacccagtgttgccgtccctccccaggcaccttttggttatggttataccgcaccaccgtatggacagccacagcctggctttgggtacagcatgtgagatgaagcgctgatcctgtagtcacctattttcgtactgaaacatcgtctttacccacttctcagtttataatgggggaaaacaggcaacgtgttcttgtaacctttatttcatgaaggacttctttttgtttctaactataaacttggatcacctatgttaaaaccttatttcacattccacatcattttagaatttattttcgaaggggaatagtttcaatgttttattcacttgggctttttttcttccccctctttctttaaagaactgctcaatattcaatctgttgtgaagaacctgatttgcactctgtagtgtttaaagaaacaaagaaactctaatattgaatctcttaaatttagtgtatgtaaacagcttacaaatacgtattgtctaaatgcatttaaatctgttttattcaaagaaaagctaaagcaaaaacactggcatatgaccatgcaagactgtcagtgccaacaaagacaacactaatcagcacatcgtacactggattgcagtgcttcccagattattgaaaaatgttacagacaacttgcctgatttttaaatgagcgtaaaaggccctctaacctatgcaggtttccccattatgcatatagaaaatgctagtatgttttgctcacttcatatgtaacaggtgcccttatgttgtgctgtatcctgtgctttttctgtgggaccattccattcaggagcaaagagcaccatgattccaatcttgtgtgtgtttactaacccttccctgaggtttgtgtatgttggatattgtggtgttttagatcactgagtgtacagaagagagaaattcaaacaaaatattgctgttcttcagttttgtttgtggaatttgaaattactcaaatttaaaataaattactggactgtggaaataacatagaattgaagttttaattaaataccactcaaacgaaaagaacagtagtttttgtagttttatattggatactgaggcattagggaggcatgaaaggaagaggaatgaggattgagacatgtgaagacattgtgcattatatcaatgtgcattcctgtagttcattaacaaggtacatgcaatagtctaaagaaccagagtcactactatagtggcttaacatttaatctgtctccaatattttaaccaagtgacaccgaggtttttatcgaagcatttcacttaaatgaacaaatcatggctgttatattaacttgaaataaaatatatttaaacatgta

SEQ ID NO: 414871 - DNA, 6473 bp, Homo sapiens
cagccgtttccggagtctgcgctgcgcccggttccgccattgcggctctcctggcccctggagcctccgcccccgacccgagctctttcgtctgcctgccagtttcctgcgtccccggagaggatcctgctgagcccagcctcccccctccccttctcctcctctcccttggagagcccgggcagccactgccccgcagccccagtgacaggaggagaccataacccccgacagcgccatggcccagattctgccaattcgttttcaggagcatctccagctccagaacctgggtatcaacccagcaaacattggcttcagtaccctgactatggagtctgacaaattcatctgcattagagaaaaagtaggagagcaggcccaggtggtaatcattgatatgaatgacccaagtaatccaattcgaagaccaatttcagcagacagcgccatcatgaatccagctagcaaagtaattgcactgaaagctgggaaaactcttcagatttttaacattgaaatgaaaagtaaaatgaaggctcataccatgactgatgatgtcaccttttggaaatggatctctttgaatacggttgctcttgttacggataatgcagtttatcactggagtatggaaggagagtctcagccagtgaaaatgtttgatcgccattctagccttgcagggtgccagattatcaattaccgtacagatgcaaaacaaaagtggttacttctgactggtatatctgcacagcaaaatcgtgtggtgggagctatgcagctatattctgtagataggaaagtgtctcagcccattgaaggacatgcagctagctttgcacagtttaagatggaaggaaatgcagaagaatcaacgttattttgttttgcagttcggggccaagctggagggaagttacatattattgaagttggcacaccacctacagggaaccagccctttccaaagaaggcagtggatgtcttctttcctccagaagcacaaaatgattttcctgttgcaatgcagatcagtgaaaagcatgatgtggtgttcttgataaccaagtatggttatatccacctctatgatcttgagactggtacctgcatctacatgaatagaatcagtggagaaacaatttttgttactgcacctcatgaagccacagctggaataattggagtaaacagaaagggacaagttctgtcagtgtgtgtggaagaagaaaacataattccttacatcaccaatgttctacaaaatcctgatttggctctgagaatggctgtacgtaataacttagccggtgctgaagaactctttgcccggaaatttaatgctctttttgcccagggaaattactcggaggcagcaaaggtggctgctaatgcaccaaagggaattcttcgtactccagacactatccgtcggttccagagtgtcccagcccagccaggtcaaacttctcctctacttcagtactttggtatccttttggaccagggacagctcaacaaatacgaatccttagagctttgtaggcctgtacttcagcaagggcgaaaacagcttttggagaaatggttaaaagaagataagctggaatgttctgaagaactgggtgatcttgtgaaatctgtggaccctacattggcacttagtgtgtacctaagggctaacgtcccaaataaagtcattcagtgctttgcagaaacaggtcaagtccaaaagattgttttatatgctaaaaaagttggatacactccagattggatatttctgctgagaaatgtaatgcgaatcagtccagatcagggacagcagtttgcccaaatgttagttcaagatgaagagcctcttgctgacatcacacagattgtagatgtctttatggaatacaatctaattcagcagtgtactgcattcttgcttgatgctctgaagaataatcgcccatctgaaggtcctttacagacgcggttacttgagatgaaccttatgcatgcgcctcaagttgcagatgctattctaggcaatcagatgttcacacattatgaccgggctcatattgctcaactgtgtgaaaaggctggcctactgcagcgtgcattagaacatttcactgatttatatgatataaaacgtgcagtggttcacacccatcttcttaaccctgagtggttagtcaactactttggttccttatcagtagaagactccctagaatgtctcagagccatgctgtctgccaacatccgtcagaatctgcagatttgtgttcaggtggcttctaaatatcatgaacaactgtcaactcagtctctgattgaactttttgaatctttcaagagttttgaaggtctcttttattttctgggatccattgttaactttagccaggacccagatgtgcactttaaatatattcaggcagcttgcaagactgggcaaatcaaagaagtagaaagaatctgtagagaaagcaactgctacgatcctgagcgagtcaagaattttcttaaggaagcaaaactaacagatcagctaccacttatcattgtgtgtgatcgatttgactttgtccatgatttggtgctctatttatatagaaataatcttcaaaagtatatagagatatatgtacagaaggtgaatccaagtcgacttcctgtagttattggaggattacttgatgttgactgttctgaagatgtcataaaaaacttgattcttgttgtaagaggtcaattctctactgatgagcttgttgctgaggttgaaaaaagaaacagattgaaactgcttctgccttggctagaggccagaattcatgagggctgtgaggagcctgctactcacaatgccttagccaaaatctacatagacagtaataacaacccggagagatttcttcgtgaaaatccctactatgacagtcgcgttgttggaaagtattgtgagaagagagatccacatctggcctgtgttgcttatgaacgtggccaatgtgatctggaacttattaatgtttgcaatgagaattccctcttcaaaagtctttctcgctacctggtacgtcgaaaggatccagaattgtggggcagcgtgctgctggaaagcaatccttacaggagacccctaattgaccaggttgtacaaacagctttgtctgagactcaggaccctgaagaagtgtcagtaactgtaaaggctttcatgactgcagaccttcctaatgaactcattgaactgctggagaaaattgtccttgataactctgtattcagtgaacacaggaatctgcaaaacctccttatcctcactgcaattaaggctgaccgtacacgtgttatggagtatattaaccgcctggataattatgatgccccagatattgccaatatcgccatcagcaatgagctgtttgaagaagcatttgccattttccggaaatttgatgtcaatacttcagcagttcaggtcttaattgagcatattggaaacttggatcgggcatatgagtttgctgaacgttgcaatgaacctgcggtctggagtcaacttgcaaaagcccagttgcagaaaggaatggtgaaagaagccattgattcttatatcaaagcagatgatccttcctcctacatggaagttgttcaggctgccaatactagtggaaactgggaagaactggtgaagtacttgcagatggcccgtaagaaggctcgagagtcctatgtggagacagaactgatattcgcactggctaaaacaaaccgccttgcagagttagaagaatttatcaatggaccaaataatgctcatatccaacaagttggtgaccgttgttatgatgaaaaaatgtatgatgctgctaagttgttgtacaataatgtttccaattttggacgtttggcatctaccctggttcacctgggtgaatatcaggcagctgttgatggggctaggaaagctaacagtactcgaacatggaaagaggtctgcttcgcctgtgtagatgggaaagaattccgtcttgctcagatgtgtggacttcatattgttgtacatgcagatgaattagaagaacttatcaactactatcaggatcgtggctattttgaagagctgatcaccatgttggaagcagcactgggacttgagcgagctcacatgggaatgtttactgaattagctattctatactctaaatttaagcctcagaaaatgagggagcacctggagctgttctggtctagagtgaatattcccaaggtgctaagagctgcagaacaagctcatctttgggcagaactggtgtttttgtatgacaagtatgaagaatatgataatgccataattaccatgatgaatcatccaactgatgcctggaaagaagggcaattcaaagatatcattaccaaggttgccaatgtggaactatactacagagcaatacagttctacttagaattcaagcctctgttgttaaatgatttgctgatggtgctgtctccacggttggatcacactcgtgcagtcaattatttcagcaaggttaaacagctaccactggtgaaaccgtatttgcgttcagttcagaaccataacaacaaatctgtgaatgaatcattgaacaatctttttattacagaagaagattatcaggctctgcgaacatcaatagatgcttatgacaactttgacaatatctcgcttgctcagcgtttggaaaaacatgaactcattgagttcaggagaattgctgcttatctcttcaaaggcaacaatcgctggaaacagagtgtagagctgtgcaagaaagacagcctttacaaggatgcaatgcagtatgcttctgaatctaaagatactgaattggctgaagaactcctgcagtggtttttgcaggaagaaaaaagagagtgctttggagcttgtctgtttacctgttacgatcttttaaggccagatgtcgtcctagaaactgcatggaggcacaatatcatggattttgccatgccctatttcatccaggtcatgaaggagtacttgacaaaggtggataaattagatgcttcagaatcactgagaaaagaagaagaacaagctacagagacacaacccattgtttatggtcagccccagttgatgctgacagcaggacccagtgttgccgtccctccccaggcaccttttggttatggttataccgcaccaccgtatggacagccacagcctggctttgggtacagcatgtgagatgaagcgctgatcctgtagtcacctattttcgtactgaaacatcgtctttacccacttctcagtttataatgggggaaaacaggcaacgtgttcttgtaacctttatttcatgaaggacttctttttgtttctaactataaacttggatcacctatgttaaaaccttatttcacattccacatcattttagaatttattttcgaaggggaatagtttcaatgttttattcacttgggctttttttcttccccctctttctttaaagaactgctcaatattcaatctgttgtgaagaacctgatttgcactctgtagtgtttaaagaaacaaagaaactctaatattgaatctcttaaatttagtgtatgtaaacagcttacaaatacgtattgtctaaatgcatttaaatctgttttattcaaagaaaagctaaagcaaaaacactggcatatgaccatgcaagactgtcagtgccaacaaagacaacactaatcagcacatcgtacactggattgcagtgcttcccagattattgaaaaatgttacagacaacttgcctgatttttaaatgagcgtaaaaggccctctaacctatgcaggtttccccattatgcatataggctgtatcctgtgctttttctgtgggaccattccattcaggagcaaagagcaccatgattccaatcttgtgtgtgtttactaacccttccctgaggtttgtgtatgttggatattgtggtgttttagatcactgagtgtacagaagagagaaattcaaacaaaatattgctgttcttcagttttgtttgtggaatttgaaattactcaaatttaaaataaattactggactgtggaaataacatagaattgaagttttaattaaataccactcaaacgaaaagaacagtagtttttgtagttttatattggatactgaggcattagggaggcatgaaaggaagaggaatgaggattgagacatgtgaagacattgtgcattatatcaatgtgcattcctgtagttcattaacaaggtacatgcaatagtctaaagaaccagagtcactactatagtggcttaacatttaatctgtctccaatattttaaccaagtgacaccgaggtttttatcgaagcatttcacttaaatgaacaaatcatggctgttatattaacttgaaataaaatatatttaaacatgta

SEQ ID NO: 414872 - DNA, 2594 bp, Homo sapiens
accttggccccccgtctcatgcagcacatttatgacattgaaaaccaccagtaatagataacattgagatttgaaatttagttttacttaggtataatgacagaccaagtataaggctttggttgagagaccagcttttaaatattgaaagacaaatatagtgtaaaaggcgcaatggaatttgtatagtgaaggagattctctagtcccagggttgtaatgtcacttctgtctaattcattacagaattacagaatcaaatcatgttagccctagaagaaactgcagatcattttgttcaatcttctcattatataggaaaggaaatttgagggccagtgcaatggtttgccaaggtcacacaactagttagtggaaggatccaggcattctaattcctttctttcactaatacatttggcctgctctacagaattacttctgtctgatactatccactttgaagagtagctagcatatagtagccatttacttttggctcaattaaaagcaaacatttttgggacaaaatcaggctttcctgattacttcttagataacagagcccacacagtattaaaacatgcagcctttctttatgcaaaaagattgaatatggagccacttgaatcttaaacttcagtctgcagctataaccaatatcatcagaagttatacacaattggcaaaagaatagcttattctgcccaaatacttgtccagtcactaggatcatttcacttttttgaataccatttgctttggggagggaagtattgccagaccgtgaattcattattacctctgatcagttttaaacttcatttgaaaagtggttccttctcgttttctccctccctcaggctgcatcctagcatgcccagttttagtctggcatgagcttttatggcattttgaatccctccttcctgagggtttataatgacagtgctgaaaaccacctggactgaagtatgaacattgccattgaatttgagggggactgagaatgttctttctagtctgttttattttgacagaatttaacatactaaggcttttccactttctgccataaacctaggtttataatacttttggggtgctaattaacatgatgtgtttttctccaggtggataaattagatgcttcagaatcactgagaaaagaagaagaacaagctacagagacacaacccattgtttatggtcagccccagttgatgctgacagcaggacccagtgttgccgtccctccccaggcaccttttggttatggttataccgcaccaccgtatggacagccacagcctggctttgggtacagcatgtgagatgaagcgctgatcctgtagtcacctattttcgtactgaaacatcgtctttacccacttctcagtttataatgggggaaaacaggcaacgtgttcttgtaacctttatttcatgaaggacttctttttgtttctaactataaacttggatcacctatgttaaaaccttatttcacattccacatcattttagaatttattttcgaaggggaatagtttcaatgttttattcacttgggctttttttcttccccctctttctttaaagaactgctcaatattcaatctgttgtgaagaacctgatttgcactctgtagtgtttaaagaaacaaagaaactctaatattgaatctcttaaatttagtgtatgtaaacagcttacaaatacgtattgtctaaatgcatttaaatctgttttattcaaagaaaagctaaagcaaaaacactggcatatgaccatgcaagactgtcagtgccaacaaagacaacactaatcagcacatcgtacactggattgcagtgcttcccagattattgaaaaatgttacagacaacttgcctgatttttaaatgagcgtaaaaggccctctaacctatgcaggtttccccattatgcatatagaaaatgctagtatgttttgctcacttcatatgtaacaggtgcccttatgttgtgctgtatcctgtgctttttctgtgggaccattccattcaggagcaaagagcaccatgattccaatcttgtgtgtgtttactaacccttccctgaggtttgtgtatgttggatattgtggtgttttagatcactgagtgtacagaagagagaaattcaaacaaaatattgctgttcttcagttttgtttgtggaatttgaaattactcaaatttaaaataaattactggactgtggaaataacatagaattgaagttttaattaaataccactcaaacgaaaagaacagtagtttttgtagttttatattggatactgaggcattagggaggcatgaaaggaagaggaatgaggattgagacatgtgaagacattgtgcattatatcaatgtgcattcctgtagttcattaacaaggtacatgcaatagtctaaagaaccagagtcactactatagtggcttaacatttaatctgtctccaatattttaaccaagtgacaccgaggtttttatcgaagcatttcacttaaatgaacaaatcatggctgttatattaacttgaaataaaatatatttaaacatgta

SEQ ID NO: 414873 - DNA, 5985 bp, Homo sapiens
  misc_feature (5813)..(5814): n is a, c, g, or t
  misc_feature (5817)..(5818): n is a, c, g, or t
  misc_feature (5823)..(5823): n is a, c, g, or t
  misc_feature (5826)..(5826): n is a, c, g, or t
cagccgtttccggagtctgcgctgcgcccggttccgccattgcggctctcctggcccctggagcctccgcccccgacccgagctctttcgtctgcctgccagtttcctgcgtccccggagaggatcctgctgagcccagcctcccccctccccttctcctcctctcccttggagagcccgggcagccactgccccgcagccccagtgacaggaggagaccataacccccgacagcgccatggcccagattctgccaattcgttttcaggagcatctccagctccagaacctgggtatcaacccagcaaacattggcttcagtaccctgactatggagtctgacaaattcatctgcattagagaaaaagtaggagagcaggcccaggtggtaatcattgatatgaatgacccaagtaatccaattcgaagaccaatttcagcagacagcgccatcatgaatccagctagcaaagtaattgcactgaaagctgggaaaactcttcagatttttaacattgaaatgaaaagtaaaatgaaggctcataccatgactgatgatgtcaccttttggaaatggatctctttgaatacggttgctcttgttacggataatgcagtttatcactggagtatggaaggagagtctcagccagtgaaaatgtttgatcgccattctagccttgcagggtgccagattatcaattaccgtacagatgcaaaacaaaagtggttacttctgactggtatatctgcacagcaaaatcgtgtggtgggagctatgcagctatattctgtagataggaaagtgtctcagcccattgaaggacatgcagctagctttgcacagtttaagatggaaggaaatgcagaagaatcaacgttattttgttttgcagttcggggccaagctggagggaagttacatattattgaagttggcacaccacctacagggaaccagccctttccaaagaaggcagtggatgtcttctttcctccagaagcacaaaatgattttcctgttgcaatgcagatcagtgaaaagcatgatgtggtgttcttgataaccaagtatggttatatccacctctatgatcttgagactggtacctgcatctacatgaatagaatcagtggagaaacaatttttgttactgcacctcatgaagccacagctggaataattggagtaaacagaaagggacaagttctgtcagtgtgtgtggaagaagaaaacataattccttacatcaccaatgttctacaaaatcctgatttggctctgagaatggctgtacgtaataacttagccggtgctgaagaactctttgcccggaaatttaatgctctttttgcccagggaaattactcggaggcagcaaaggtggctgctaatgcaccaaagggaattcttcgtactccagacactatccgtcggttccagagtgtcccagcccagccaggtcaaacttctcctctacttcagtactttggtatccttttggaccagggacagctcaacaaatacgaatccttagagctttgtaggcctgtacttcagcaagggcgaaaacagcttttggagaaatggttaaaagaagataagctggaatgttctgaagaactgggtgatcttgtgaaatctgtggaccctacattggcacttagtgtgtacctaagggctaacgtcccaaataaagtcattcagtgctttgcagaaacaggtcaagtccaaaagattgttttatatgctaaaaaagttggatacactccagattggatatttctgctgagaaatgtaatgcgaatcagtccagatcagggacagcagtttgcccaaatgttagttcaagatgaagagcctcttgctgacatcacacagattgtagatgtctttatggaatacaatctaattcagcagtgtactgcattcttgcttgatgctctgaagaataatcgcccatctgaaggtcctttacagacgcggttacttgagatgaaccttatgcatgcgcctcaagttgcagatgctattctaggcaatcagatgttcacacattatgaccgggctcatattgctcaactgtgtgaaaaggctggcctactgcagcgtgcattagaacatttcactgatttatatgatataaaacgtgcagtggttcacacccatcttcttaaccctgagtggttagtcaactactttggttccttatcagtagaagactccctagaatgtctcagagccatgctgtctgccaacatccgtcagaatctgcagatttgtgttcaggtggcttctaaatatcatgaacaactgtcaactcagtctctgattgaactttttgaatctttcaagagttttgaaggtctcttttattttctgggatccattgttaactttagccaggacccagatgtgcactttaaatatattcaggcagcttgcaagactgggcaaatcaaagaagtagaaagaatctgtagagaaagcaactgctacgatcctgagcgagtcaagaattttcttaaggaagcaaaactaacagatcagctaccacttatcattgtgtgtgatcgatttgactttgtccatgatttggtgctctatttatatagaaataatcttcaaaagtatatagagatatatgtacagaaggtgaatccaagtcgacttcctgtagttattggaggattacttgatgttgactgttctgaagatgtcataaaaaacttgattcttgttgtaagaggtcaattctctactgatgagcttgttgctgaggttgaaaaaagaaacagattgaaactgcttctgccttggctagaggccagaattcatgagggctgtgaggagcctgctactcacaatgccttagccaaaatctacatagacagtaataacaacccggagagatttcttcgtgaaaatccctactatgacagtcgcgttgttggaaagtattgtgagaagagagatccacatctggcctgtgttgcttatgaacgtggccaatgtgatctggaacttattaatgtttgcaatgagaattccctcttcaaaagtctttctcgctacctggtacgtcgaaaggatccagaattgtggggcagcgtgctgctggaaagcaatccttacaggagacccctaattgaccaggttgtacaaacagctttgtctgagactcaggaccctgaagaagtgtcagtaactgtaaaggctttcatgactgcagaccttcctaatgaactcattgaactgctggagaaaattgtccttgataactctgtattcagtgaacacaggaatctgcaaaacctccttatcctcactgcaattaaggctgaccgtacacgtgttatggagtatattaaccgcctggataattatgatgccccagatattgccaatatcgccatcagcaatgagctgtttgaagaagcatttgccattttccggaaatttgatgtcaatacttcagcagttcaggtcttaattgagcatattggaaacttggatcgggcatatgagtttgctgaacgttgcaatgaacctgcggtctggagtcaacttgcaaaagcccagttgcagaaaggaatggtgaaagaagccattgattcttatatcaaagcagatgatccttcctcctacatggaagttgttcaggctgccaatactagtggaaactgggaagaactggtgaagtacttgcagatggcccgtaagaaggctcgagagtcctatgtggagacagaactgatattcgcactggctaaaacaaaccgccttgcagagttagaagaatttatcaatggaccaaataatgctcatatccaacaagttggtgaccgttgttatgatgaaaaaatgtatgatgctgctaagttgttgtacaataatgtttccaattttggacgtttggcatctaccctggttcacctgggtgaatatcaggcagctgttgatggggctaggaaagctaacagtactcgaacatggaaagaggtctgcttcgcctgtgtagatgggaaagaattccgtcttgctcagatgtgtggacttcatattgttgtacatgcagatgaattagaagaacttatcaactactatcaggatcgtggctattttgaagagctgatcaccatgttggaagcagcactgggacttgagcgagctcacatgggaatgtttactgaattagctattctatactctaaatttaagcctcagaaaatgagggagcacctggagctgttctggtctagagtgaatattcccaaggtgctaagagctgcagaacaagctcatctttgggcagaactggtgtttttgtatgacaagtatgaagaatatgataatgccataattaccatgatgaatcatccaactgatgcctggaaagaagggcaattcaaagatatcattaccaaggttgccaatgtggaactatactacagagcaatacagttctacttagaattcaagcctctgttgttaaatgatttgctgatggtgctgtctccacggttggatcacactcgtgcagtcaattatttcagcaaggttaaacagctaccactggtgaaaccgtatttgcgttcagttcagaaccataacaacaaatctgtgaatgaatcattgaacaatctttttattacagaagaagattatcaggctctgcgaacatcaatagatgcttatgacaactttgacaatatctcgcttgctcagcgtttggaaaaacatgaactcattgagttcaggagaattgctgcttatctcttcaaaggcaacaatcgctggaaacagagtgtagagctgtgcaagaaagacagcctttacaaggatgcaatgcagtatgcttctgaatctaaagatactgaattggctgaagaactcctgcagtggtttttgcaggaagaaaaaagagagtgctttggagcttgtctgtttacctgttacgatcttttaaggccagatgtcgtcctagaaactgcatggaggcacaatatcatggattttgccatgccctatttcatccaggtcatgaaggagtacttgacaaaggtggataaattagatgcttcagaatcactgagaaaagaagaagaacaagctacagagacacaacccattgtttatggtcagccccagttgatgctgacagcaggacccagtgttgccgtccctccccaggcaccttttggttatggttataccgcaccaccgtatggacagccacagcctggctttgggtacagcatgtgagatgaagcgctgatcctgtagtcacctattttcgtactgaaacatcgtctttacccacttctcagtttataatgggggaaaacaggcaacgtgttcttgtaacctttatttcatgaaggacttctttttgtttctaactataaacttggatcacctatgttaaaaccttatttcacattccacatcattttagaatttattttcgaaggggaatagtttcaatgttttattcacttgggctttttttcttccccctctttctttaaagaactgctcaatattcaatctgttgtgaagaacctgatttgcactctgtagtgtttaaagaaacaaagaaactctaatattgaatctcttaaatttagtgtatgtaaacagcttacaaatacgtattgtctaaatgcatttaaatctgttttattcaaagaaaagctaaagcaaaaacactggcatatgaccatgcaagactgtcagtgccaacaaagacaacactaatcagcacatcgtacactggattgcagtgcttcccagattattgaaaagtcgnnacnngccgnttnatgggggaagcccaactggggtccctgtcattaaagcggttgggcgccacataagggccttgtgtcagcgtgggggcaccaagaaacccacatggttacaccggtgtggggtatgaacaacaaccttgggtactgcaaacacccctcgtcgctctgttg

SEQ ID NO: 414874 - DNA, 1308 bp, Homo sapiens
gaagacggtcgaacttgactatctcctggctttgggtacagcatgtgagatgaagcgctgatcctgtagtcacctattttcgtactgaaacatcgtctttacccacttctcagtttataatgggggaaaacaggcaacgtgttcttgtaacctttatttcatgaaggacttctttttgtttctaactataaacttggatcacctatgttaaaaccttatttcacattccacatcattttagaatttattttcgaaggggaatagtttcaatgttttattcacttgggctttttttcttccccctctttctttaaagaactgctcaatattcaatctgttgtgaagaacctgatttgcactctgtagtgtttaaagaaacaaagaaactctaatattgaatctcttaaatttagtgtatgtaaacagcttacaaatacgtattgtctaaatgcatttaaatctgttttattcaaagaaaagctaaagcaaaaacactggcatatgaccatgcaagactgtcagtgccaacaaagacaacactaatcagcacatcgtacactggattgcagtgcttcccagattattgaaaaatgttacagacaacttgcctgatttttaaatgagcgtaaaaggccctctaacctatgcaggtttccccattatgcatatagaaaatgctagtatgttttgctcacttcatatgtaacaggtgcccttatgttgtgctgtatcctgtgctttttctgtgggaccattccattcaggagcaaagagcaccatgattccaatcttgtgtgtgtttactaacccttccctgaggtttgtgtatgttggatattgtggtgttttagatcactgagtgtacagaagagagaaattcaaacaaaatattgctgttcttcagttttgtttgtggaatttgaaattactcaaatttaaaataaattactggactgtggaaataacatagaattgaagttttaattaaataccactcaaacgaaaagaacagtagtttttgtagttttatattggatactgaggcattagggaggcatgaaaggaagaggaatgaggattgagacatgtgaagacattgtgcattatatcaatgtgcattcctgtagttcattaacaaggtacatgcaatagtctaaagaaccagagtcactactatagtggcttaacatttaatctgtctccaatattttaaccaagtgacaccgaggtttttatcgaagcatttcacttaaatgaacaaatcatggctgttatattaacttgaaataaaatatatttaaacatgta

SEQ ID NO: 414875 - DNA, 1300 bp, Homo sapiens
cggacgcgtgggtcgacccacgcgtccgcgaccacgcgtcggacccacgctgatcctgtagtcacctattttcgtactgaaacatcgtctttacccacttctcagtttataatgggggaaaacaggcaacgtgttcttgtaacctttatttcatgaaggacttctttttgtttctaactataaacttggatcacctatgttaaaaccttatttcacattccacatcattttagaatttattttcgaaggggaatagtttcaatgttttattcacttgggctttttttcttccccctctttctttaaagaactgctcaatattcaatctgttgtgaagaacctgatttgcactctgtagtgtttaaagaaacaaagaaactctaatattgaatctcttaaatttagtgtatgtaaacagcttacaaatacgtattgtctaaatgcatttaaatctgttttattcaaagaaaagctaaagcaaaaacactggcatatgaccatgcaagactgtcagtgccaacaaagacaacactaatcagcacatcgtacactggattgcagtgcttcccagattattgaaaaatgttacagacaacttgcctgatttttaaatgagcgtaaaaggccctctaacctatgcaggtttccccattatgcatatagaaaatgctagtatgttttgctcacttcatatgtaacaggtgcccttatgttgtgctgtatcctgtgctttttctgtgggaccattccattcaggagcaaagagcaccatgattccaatcttgtgtgtgtttactaacccttccctgaggtttgtgtatgttggatattgtggtgttttagatcactgagtgtacagaagagagaaattcaaacaaaatattgctgttcttcagttttgtttgtggaatttgaaattactcaaatttaaaataaattactggactgtggaaataacatagaattgaagttttaattaaataccactcaaacgaaaagaacagtagtttttgtagttttatattggatactgaggcattagggaggcatgaaaggaagaggaatgaggattgagacatgtgaagacattgtgcattatatcaatgtgcattcctgtagttcattaacaaggtacatgcaatagtctaaagaaccagagtcactactatagtggcttaacatttaatctgtctccaatattttaaccaagtgacaccgaggtttttatcgaagcatttcacttaaatgaacaaatcatggctgttatattaacttgaaataaaatatatttaaacatgta

SEQ ID NO: 414876 - DNA, 1203 bp, Homo sapiens
tgattgcatttagactgattgcatttaggcaacgtgttcttgtaacctttatttcatgaaggacttctttttgtttctaactataaacttggatcacctatgttaaaaccttatttcacattccacatcattttagaatttattttcgaaggggaatagtttcaatgttttattcacttgggctttttttcttccccctctttctttaaagaactgctcaatattcaatctgttgtgaagaacctgatttgcactctgtagtgtttaaagaaacaaagaaactctaatattgaatctcttaaatttagtgtatgtaaacagcttacaaatacgtattgtctaaatgcatttaaatctgttttattcaaagaaaagctaaagcaaaaacactggcatatgaccatgcaagactgtcagtgccaacaaagacaacactaatcagcacatcgtacactggattgcagtgcttcccagattattgaaaaatgttacagacaacttgcctgatttttaaatgagcgtaaaaggccctctaacctatgcaggtttccccattatgcatatagaaaatgctagtatgttttgctcacttcatatgtaacaggtgcccttatgttgtgctgtatcctgtgctttttctgtgggaccattccattcaggagcaaagagcaccatgattccaatcttgtgtgtgtttactaacccttccctgaggtttgtgtatgttggatattgtggtgttttagatcactgagtgtacagaagagagaaattcaaacaaaatattgctgttcttcagttttgtttgtggaatttgaaattactcaaatttaaaataaattactggactgtggaaataacatagaattgaagttttaattaaataccactcaaacgaaaagaacagtagtttttgtagttttatattggatactgaggcattagggaggcatgaaaggaagaggaatgaggattgagacatgtgaagacattgtgcattatatcaatgtgcattcctgtagttcattaacaaggtacatgcaatagtctaaagaaccagagtcactactatagtggcttaacatttaatctgtctccaatattttaaccaagtgacaccgaggtttttatcgaagcatttcacttaaatgaacaaatcatggctgttatattaacttgaaataaaatatatttaaacatgta

SEQ ID NO: 414877 - DNA, 1132 bp, Homo sapiens
cgagcggccgcccgggcaggtacgcgctatgttaaaaccttatttcacattccacatcattttagaatttattttcgaaggggaatagtttcaatgttttattcacttgggctttttttcttccccctctttctttaaagaactgctcaatattcaatctgttgtgaagaacctgatttgcactctgtagtgtttaaagaaacaaagaaactctaatattgaatctcttaaatttagtgtatgtaaacagcttacaaatacgtattgtctaaatgcatttaaatctgttttattcaaagaaaagctaaagcaaaaacactggcatatgaccatgcaagactgtcagtgccaacaaagacaacactaatcagcacatcgtacactggattgcagtgcttcccagattattgaaaaatgttacagacaacttgcctgatttttaaatgagcgtaaaaggccctctaacctatgcaggtttccccattatgcatatagaaaatgctagtatgttttgctcacttcatatgtaacaggtgcccttatgttgtgctgtatcctgtgctttttctgtgggaccattccattcaggagcaaagagcaccatgattccaatcttgtgtgtgtttactaacccttccctgaggtttgtgtatgttggatattgtggtgttttagatcactgagtgtacagaagagagaaattcaaacaaaatattgctgttcttcagttttgtttgtggaatttgaaattactcaaatttaaaataaattactggactgtggaaataacatagaattgaagttttaattaaataccactcaaacgaaaagaacagtagtttttgtagttttatattggatactgaggcattagggaggcatgaaaggaagaggaatgaggattgagacatgtgaagacattgtgcattatatcaatgtgcattcctgtagttcattaacaaggtacatgcaatagtctaaagaaccagagtcactactatagtggcttaacatttaatctgtctccaatattttaaccaagtgacaccgaggtttttatcgaagcatttcacttaaatgaacaaatcatggctgttatattaacttgaaataaaatatatttaaacatgta

SEQ ID NO: 414878 - DNA, 6474 bp, Homo sapiens
  misc_feature (5127)..(5127): n is a, c, g, or t
cagccgtttccggagtctgcgctgcgcccggttccgccattgcggctctcctggcccctggagcctccgcccccgacccgagctctttcgtctgcctgccagtttcctgcgtccccggagaggatcctgctgagcccagcctcccccctccccttctcctcctctcccttggagagcccgggcagccactgccccgcagccccagtgacaggaggagaccataacccccgacagcgccatggcccagattctgccaattcgttttcaggagcatctccagctccagaacctgggtatcaacccagcaaacattggcttcagtaccctgactatggagtctgacaaattcatctgcattagagaaaaagtaggagagcaggcccaggtggtaatcattgatatgaatgacccaagtaatccaattcgaagaccaatttcagcagacagcgccatcatgaatccagctagcaaagtaattgcactgaaagctgggaaaactcttcagatttttaacattgaaatgaaaagtaaaatgaaggctcataccatgactgatgatgtcaccttttggaaatggatctctttgaatacggttgctcttgttacggataatgcagtttatcactggagtatggaaggagagtctcagccagtgaaaatgtttgatcgccattctagccttgcagggtgccagattatcaattaccgtacagatgcaaaacaaaagtggttacttctgactggtatatctgcacagcaaaatcgtgtggtgggagctatgcagctatattctgtagataggaaagtgtctcagcccattgaaggacatgcagctagctttgcacagtttaagatggaaggaaatgcagaagaatcaacgttattttgttttgcagttcggggccaagctggagggaagttacatattattgaagttggcacaccacctacagggaaccagccctttccaaagaaggcagtggatgtcttctttcctccagaagcacaaaatgattttcctgttgcaatgcagatcagtgaaaagcatgatgtggtgttcttgataaccaagtatggttatatccacctctatgatcttgagactggtacctgcatctacatgaatagaatcagtggagaaacaatttttgttactgcacctcatgaagccacagctggaataattggagtaaacagaaagggacaagttctgtcagtgtgtgtggaagaagaaaacataattccttacatcaccaatgttctacaaaatcctgatttggctctgagaatggctgtacgtaataacttagccggtgctgaagaactctttgcccggaaatttaatgctctttttgcccagggaaattactcggaggcagcaaaggtggctgctaatgcaccaaagggaattcttcgtactccagacactatccgtcggttccagagtgtcccagcccagccaggtcaaacttctcctctacttcagtactttggtatccttttggaccagggacagctcaacaaatacgaatccttagagctttgtaggcctgtacttcagcaagggcgaaaacagcttttggagaaatggttaaaagaagataagctggaatgttctgaagaactgggtgatcttgtgaaatctgtggaccctacattggcacttagtgtgtacctaagggctaacgtcccaaataaagtcattcagtgctttgcagaaacaggtcaagtccaaaagattgttttatatgctaaaaaagttggatacactccagattggatatttctgctgagaaatgtaatgcgaatcagtccagatcagggacagcagtttgcccaaatgttagttcaagatgaagagcctcttgctgacatcacacagattgtagatgtctttatggaatacaatctaattcagcagtgtactgcattcttgcttgatgctctgaagaataatcgcccatctgaaggtcctttacagacgcggttacttgagatgaaccttatgcatgcgcctcaagttgcagatgctattctaggcaatcagatgttcacacattatgaccgggctcatattgctcaactgtgtgaaaaggctggcctactgcagcgtgcattagaacatttcactgatttatatgatataaaacgtgcagtggttcacacccatcttcttaaccctgagtggttagtcaactactttggttccttatcagtagaagactccctagaatgtctcagagccatgctgtctgccaacatccgtcagaatctgcagatttgtgttcaggtggcttctaaatatcatgaacaactgtcaactcagtctctgattgaactttttgaatctttcaagagttttgaaggtctcttttattttctgggatccattgttaactttagccaggacccagatgtgcactttaaatatattcaggcagcttgcaagactgggcaaatcaaagaagtagaaagaatctgtagagaaagcaactgctacgatcctgagcgagtcaagaattttcttaaggaagcaaaactaacagatcagctaccacttatcattgtgtgtgatcgatttgactttgtccatgatttggtgctctatttatatagaaataatcttcaaaagtatatagagatatatgtacagaaggtgaatccaagtcgacttcctgtagttattggaggattacttgatgttgactgttctgaagatgtcataaaaaacttgattcttgttgtaagaggtcaattctctactgatgagcttgttgctgaggttgaaaaaagaaacagattgaaactgcttctgccttggctagaggccagaattcatgagggctgtgaggagcctgctactcacaatgccttagccaaaatctacatagacagtaataacaacccggagagatttcttcgtgaaaatccctactatgacagtcgcgttgttggaaagtattgtgagaagagagatccacatctggcctgtgttgcttatgaacgtggccaatgtgatctggaacttattaatgtttgcaatgagaattccctcttcaaaagtctttctcgctacctggtacgtcgaaaggatccagaattgtggggcagcgtgctgctggaaagcaatccttacaggagacccctaattgaccaggttgtacaaacagctttgtctgagactcaggaccctgaagaagtgtcagtaactgtaaaggctttcatgactgcagaccttcctaatgaactcattgaactgctggagaaaattgtccttgataactctgtattcagtgaacacaggaatctgcaaaacctccttatcctcactgcaattaaggctgaccgtacacgtgttatggagtatattaaccgcctggataattatgatgccccagatattgccaatatcgccatcagcaatgagctgtttgaagaagcatttgccattttccggaaatttgatgtcaatacttcagcagttcaggtcttaattgagcatattggaaacttggatcgggcatatgagtttgctgaacgttgcaatgaacctgcggtctggagtcaacttgcaaaagcccagttgcagaaaggaatggtgaaagaagccattgattcttatatcaaagcagatgatccttcctcctacatggaagttgttcaggctgccaatactagtggaaactgggaagaactggtgaagtacttgcagatggcccgtaagaaggctcgagagtcctatgtggagacagaactgatattcgcactggctaaaacaaaccgccttgcagagttagaagaatttatcaatggaccaaataatgctcatatccaacaagttggtgaccgttgttatgatgaaaaaatgtatgatgctgctaagttgttgtacaataatgtttccaattttggacgtttggcatctaccctggttcacctgggtgaatatcaggcagctgttgatggggctaggaaagctaacagtactcgaacatggaaagaggtctgcttcgcctgtgtagatgggaaagaattccgtcttgctcagatgtgtggacttcatattgttgtacatgcagatgaattagaagaacttatcaactactatcaggatcgtggctattttgaagagctgatcaccatgttggaagcagcactgggacttgagcgagctcacatgggaatgtttactgaattagctattctatactctaaatttaagcctcagaaaatgagggagcacctggagctgttctggtctagagtgaatattcccaaggtgctaagagctgcagaacaagctcatctttgggcagaactggtgtttttgtatgacaagtatgaagaatatgataatgccataattaccatgatgaatcatccaactgatgcctggaaagaagggcaattcaaagatatcattaccaaggttgccaatgtggaactatactacagagcaatacagttctacttagaattcaagcctctgttgttaaatgatttgctgatggtgctgtctccacggttggatcacactcgtgcagtcaattatttcagcaaggttaaacagctaccactggtgaaaccgtatttgcgttcagttcagaaccataacaacaaatctgtgaatgaatcattgaacaatctttttattacagaagaagattatcaggctctgcgaacatcaatagatgcttatgacaactttgacaatatctcgcttgctcagcgtttggaaaaacatgaactcattgagttcaggagaattgctgcttatctcttcaaaggcaacaatcgctggaaacagagtgtagagctgtgcaagaaagacagcctttacaaggttgataaagttgcggggcaggggctgttttaaaccaggcctaaaatggtgttacaagtgattataatctataaataaaagtattggttttgtgaatatgagagctgactttaaggcaatttaagttaatggatttcttgattctaggggctctcttatgttaaggtcaaacttgtctggggaaaaaaaagcttttagcttatctcttctttgaaaattttaatttaaatgatacaactaggaggcttttttccccttgcaaaaccagatttatattggaaagnttccattgtttttcttggtttactagttcagtatgtggggtctaatgtttttgactttcactatttctttgaataggatgcaatgcagtatgcttctgaatctaaagatactgaattggctgaagaactcctgcagtggtttttgcaggaagaaaaaagagagtgctttggagcttgtctgtttacctgttacgatcttttaaggccagatgtcgtcctagaaactgcatggaggcacaatatcatggattttgccatgccctatttcatccaggtcatgaaggagtacttgacaaaggtaatgactcttctaagtgtattcagaactagtttccttgcatgtaaaattctacatgcacattaatttttttaaatgcttttttctttagtagaagtaagtcatttagtcgatcataaaatattcctgttcttttgaaatttttttttaatagctgacaaatgacactgattggaaggggaactcaaatgtagctgtttaccctcagtgtatttatgagggtgaaaataatctatgtatttttttatttaaaaaactttgataaattttatttcaaaatagtatttttctcaaaatcagttcttgtaactcaaatattcatgactagtattgtagattcccttttatttggttggttcctgactttaatgatgtctatgcctgtttcccctggggaagctgcatgtatattcttaacatccttttaatcttcacaatttttttgatagtttaacccctgatttaaaaataccataggaggtgaacatgggaaaaaaaaaacaagctgggggtctaattgccttataacattcactattcgtcttagtgtccttttttgatgtatgaatttactcaccctatcttcagcagttactagctgtctctctgtagaacatttttaaatggttttagaggatccttttcgtcaaagcaaaaaacatgattaaaatcagagtctcacatctgattccttcagcctgcctgagttggggggatgggagggtgaagaagcgctaccaacaacccctcccatactgaatttttcctcaggataccatttaattagataccattgtgtctgtttaaagtttttaaagaattaacattttctgtattcaatgtaagagaaaaaacatgttgccttatcttagccatagatgagaatagcttcttaaacataatgccaacttgtgagacctgtctttaagctgctgttaacctaagtgctgtaaatttttctagtgattaagctgctttctttcatactgtagcataaattcttctgcattaagctttgaagttacacaaaattctaaattttgcttcca

SEQ ID NO: 414879 - DNA, 5551 bp, Homo sapiens
cagccgtttccggagtctgcgctgcgcccggttccgccattgcggctctcctggcccctggagcctccgcccccgacccgagctctttcgtctgcctgccagtttcctgcgtccccggagaggatcctgctgagcccagcctcccccctccccttctcctcctctcccttggagagcccgggcagccactgccccgcagccccagtgacaggaggagaccataacccccgacagcgccatggcccagattctgccaattcgttttcaggagcatctccagctccagaacctgggtatcaacccagcaaacattggcttcagtaccctgactatggagtctgacaaattcatctgcattagagaaaaagtaggagagcaggcccaggtggtaatcattgatatgaatgacccaagtaatccaattcgaagaccaatttcagcagacagcgccatcatgaatccagctagcaaagtaattgcactgaaagctgggaaaactcttcagatttttaacattgaaatgaaaagtaaaatgaaggctcataccatgactgatgatgtcaccttttggaaatggatctctttgaatacggttgctcttgttacggataatgcagtttatcactggagtatggaaggagagtctcagccagtgaaaatgtttgatcgccattctagccttgcagggtgccagattatcaattaccgtacagatgcaaaacaaaagtggttacttctgactggtatatctgcacagcaaaatcgtgtggtgggagctatgcagctatattctgtagataggaaagtgtctcagcccattgaaggacatgcagctagctttgcacagtttaagatggaaggaaatgcagaagaatcaacgttattttgttttgcagttcggggccaagctggagggaagttacatattattgaagttggcacaccacctacagggaaccagccctttccaaagaaggcagtggatgtcttctttcctccagaagcacaaaatgattttcctgttgcaatgcagatcagtgaaaagcatgatgtggtgttcttgataaccaagtatggttatatccacctctatgatcttgagactggtacctgcatctacatgaatagaatcagtggagaaacaatttttgttactgcacctcatgaagccacagctggaataattggagtaaacagaaagggacaagttctgtcagtgtgtgtggaagaagaaaacataattccttacatcaccaatgttctacaaaatcctgatttggctctgagaatggctgtacgtaataacttagccggtgctgaagaactctttgcccggaaatttaatgctctttttgcccagggaaattactcggaggcagcaaaggtggctgctaatgcaccaaagggaattcttcgtactccagacactatccgtcggttccagagtgtcccagcccagccaggtcaaacttctcctctacttcagtactttggtatccttttggaccagggacagctcaacaaatacgaatccttagagctttgtaggcctgtacttcagcaagggcgaaaacagcttttggagaaatggttaaaagaagataagctggaatgttctgaagaactgggtgatcttgtgaaatctgtggaccctacattggcacttagtgtgtacctaagggctaacgtcccaaataaagtcattcagtgctttgcagaaacaggtcaagtccaaaagattgttttatatgctaaaaaagttggatacactccagattggatatttctgctgagaaatgtaatgcgaatcagtccagatcagggacagcagtttgcccaaatgttagttcaagatgaagagcctcttgctgacatcacacagattgtagatgtctttatggaatacaatctaattcagcagtgtactgcattcttgcttgatgctctgaagaataatcgcccatctgaaggtcctttacagacgcggttacttgagatgaaccttatgcatgcgcctcaagttgcagatgctattctaggcaatcagatgttcacacattatgaccgggctcatattgctcaactgtgtgaaaaggctggcctactgcagcgtgcattagaacatttcactgatttatatgatataaaacgtgcagtggttcacacccatcttcttaaccctgagtggttagtcaactactttggttccttatcagtagaagactccctagaatgtctcagagccatgctgtctgccaacatccgtcagaatctgcagatttgtgttcaggtggcttctaaatatcatgaacaactgtcaactcagtctctgattgaactttttgaatctttcaagagttttgaaggtctcttttattttctgggatccattgttaactttagccaggacccagatgtgcactttaaatatattcaggcagcttgcaagactgggcaaatcaaagaagtagaaagaatctgtagagaaagcaactgctacgatcctgagcgagtcaagaattttcttaaggaagcaaaactaacagatcagctaccacttatcattgtgtgtgatcgatttgactttgtccatgatttggtgctctatttatatagaaataatcttcaaaagtatatagagatatatgtacagaaggtgaatccaagtcgacttcctgtagttattggaggattacttgatgttgactgttctgaagatgtcataaaaaacttgattcttgttgtaagaggtcaattctctactgatgagcttgttgctgaggttgaaaaaagaaacagattgaaactgcttctgccttggctagaggccagaattcatgagggctgtgaggagcctgctactcacaatgccttagccaaaatctacatagacagtaataacaacccggagagatttcttcgtgaaaatccctactatgacagtcgcgttgttggaaagtattgtgagaagagagatccacatctggcctgtgttgcttatgaacgtggccaatgtgatctggaacttattaatgtttgcaatgagaattccctcttcaaaagtctttctcgctacctggtacgtcgaaaggatccagaattgtggggcagcgtgctgctggaaagcaatccttacaggagacccctaattgaccaggttgtacaaacagctttgtctgagactcaggaccctgaagaagtgtcagtaactgtaaaggctttcatgactgcagaccttcctaatgaactcattgaactgctggagaaaattgtccttgataactctgtattcagtgaacacaggaatctgcaaaacctccttatcctcactgcaattaaggctgaccgtacacgtgttatggagtatattaaccgcctggataattatgatgccccagatattgccaatatcgccatcagcaatgagctgtttgaagaagcatttgccattttccggaaatttgatgtcaatacttcagcagttcaggtcttaattgagcatattggaaacttggatcgggcatatgagtttgctgaacgttgcaatgaacctgcggtctggagtcaacttgcaaaagcccagttgcagaaaggaatggtgaaagaagccattgattcttatatcaaagcagatgatccttcctcctacatggaagttgttcaggctgccaatactagtggaaactgggaagaactggtgaagtacttgcagatggcccgtaagaaggctcgagagtcctatgtggagacagaactgatattcgcactggctaaaacaaaccgccttgcagagttagaagaatttatcaatggaccaaataatgctcatatccaacaagttggtgaccgttgttatgatgaaaaaatgtatgatgctgctaagttgttgtacaataatgtttccaattttggacgtttggcatctaccctggttcacctgggtgaatatcaggcagctgttgatggggctaggaaagctaacagtactcgaacatggaaagaggtctgcttcgcctgtgtagatgggaaagaattccgtcttgctcagatgtgtggacttcatattgttgtacatgcagatgaattagaagaacttatcaactactatcaggatcgtggctattttgaagagctgatcaccatgttggaagcagcactgggacttgagcgagctcacatgggaatgtttactgaattagctattctatactctaaatttaagcctcagaaaatgagggagcacctggagctgttctggtctagagtgaatattcccaaggtgctaagagctgcagaacaagctcatctttgggcagaactggtgtttttgtatgacaagtatgaagaatatgataatgccataattaccatgatgaatcatccaactgatgcctggaaagaagggcaattcaaagatatcattaccaaggttgccaatgtggaactatactacagagcaatacagttctacttagaattcaagcctctgttgttaaatgatttgctgatggtgctgtctccacggttggatcacactcgtgcagtcaattatttcagcaaggttaaacagctaccactggtgaaaccgtatttgcgttcagttcagaaccataacaacaaatctgtgaatgaatcattgaacaatctttttattacagaagaagattatcaggtaaaaccttttgattcttgcacataatctcaagactcataaagttatgttttcccattttttaaaaaagccattatcctttaggattgtaaacagtaggtgcttgcatacctaggatctaaatttagtaagatttcaggattgataaatcttctaattaagtgccaagttttcagaattttgctcagatcttgtataagatactgcttttgaaaaaaatgatatgattactttatctctaacatctagattgtaggtagagtcaaaaatgtctttgaccacttaactaattcataaaatttatttggtattaactatatttattcaccatttttcttgcctactgttttattagtgtttgtataaactttctcttatgaaggatttcacaagcaaaagtgaagtagagttaagcttaagctacttgcctttttttctctctcttcattttctttgaggctcagcgcatgcagatctgtactgctgccatgctgagttttatcagaagtttctctagagcacagaatcttgccctccatgccaggcgtgagccactggcccagccttgaatatgtaattttctgattgctgctttttctccccaatgcaaattatctcaaatatggataattattacatatagacatattagttcaatatgattcttttctccataactatgaccttttgagtccggctaatcaatttctgacgtggagtagcggaccagtctcttatgatataatccgatgctgcacttttgttcaaagtaaattccgctttgggtgccgtgcccgtcggggcgaaagcttgccatagggtgattatcctgacctaagacttaacaatttcaacttagggtattgcaaaaaagcttct

SEQ ID NO: 414880 - DNA, 4678 bp, Homo sapiens
  misc_feature (4598)..(4598): n is a, c, g, or t
  misc_feature (4638)..(4638): n is a, c, g, or t
  misc_feature (4643)..(4643): n is a, c, g, or t
cagccgtttccggagtctgcgctgcgcccggttccgccattgcggctctcctggcccctggagcctccgcccccgacccgagctctttcgtctgcctgccagtttcctgcgtccccggagaggatcctgctgagcccagcctcccccctccccttctcctcctctcccttggagagcccgggcagccactgccccgcagccccagtgacaggaggagaccataacccccgacagcgccatggcccagattctgccaattcgttttcaggagcatctccagctccagaacctgggtatcaacccagcaaacattggcttcagtaccctgactatggagtctgacaaattcatctgcattagagaaaaagtaggagagcaggcccaggtggtaatcattgatatgaatgacccaagtaatccaattcgaagaccaatttcagcagacagcgccatcatgaatccagctagcaaagtaattgcactgaaagctgggaaaactcttcagatttttaacattgaaatgaaaagtaaaatgaaggctcataccatgactgatgatgtcaccttttggaaatggatctctttgaatacggttgctcttgttacggataatgcagtttatcactggagtatggaaggagagtctcagccagtgaaaatgtttgatcgccattctagccttgcagggtgccagattatcaattaccgtacagatgcaaaacaaaagtggttacttctgactggtatatctgcacagcaaaatcgtgtggtgggagctatgcagctatattctgtagataggaaagtgtctcagcccattgaaggacatgcagctagctttgcacagtttaagatggaaggaaatgcagaagaatcaacgttattttgttttgcagttcggggccaagctggagggaagttacatattattgaagttggcacaccacctacagggaaccagccctttccaaagaaggcagtggatgtcttctttcctccagaagcacaaaatgattttcctgttgcaatgcagatcagtgaaaagcatgatgtggtgttcttgataaccaagtatggttatatccacctctatgatcttgagactggtacctgcatctacatgaatagaatcagtggagaaacaatttttgttactgcacctcatgaagccacagctggaataattggagtaaacagaaagggacaagttctgtcagtgtgtgtggaagaagaaaacataattccttacatcaccaatgttctacaaaatcctgatttggctctgagaatggctgtacgtaataacttagccggtgctgaagaactctttgcccggaaatttaatgctctttttgcccagggaaattactcggaggcagcaaaggtggctgctaatgcaccaaagggaattcttcgtactccagacactatccgtcggttccagagtgtcccagcccagccaggtcaaacttctcctctacttcagtactttggtatccttttggaccagggacagctcaacaaatacgaatccttagagctttgtaggcctgtacttcagcaagggcgaaaacagcttttggagaaatggttaaaagaagataagctggaatgttctgaagaactgggtgatcttgtgaaatctgtggaccctacattggcacttagtgtgtacctaagggctaacgtcccaaataaagtcattcagtgctttgcagaaacaggtcaagtccaaaagattgttttatatgctaaaaaagttggatacactccagattggatatttctgctgagaaatgtaatgcgaatcagtccagatcagggacagcagtttgcccaaatgttagttcaagatgaagagcctcttgctgacatcacacagattgtagatgtctttatggaatacaatctaattcagcagtgtactgcattcttgcttgatgctctgaagaataatcgcccatctgaaggtcctttacagacgcggttacttgagatgaaccttatgcatgcgcctcaagttgcagatgctattctaggcaatcagatgttcacacattatgaccgggctcatattgctcaactgtgtgaaaaggctggcctactgcagcgtgcattagaacatttcactgatttatatgatataaaacgtgcagtggttcacacccatcttcttaaccctgagtggttagtcaactactttggttccttatcagtagaagactccctagaatgtctcagagccatgctgtctgccaacatccgtcagaatctgcagatttgtgttcaggtggcttctaaatatcatgaacaactgtcaactcagtctctgattgaactttttgaatctttcaagagttttgaaggtctcttttattttctgggatccattgttaactttagccaggacccagatgtgcactttaaatatattcaggcagcttgcaagactgggcaaatcaaagaagtagaaagaatctgtagagaaagcaactgctacgatcctgagcgagtcaagaattttcttaaggaagcaaaactaacagatcagctaccacttatcattgtgtgtgatcgatttgactttgtccatgatttggtgctctatttatatagaaataatcttcaaaagtatatagagatatatgtacagaaggtgaatccaagtcgacttcctgtagttattggaggattacttgatgttgactgttctgaagatgtcataaaaaacttgattcttgttgtaagaggtcaattctctactgatgagcttgttgctgaggttgaaaaaagaaacagattgaaactgcttctgccttggctagaggccagaattcatgagggctgtgaggagcctgctactcacaatgccttagccaaaatctacatagacagtaataacaacccggagagatttcttcgtgaaaatccctactatgacagtcgcgttgttggaaagtattgtgagaagagagatccacatctggcctgtgttgcttatgaacgtggccaatgtgatctggaacttattaatgtttgcaatgagaattccctcttcaaaagtctttctcgctacctggtacgtcgaaaggatccagaattgtggggcagcgtgctgctggaaagcaatccttacaggagacccctaattgaccaggttgtacaaacagctttgtctgagactcaggaccctgaagaagtgtcagtaactgtaaaggctttcatgactgcagaccttcctaatgaactcattgaactgctggagaaaattgtccttgataactctgtattcagtgaacacaggaatctgcaaaacctccttatcctcactgcaattaaggctgaccgtacacgtgttatggagtatattaaccgcctggataattatgatgccccagatattgccaatatcgccatcagcaatgagctgtttgaagaagcatttgccattttccggaaatttgatgtcaatacttcagcagttcaggtcttaattgagcatattggaaacttggatcgggcatatgagtttgctgaacgttgcaatgaacctgcggtctggagtcaacttgcaaaagcccagttgcagaaaggaatggtgaaagaagccattgattcttatatcaaagcagatgatccttcctcctacatggaagttgttcaggctgccaatactagtggaaactgggaagaactggtgaagtacttgcagatggcccgtaagaaggctcgagagtcctatgtggagacagaactgatattcgcactggctaaaacaaaccgccttgcagagttagaagaatttatcaatggaccaaataatgctcatatccaacaagttggtgaccgttgttatgatgaaaaaatgtatgatgctgctaagttgttgtacaataatgtttccaattttggacgtttggcatctaccctggttcacctgggtgaatatcaggcagctgttgatggggctaggaaagctaacagtactcgaacatggaaagaggtctgcttcgcctgtgtagatgggaaagaattccgtcttgctcagatgtgtggacttcatattgttgtacatgcagatgaattagaagaacttatcaactactatcaggatcgtggctattttgaagagctgatcaccatgttggaagcagcactgggacttgagcgagctcacatgggaatgtttactgaattagctattctatactctaaatttaagcctcagaaaatgagggagcacctggagctgttctggtctagagtgaatattcccaaggtgctaagagctgcagaacaagctcatctttgggcagaactggtgtttttgtatgacaagtatgaagaatatgataatgccataattaccatgatgaatcatccaactgatgcctggaaagaagggcaattcaaagatatcattaccaaggttgccaatgtggaactatactacagagcaatacagttctacttagaattcaagcctctgttgttaaatgatttgctgatggtgctgtctccacggttggatcacactcgtgcagtcaattatttcagcaaggttaacagtacactgggaaacgtattgcgtcagtcanaaccatacacaaatctgtgaatgatcatgacatctttatncaganaagatacaggcctgcacacataatctatgcacttg

SEQ ID NO: 414881 - DNA, 4230 bp, Homo sapiens
cagccgtttccggagtctgcgctgcgcccggttccgccattgcggctctcctggcccctggagcctccgcccccgacccgagctctttcgtctgcctgccagtttcctgcgtccccggagaggatcctgctgagcccagcctcccccctccccttctcctcctctcccttggagagcccgggcagccactgccccgcagccccagtgacaggaggagaccataacccccgacagcgccatggcccagattctgccaattcgttttcaggagcatctccagctccagaacctgggtatcaacccagcaaacattggcttcagtaccctgactatggagtctgacaaattcatctgcattagagaaaaagtaggagagcaggcccaggtggtaatcattgatatgaatgacccaagtaatccaattcgaagaccaatttcagcagacagcgccatcatgaatccagctagcaaagtaattgcactgaaagctgggaaaactcttcagatttttaacattgaaatgaaaagtaaaatgaaggctcataccatgactgatgatgtcaccttttggaaatggatctctttgaatacggttgctcttgttacggataatgcagtttatcactggagtatggaaggagagtctcagccagtgaaaatgtttgatcgccattctagccttgcagggtgccagattatcaattaccgtacagatgcaaaacaaaagtggttacttctgactggtatatctgcacagcaaaatcgtgtggtgggagctatgcagctatattctgtagataggaaagtgtctcagcccattgaaggacatgcagctagctttgcacagtttaagatggaaggaaatgcagaagaatcaacgttattttgttttgcagttcggggccaagctggagggaagttacatattattgaagttggcacaccacctacagggaaccagccctttccaaagaaggcagtggatgtcttctttcctccagaagcacaaaatgattttcctgttgcaatgcagatcagtgaaaagcatgatgtggtgttcttgataaccaagtatggttatatccacctctatgatcttgagactggtacctgcatctacatgaatagaatcagtggagaaacaatttttgttactgcacctcatgaagccacagctggaataattggagtaaacagaaagggacaagttctgtcagtgtgtgtggaagaagaaaacataattccttacatcaccaatgttctacaaaatcctgatttggctctgagaatggctgtacgtaataacttagccggtgctgaagaactctttgcccggaaatttaatgctctttttgcccagggaaattactcggaggcagcaaaggtggctgctaatgcaccaaagggaattcttcgtactccagacactatccgtcggttccagagtgtcccagcccagccaggtcaaacttctcctctacttcagtactttggtatccttttggaccagggacagctcaacaaatacgaatccttagagctttgtaggcctgtacttcagcaagggcgaaaacagcttttggagaaatggttaaaagaagataagctggaatgttctgaagaactgggtgatcttgtgaaatctgtggaccctacattggcacttagtgtgtacctaagggctaacgtcccaaataaagtcattcagtgctttgcagaaacaggtcaagtccaaaagattgttttatatgctaaaaaagttggatacactccagattggatatttctgctgagaaatgtaatgcgaatcagtccagatcagggacagcagtttgcccaaatgttagttcaagatgaagagcctcttgctgacatcacacagattgtagatgtctttatggaatacaatctaattcagcagtgtactgcattcttgcttgatgctctgaagaataatcgcccatctgaaggtcctttacagacgcggttacttgagatgaaccttatgcatgcgcctcaagttgcagatgctattctaggcaatcagatgttcacacattatgaccgggctcatattgctcaactgtgtgaaaaggctggcctactgcagcgtgcattagaacatttcactgatttatatgatataaaacgtgcagtggttcacacccatcttcttaaccctgagtggttagtcaactactttggttccttatcagtagaagactccctagaatgtctcagagccatgctgtctgccaacatccgtcagaatctgcagatttgtgttcaggtggcttctaaatatcatgaacaactgtcaactcagtctctgattgaactttttgaatctttcaagagttttgaaggtctcttttattttctgggatccattgttaactttagccaggacccagatgtgcactttaaatatattcaggcagcttgcaagactgggcaaatcaaagaagtagaaagaatctgtagagaaagcaactgctacgatcctgagcgagtcaagaattttcttaaggaagcaaaactaacagatcagctaccacttatcattgtgtgtgatcgatttgactttgtccatgatttggtgctctatttatatagaaataatcttcaaaagtatatagagatatatgtacagaaggtgaatccaagtcgacttcctgtagttattggaggattacttgatgttgactgttctgaagatgtcataaaaaacttgattcttgttgtaagaggtcaattctctactgatgagcttgttgctgaggttgaaaaaagaaacagattgaaactgcttctgccttggctagaggccagaattcatgagggctgtgaggagcctgctactcacaatgccttagccaaaatctacatagacagtaataacaacccggagagatttcttcgtgaaaatccctactatgacagtcgcgttgttggaaagtattgtgagaagagagatccacatctggcctgtgttgcttatgaacgtggccaatgtgatctggaacttattaatgtttgcaatgagaattccctcttcaaaagtctttctcgctacctggtacgtcgaaaggatccagaattgtggggcagcgtgctgctggaaagcaatccttacaggagacccctaattgaccaggttgtacaaacagctttgtctgagactcaggaccctgaagaagtgtcagtaactgtaaaggctttcatgactgcagaccttcctaatgaactcattgaactgctggagaaaattgtccttgataactctgtattcagtgaacacaggaatctgcaaaacctccttatcctcactgcaattaaggctgaccgtacacgtgttatggagtatattaaccgcctggataattatgatgccccagatattgccaatatcgccatcagcaatgagctgtttgaagaagcatttgccattttccggaaatttgatgtcaatacttcagcagttcaggtcttaattgagcatattggaaacttggatcgggcatatgagtttgctgaacgttgcaatgaacctgcggtctggagtcaacttgcaaaagcccagttgcagaaaggaatggtgaaagaagccattgattcttatatcaaagcagatgatccttcctcctacatggaagttgttcaggctgccaatactagtggaaactgggaagaactggtgaagtacttgcagatggcccgtaagaaggctcgagagtcctatgtggagacagaactgatattcgcactggctaaaacaaaccgccttgcagagttagaagaatttatcaatggaccaaataatgctcatatccaacaagttggtgaccgttgttatgatgaaaaaatgtatgatgctgctaagttgttgtacaataatgtttccaattttggacgtttggcatctaccctggttcacctgggtgaatatcaggcagctgttgatggggctaggaaagctaacagtactcgaacatggaaagaggtctgcttcgcctgtgtagatgggaaagaattccgtcttgctcagatgtgtggacttcatattgttgtacatgcagatgaattagaagaacttatcaactactatcaggatcgtggctattttgaagagctgatcaccatgttggaagcagcactgggacttgagcaaggcaggagagctgagcaagacaggagacctgatcagccaggagacctgagcaagccagg

SEQ ID NO: 414882 - DNA, 3851 bp, Homo sapiens
cagccgtttccggagtctgcgctgcgcccggttccgccattgcggctctcctggcccctggagcctccgcccccgacccgagctctttcgtctgcctgccagtttcctgcgtccccggagaggatcctgctgagcccagcctcccccctccccttctcctcctctcccttggagagcccgggcagccactgccccgcagccccagtgacaggaggagaccataacccccgacagcgccatggcccagattctgccaattcgttttcaggagcatctccagctccagaacctgggtatcaacccagcaaacattggcttcagtaccctgactatggagtctgacaaattcatctgcattagagaaaaagtaggagagcaggcccaggtggtaatcattgatatgaatgacccaagtaatccaattcgaagaccaatttcagcagacagcgccatcatgaatccagctagcaaagtaattgcactgaaagctgggaaaactcttcagatttttaacattgaaatgaaaagtaaaatgaaggctcataccatgactgatgatgtcaccttttggaaatggatctctttgaatacggttgctcttgttacggataatgcagtttatcactggagtatggaaggagagtctcagccagtgaaaatgtttgatcgccattctagccttgcagggtgccagattatcaattaccgtacagatgcaaaacaaaagtggttacttctgactggtatatctgcacagcaaaatcgtgtggtgggagctatgcagctatattctgtagataggaaagtgtctcagcccattgaaggacatgcagctagctttgcacagtttaagatggaaggaaatgcagaagaatcaacgttattttgttttgcagttcggggccaagctggagggaagttacatattattgaagttggcacaccacctacagggaaccagccctttccaaagaaggcagtggatgtcttctttcctccagaagcacaaaatgattttcctgttgcaatgcagatcagtgaaaagcatgatgtggtgttcttgataaccaagtatggttatatccacctctatgatcttgagactggtacctgcatctacatgaatagaatcagtggagaaacaatttttgttactgcacctcatgaagccacagctggaataattggagtaaacagaaagggacaagttctgtcagtgtgtgtggaagaagaaaacataattccttacatcaccaatgttctacaaaatcctgatttggctctgagaatggctgtacgtaataacttagccggtgctgaagaactctttgcccggaaatttaatgctctttttgcccagggaaattactcggaggcagcaaaggtggctgctaatgcaccaaagggaattcttcgtactccagacactatccgtcggttccagagtgtcccagcccagccaggtcaaacttctcctctacttcagtactttggtatccttttggaccagggacagctcaacaaatacgaatccttagagctttgtaggcctgtacttcagcaagggcgaaaacagcttttggagaaatggttaaaagaagataagctggaatgttctgaagaactgggtgatcttgtgaaatctgtggaccctacattggcacttagtgtgtacctaagggctaacgtcccaaataaagtcattcagtgctttgcagaaacaggtcaagtccaaaagattgttttatatgctaaaaaagttggatacactccagattggatatttctgctgagaaatgtaatgcgaatcagtccagatcagggacagcagtttgcccaaatgttagttcaagatgaagagcctcttgctgacatcacacagattgtagatgtctttatggaatacaatctaattcagcagtgtactgcattcttgcttgatgctctgaagaataatcgcccatctgaaggtcctttacagacgcggttacttgagatgaaccttatgcatgcgcctcaagttgcagatgctattctaggcaatcagatgttcacacattatgaccgggctcatattgctcaactgtgtgaaaaggctggcctactgcagcgtgcattagaacatttcactgatttatatgatataaaacgtgcagtggttcacacccatcttcttaaccctgagtggttagtcaactactttggttccttatcagtagaagactccctagaatgtctcagagccatgctgtctgccaacatccgtcagaatctgcagatttgtgttcaggtggcttctaaatatcatgaacaactgtcaactcagtctctgattgaactttttgaatctttcaagagttttgaaggtctcttttattttctgggatccattgttaactttagccaggacccagatgtgcactttaaatatattcaggcagcttgcaagactgggcaaatcaaagaagtagaaagaatctgtagagaaagcaactgctacgatcctgagcgagtcaagaattttcttaaggaagcaaaactaacagatcagctaccacttatcattgtgtgtgatcgatttgactttgtccatgatttggtgctctatttatatagaaataatcttcaaaagtatatagagatatatgtacagaaggtgaatccaagtcgacttcctgtagttattggaggattacttgatgttgactgttctgaagatgtcataaaaaacttgattcttgttgtaagaggtcaattctctactgatgagcttgttgctgaggttgaaaaaagaaacagattgaaactgcttctgccttggctagaggccagaattcatgagggctgtgaggagcctgctactcacaatgccttagccaaaatctacatagacagtaataacaacccggagagatttcttcgtgaaaatccctactatgacagtcgcgttgttggaaagtattgtgagaagagagatccacatctggcctgtgttgcttatgaacgtggccaatgtgatctggaacttattaatgtttgcaatgagaattccctcttcaaaagtctttctcgctacctggtacgtcgaaaggatccagaattgtggggcagcgtgctgctggaaagcaatccttacaggagacccctaattgaccaggttgtacaaacagctttgtctgagactcaggaccctgaagaagtgtcagtaactgtaaaggctttcatgactgcagaccttcctaatgaactcattgaactgctggagaaaattgtccttgataactctgtattcagtgaacacaggaatctgcaaaacctccttatcctcactgcaattaaggctgaccgtacacgtgttatggagtatattaaccgcctggataattatgatgccccagatattgccaatatcgccatcagcaatgagctgtttgaagaagcatttgccattttccggaaatttgatgtcaatacttcagcagttcaggtcttaattgagcatattggaaacttggatcgggcatatgagtttgctgaacgttgcaatgaacctgcggtctggagtcaacttgcaaaagcccagttgcagaaaggaatggtgaaagaagccattgattcttatatcaaagcagatgatccttcctcctacatggaagttgttcaggctgccaatactagtggaaactgggaagaactggtgaagtacttgcagatggcccgtaagaaggctcgagagtcctatgtggagacagaactgatattcgcactggctaaaacaaaccgccttgcagagttagaagaatttataaggggcgttaacccaatggtccgagctcgaatcgtaacctggc

SEQ ID NO: 414883 - DNA, 3540 bp, Homo sapiens
cagccgtttccggagtctgcgctgcgcccggttccgccattgcggctctcctggcccctggagcctccgcccccgacccgagctctttcgtctgcctgccagtttcctgcgtccccggagaggatcctgctgagcccagcctcccccctccccttctcctcctctcccttggagagcccgggcagccactgccccgcagccccagtgacaggaggagaccataacccccgacagcgccatggcccagattctgccaattcgttttcaggagcatctccagctccagaacctgggtatcaacccagcaaacattggcttcagtaccctgactatggagtctgacaaattcatctgcattagagaaaaagtaggagagcaggcccaggtggtaatcattgatatgaatgacccaagtaatccaattcgaagaccaatttcagcagacagcgccatcatgaatccagctagcaaagtaattgcactgaaagctgggaaaactcttcagatttttaacattgaaatgaaaagtaaaatgaaggctcataccatgactgatgatgtcaccttttggaaatggatctctttgaatacggttgctcttgttacggataatgcagtttatcactggagtatggaaggagagtctcagccagtgaaaatgtttgatcgccattctagccttgcagggtgccagattatcaattaccgtacagatgcaaaacaaaagtggttacttctgactggtatatctgcacagcaaaatcgtgtggtgggagctatgcagctatattctgtagataggaaagtgtctcagcccattgaaggacatgcagctagctttgcacagtttaagatggaaggaaatgcagaagaatcaacgttattttgttttgcagttcggggccaagctggagggaagttacatattattgaagttggcacaccacctacagggaaccagccctttccaaagaaggcagtggatgtcttctttcctccagaagcacaaaatgattttcctgttgcaatgcagatcagtgaaaagcatgatgtggtgttcttgataaccaagtatggttatatccacctctatgatcttgagactggtacctgcatctacatgaatagaatcagtggagaaacaatttttgttactgcacctcatgaagccacagctggaataattggagtaaacagaaagggacaagttctgtcagtgtgtgtggaagaagaaaacataattccttacatcaccaatgttctacaaaatcctgatttggctctgagaatggctgtacgtaataacttagccggtgctgaagaactctttgcccggaaatttaatgctctttttgcccagggaaattactcggaggcagcaaaggtggctgctaatgcaccaaagggaattcttcgtactccagacactatccgtcggttccagagtgtcccagcccagccaggtcaaacttctcctctacttcagtactttggtatccttttggaccagggacagctcaacaaatacgaatccttagagctttgtaggcctgtacttcagcaagggcgaaaacagcttttggagaaatggttaaaagaagataagctggaatgttctgaagaactgggtgatcttgtgaaatctgtggaccctacattggcacttagtgtgtacctaagggctaacgtcccaaataaagtcattcagtgctttgcagaaacaggtcaagtccaaaagattgttttatatgctaaaaaagttggatacactccagattggatatttctgctgagaaatgtaatgcgaatcagtccagatcagggacagcagtttgcccaaatgttagttcaagatgaagagcctcttgctgacatcacacagattgtagatgtctttatggaatacaatctaattcagcagtgtactgcattcttgcttgatgctctgaagaataatcgcccatctgaaggtcctttacagacgcggttacttgagatgaaccttatgcatgcgcctcaagttgcagatgctattctaggcaatcagatgttcacacattatgaccgggctcatattgctcaactgtgtgaaaaggctggcctactgcagcgtgcattagaacatttcactgatttatatgatataaaacgtgcagtggttcacacccatcttcttaaccctgagtggttagtcaactactttggttccttatcagtagaagactccctagaatgtctcagagccatgctgtctgccaacatccgtcagaatctgcagatttgtgttcaggtggcttctaaatatcatgaacaactgtcaactcagtctctgattgaactttttgaatctttcaagagttttgaaggtctcttttattttctgggatccattgttaactttagccaggacccagatgtgcactttaaatatattcaggcagcttgcaagactgggcaaatcaaagaagtagaaagaatctgtagagaaagcaactgctacgatcctgagcgagtcaagaattttcttaaggaagcaaaactaacagatcagctaccacttatcattgtgtgtgatcgatttgactttgtccatgatttggtgctctatttatatagaaataatcttcaaaagtatatagagatatatgtacagaaggtgaatccaagtcgacttcctgtagttattggaggattacttgatgttgactgttctgaagatgtcataaaaaacttgattcttgttgtaagaggtcaattctctactgatgagcttgttgctgaggttgaaaaaagaaacagattgaaactgcttctgccttggctagaggccagaattcatgagggctgtgaggagcctgctactcacaatgccttagccaaaatctacatagacagtaataacaacccggagagatttcttcgtgaaaatccctactatgacagtcgcgttgttggaaagtattgtgagaagagagatccacatctggcctgtgttgcttatgaacgtggccaatgtgatctggaacttattaatgtttgcaatgagaattccctcttcaaaagtctttctcgctacctggtacgtcgaaaggatccagaattgtggggcagcgtgctgctggaaagcaatccttacaggagacccctaattgaccaggttgtacaaacagctttgtctgagactcaggaccctgaagaagtgtcagtaactgtaaaggctttcatgactgcagaccttcctaatgaactcattgaactgctggagaaaattgtccttgataactctgtattcagtgaacacaggaatctgcaaaacctccttatcctcactgcaattaaggctgaccgtacacgtgttatggagtatattaaccgcctggataattatgatgccccagatattgccaatatcgccatcagcaatgagctgtttgaagaagcatttgccattttccggaaatttgatgtcaatacttcagcagttcaggtcattaattgagcatattggaaacttggatcgtagattaggtccgagctgtt

SEQ ID NO: 414884 - DNA, 3378 bp, Homo sapiens
cagccgtttccggagtctgcgctgcgcccggttccgccattgcggctctcctggcccctggagcctccgcccccgacccgagctctttcgtctgcctgccagtttcctgcgtccccggagaggatcctgctgagcccagcctcccccctccccttctcctcctctcccttggagagcccgggcagccactgccccgcagccccagtgacaggaggagaccataacccccgacagcgccatggcccagattctgccaattcgttttcaggagcatctccagctccagaacctgggtatcaacccagcaaacattggcttcagtaccctgactatggagtctgacaaattcatctgcattagagaaaaagtaggagagcaggcccaggtggtaatcattgatatgaatgacccaagtaatccaattcgaagaccaatttcagcagacagcgccatcatgaatccagctagcaaagtaattgcactgaaagctgggaaaactcttcagatttttaacattgaaatgaaaagtaaaatgaaggctcataccatgactgatgatgtcaccttttggaaatggatctctttgaatacggttgctcttgttacggataatgcagtttatcactggagtatggaaggagagtctcagccagtgaaaatgtttgatcgccattctagccttgcagggtgccagattatcaattaccgtacagatgcaaaacaaaagtggttacttctgactggtatatctgcacagcaaaatcgtgtggtgggagctatgcagctatattctgtagataggaaagtgtctcagcccattgaaggacatgcagctagctttgcacagtttaagatggaaggaaatgcagaagaatcaacgttattttgttttgcagttcggggccaagctggagggaagttacatattattgaagttggcacaccacctacagggaaccagccctttccaaagaaggcagtggatgtcttctttcctccagaagcacaaaatgattttcctgttgcaatgcagatcagtgaaaagcatgatgtggtgttcttgataaccaagtatggttatatccacctctatgatcttgagactggtacctgcatctacatgaatagaatcagtggagaaacaatttttgttactgcacctcatgaagccacagctggaataattggagtaaacagaaagggacaagttctgtcagtgtgtgtggaagaagaaaacataattccttacatcaccaatgttctacaaaatcctgatttggctctgagaatggctgtacgtaataacttagccggtgctgaagaactctttgcccggaaatttaatgctctttttgcccagggaaattactcggaggcagcaaaggtggctgctaatgcaccaaagggaattcttcgtactccagacactatccgtcggttccagagtgtcccagcccagccaggtcaaacttctcctctacttcagtactttggtatccttttggaccagggacagctcaacaaatacgaatccttagagctttgtaggcctgtacttcagcaagggcgaaaacagcttttggagaaatggttaaaagaagataagctggaatgttctgaagaactgggtgatcttgtgaaatctgtggaccctacattggcacttagtgtgtacctaagggctaacgtcccaaataaagtcattcagtgctttgcagaaacaggtcaagtccaaaagattgttttatatgctaaaaaagttggatacactccagattggatatttctgctgagaaatgtaatgcgaatcagtccagatcagggacagcagtttgcccaaatgttagttcaagatgaagagcctcttgctgacatcacacagattgtagatgtctttatggaatacaatctaattcagcagtgtactgcattcttgcttgatgctctgaagaataatcgcccatctgaaggtcctttacagacgcggttacttgagatgaaccttatgcatgcgcctcaagttgcagatgctattctaggcaatcagatgttcacacattatgaccgggctcatattgctcaactgtgtgaaaaggctggcctactgcagcgtgcattagaacatttcactgatttatatgatataaaacgtgcagtggttcacacccatcttcttaaccctgagtggttagtcaactactttggttccttatcagtagaagactccctagaatgtctcagagccatgctgtctgccaacatccgtcagaatctgcagatttgtgttcaggtggcttctaaatatcatgaacaactgtcaactcagtctctgattgaactttttgaatctttcaagagttttgaaggtctcttttattttctgggatccattgttaactttagccaggacccagatgtgcactttaaatatattcaggcagcttgcaagactgggcaaatcaaagaagtagaaagaatctgtagagaaagcaactgctacgatcctgagcgagtcaagaattttcttaaggaagcaaaactaacagatcagctaccacttatcattgtgtgtgatcgatttgactttgtccatgatttggtgctctatttatatagaaataatcttcaaaagtatatagagatatatgtacagaaggtgaatccaagtcgacttcctgtagttattggaggattacttgatgttgactgttctgaagatgtcataaaaaacttgattcttgttgtaagaggtcaattctctactgatgagcttgttgctgaggttgaaaaaagaaacagattgaaactgcttctgccttggctagaggccagaattcatgagggctgtgaggagcctgctactcacaatgccttagccaaaatctacatagacagtaataacaacccggagagatttcttcgtgaaaatccctactatgacagtcgcgttgttggaaagtattgtgagaagagagatccacatctggcctgtgttgcttatgaacgtggccaatgtgatctggaacttattaatgtttgcaatgagaattccctcttcaaaagtctttctcgctacctggtacgtcgaaaggatccagaattgtggggcagcgtgctgctggaaagcaatccttacaggagacccctaattgaccaggttgtacaaacagctttgtctgagactcaggaccctgaagaagtgtcagtaactgtaaaggctttcatgactgcagaccttcctaatgaactcattgaactgctggagaaaattgtccttgataactctgtattcagtgaacacaggaatctgcaaactctatctactgcatagctgacgtaccgtgtatgagaatacgctgatatagagcaactatcaga

SEQ ID NO: 414885 - DNA, 3135 bp, Homo sapiens
cagccgtttccggagtctgcgctgcgcccggttccgccattgcggctctcctggcccctggagcctccgcccccgacccgagctctttcgtctgcctgccagtttcctgcgtccccggagaggatcctgctgagcccagcctcccccctccccttctcctcctctcccttggagagcccgggcagccactgccccgcagccccagtgacaggaggagaccataacccccgacagcgccatggcccagattctgccaattcgttttcaggagcatctccagctccagaacctgggtatcaacccagcaaacattggcttcagtaccctgactatggagtctgacaaattcatctgcattagagaaaaagtaggagagcaggcccaggtggtaatcattgatatgaatgacccaagtaatccaattcgaagaccaatttcagcagacagcgccatcatgaatccagctagcaaagtaattgcactgaaagctgggaaaactcttcagatttttaacattgaaatgaaaagtaaaatgaaggctcataccatgactgatgatgtcaccttttggaaatggatctctttgaatacggttgctcttgttacggataatgcagtttatcactggagtatggaaggagagtctcagccagtgaaaatgtttgatcgccattctagccttgcagggtgccagattatcaattaccgtacagatgcaaaacaaaagtggttacttctgactggtatatctgcacagcaaaatcgtgtggtgggagctatgcagctatattctgtagataggaaagtgtctcagcccattgaaggacatgcagctagctttgcacagtttaagatggaaggaaatgcagaagaatcaacgttattttgttttgcagttcggggccaagctggagggaagttacatattattgaagttggcacaccacctacagggaaccagccctttccaaagaaggcagtggatgtcttctttcctccagaagcacaaaatgattttcctgttgcaatgcagatcagtgaaaagcatgatgtggtgttcttgataaccaagtatggttatatccacctctatgatcttgagactggtacctgcatctacatgaatagaatcagtggagaaacaatttttgttactgcacctcatgaagccacagctggaataattggagtaaacagaaagggacaagttctgtcagtgtgtgtggaagaagaaaacataattccttacatcaccaatgttctacaaaatcctgatttggctctgagaatggctgtacgtaataacttagccggtgctgaagaactctttgcccggaaatttaatgctctttttgcccagggaaattactcggaggcagcaaaggtggctgctaatgcaccaaagggaattcttcgtactccagacactatccgtcggttccagagtgtcccagcccagccaggtcaaacttctcctctacttcagtactttggtatccttttggaccagggacagctcaacaaatacgaatccttagagctttgtaggcctgtacttcagcaagggcgaaaacagcttttggagaaatggttaaaagaagataagctggaatgttctgaagaactgggtgatcttgtgaaatctgtggaccctacattggcacttagtgtgtacctaagggctaacgtcccaaataaagtcattcagtgctttgcagaaacaggtcaagtccaaaagattgttttatatgctaaaaaagttggatacactccagattggatatttctgctgagaaatgtaatgcgaatcagtccagatcagggacagcagtttgcccaaatgttagttcaagatgaagagcctcttgctgacatcacacagattgtagatgtctttatggaatacaatctaattcagcagtgtactgcattcttgcttgatgctctgaagaataatcgcccatctgaaggtcctttacagacgcggttacttgagatgaaccttatgcatgcgcctcaagttgcagatgctattctaggcaatcagatgttcacacattatgaccgggctcatattgctcaactgtgtgaaaaggctggcctactgcagcgtgcattagaacatttcactgatttatatgatataaaacgtgcagtggttcacacccatcttcttaaccctgagtggttagtcaactactttggttccttatcagtagaagactccctagaatgtctcagagccatgctgtctgccaacatccgtcagaatctgcagatttgtgttcaggtggcttctaaatatcatgaacaactgtcaactcagtctctgattgaactttttgaatctttcaagagttttgaaggtctcttttattttctgggatccattgttaactttagccaggacccagatgtgcactttaaatatattcaggcagcttgcaagactgggcaaatcaaagaagtagaaagaatctgtagagaaagcaactgctacgatcctgagcgagtcaagaattttcttaaggaagcaaaactaacagatcagctaccacttatcattgtgtgtgatcgatttgactttgtccatgatttggtgctctatttatatagaaataatcttcaaaagtatatagagatatatgtacagaaggtgaatccaagtcgacttcctgtagttattggaggattacttgatgttgactgttctgaagatgtcataaaaaacttgattcttgttgtaagaggtcaattctctactgatgagcttgttgctgaggttgaaaaaagaaacagattgaaactgcttctgccttggctagaggccagaattcatgagggctgtgaggagcctgctactcacaatgccttagccaaaatctacatagacagtaataacaacccggagagatttcttcgtgaaaatccctactatgacagtcgcgttgttggaaagtattgtgagaagagagatccacatctggcctgtgttgcttatgaacgtggccaatgtgatctggaacttattaatgtgagtactgctagctgaatatgtagagaagctgcatttttaaaaacctgttacatgagagtttcagggtaattttaggtaatatgggacatttggggacg

SEQ ID NO: 414886 - DNA, 3482 bp, Homo sapiens
cagccgtttccggagtctgcgctgcgcccggttccgccattgcggctctcctggcccctggagcctccgcccccgacccgagctctttcgtctgcctgccagtttcctgcgtccccggagaggatcctgctgagcccagcctcccccctccccttctcctcctctcccttggagagcccgggcagccactgccccgcagccccagtgacaggaggagaccataacccccgacagcgccatggcccagattctgccaattcgttttcaggagcatctccagctccagaacctgggtatcaacccagcaaacattggcttcagtaccctgactatggagtctgacaaattcatctgcattagagaaaaagtaggagagcaggcccaggtggtaatcattgatatgaatgacccaagtaatccaattcgaagaccaatttcagcagacagcgccatcatgaatccagctagcaaagtaattgcactgaaagctgggaaaactcttcagatttttaacattgaaatgaaaagtaaaatgaaggctcataccatgactgatgatgtcaccttttggaaatggatctctttgaatacggttgctcttgttacggataatgcagtttatcactggagtatggaaggagagtctcagccagtgaaaatgtttgatcgccattctagccttgcagggtgccagattatcaattaccgtacagatgcaaaacaaaagtggttacttctgactggtatatctgcacagcaaaatcgtgtggtgggagctatgcagctatattctgtagataggaaagtgtctcagcccattgaaggacatgcagctagctttgcacagtttaagatggaaggaaatgcagaagaatcaacgttattttgttttgcagttcggggccaagctggagggaagttacatattattgaagttggcacaccacctacagggaaccagccctttccaaagaaggcagtggatgtcttctttcctccagaagcacaaaatgattttcctgttgcaatgcagatcagtgaaaagcatgatgtggtgttcttgataaccaagtatggttatatccacctctatgatcttgagactggtacctgcatctacatgaatagaatcagtggagaaacaatttttgttactgcacctcatgaagccacagctggaataattggagtaaacagaaagggacaagttctgtcagtgtgtgtggaagaagaaaacataattccttacatcaccaatgttctacaaaatcctgatttggctctgagaatggctgtacgtaataacttagccggtgctgaagaactctttgcccggaaatttaatgctctttttgcccagggaaattactcggaggcagcaaaggtggctgctaatgcaccaaagggaattcttcgtactccagacactatccgtcggttccagagtgtcccagcccagccaggtcaaacttctcctctacttcagtactttggtatccttttggaccagggacagctcaacaaatacgaatccttagagctttgtaggcctgtacttcagcaagggcgaaaacagcttttggagaaatggttaaaagaagataagctggaatgttctgaagaactgggtgatcttgtgaaatctgtggaccctacattggcacttagtgtgtacctaagggctaacgtcccaaataaagtcattcagtgctttgcagaaacaggtcaagtccaaaagattgttttatatgctaaaaaagttggatacactccagattggatatttctgctgagaaatgtaatgcgaatcagtccagatcagggacagcagtttgcccaaatgttagttcaagatgaagagcctcttgctgacatcacacagattgtagatgtctttatggaatacaatctaattcagcagtgtactgcattcttgcttgatgctctgaagaataatcgcccatctgaaggtcctttacagacgcggttacttgagatgaaccttatgcatgcgcctcaagttgcagatgctattctaggcaatcagatgttcacacattatgaccgggctcatattgctcaactgtgtgaaaaggctggcctactgcagcgtgcattagaacatttcactgatttatatgatataaaacgtgcagtggttcacacccatcttcttaaccctgagtggttagtcaactactttggttccttatcagtagaagactccctagaatgtctcagagccatgctgtctgccaacatccgtcagaatctgcagatttgtgttcaggtggcttctaaatatcatgaacaactgtcaactcagtctctgattgaactttttgaatctttcaagagttttgaaggtctcttttattttctgggatccattgttaactttagccaggacccagatgtgcactttaaatatattcaggcagcttgcaagactgggcaaatcaaagaagtagaaagaatctgtagagaaagcaactgctacgatcctgagcgagtcaagaattttcttaaggaagcaaaactaacagatcagctaccacttatcattgtgtgtgatcgatttgactttgtccatgatttggtgctctatttatatagaaataatcttcaaaagtatatagagatatatgtacagaaggtaagtaatatgtaggtaatgtaaaggtataatcttactatagattttatttctcatattctggaaatccttttgaaactctgtgctcaataagagtggtctgcagcttttaacgtggggattttttgtttttgtttttgttttggagacagggtcttgctctgtcacccatgctggaatacagtggcacaatcacagctcactctaaccttaaactcctgggctcaagcagtcctcctgccttagcctccaagtatctgggactgcaggtgcatactaccatgcccagcctgcttttaatactttttccccagcagaatcctttcttggaataaaattctacgtgcttccctagcaagccgactcagggaagggggaaaaaaaaaacatgcatgccaagtgtgtaaaatataagaatagaactgctattattgaaaaagttgggtggcctagggccttactaacttgatagaccctgaggtatccatgtagactccaaagcagagttttcaaaccatcttaaatacagatattagataattcaccttctaactgtagaaacaggcagtattgctataatgggagcctttttattagacagtcttgcatagtcatctttgactgtatcttctttggacttatttatcatatggaacaatgtttcggtaactaaccaaaccggtagagacagaatatagtatatgtgctttcaatacttattaaaccatgaagtcttgtttttagctggacttcctgctaaattcctctatctagttgcaaatttagaccctcagtttattactgaatttaaaaactgaacttaaag

SEQ ID NO: 414887 - DNA, 2472 bp, Homo sapiens
cagccgtttccggagtctgcgctgcgcccggttccgccattgcggctctcctggcccctggagcctccgcccccgacccgagctctttcgtctgcctgccagtttcctgcgtccccggagaggatcctgctgagcccagcctcccccctccccttctcctcctctcccttggagagcccgggcagccactgccccgcagccccagtgacaggaggagaccataacccccgacagcgccatggcccagattctgccaattcgttttcaggagcatctccagctccagaacctgggtatcaacccagcaaacattggcttcagtaccctgactatggagtctgacaaattcatctgcattagagaaaaagtaggagagcaggcccaggtggtaatcattgatatgaatgacccaagtaatccaattcgaagaccaatttcagcagacagcgccatcatgaatccagctagcaaagtaattgcactgaaagctgggaaaactcttcagatttttaacattgaaatgaaaagtaaaatgaaggctcataccatgactgatgatgtcaccttttggaaatggatctctttgaatacggttgctcttgttacggataatgcagtttatcactggagtatggaaggagagtctcagccagtgaaaatgtttgatcgccattctagccttgcagggtgccagattatcaattaccgtacagatgcaaaacaaaagtggttacttctgactggtatatctgcacagcaaaatcgtgtggtgggagctatgcagctatattctgtagataggaaagtgtctcagcccattgaaggacatgcagctagctttgcacagtttaagatggaaggaaatgcagaagaatcaacgttattttgttttgcagttcggggccaagctggagggaagttacatattattgaagttggcacaccacctacagggaaccagccctttccaaagaaggcagtggatgtcttctttcctccagaagcacaaaatgattttcctgttgcaatgcagatcagtgaaaagcatgatgtggtgttcttgataaccaagtatggttatatccacctctatgatcttgagactggtacctgcatctacatgaatagaatcagtggagaaacaatttttgttactgcacctcatgaagccacagctggaataattggagtaaacagaaagggacaagttctgtcagtgtgtgtggaagaagaaaacataattccttacatcaccaatgttctacaaaatcctgatttggctctgagaatggctgtacgtaataacttagccggtgctgaagaactctttgcccggaaatttaatgctctttttgcccagggaaattactcggaggcagcaaaggtggctgctaatgcaccaaagggaattcttcgtactccagacactatccgtcggttccagagtgtcccagcccagccaggtcaaacttctcctctacttcagtactttggtatccttttggaccagggacagctcaacaaatacgaatccttagagctttgtaggcctgtacttcagcaagggcgaaaacagcttttggagaaatggttaaaagaagataagctggaatgttctgaagaactgggtgatcttgtgaaatctgtggaccctacattggcacttagtgtgtacctaagggctaacgtcccaaataaagtcattcagtgctttgcagaaacaggtcaagtccaaaagattgttttatatgctaaaaaagttggatacactccagattggatatttctgctgagaaatgtaatgcgaatcagtccagatcagggacagcagtttgcccaaatgttagttcaagatgaagagcctcttgctgacatcacacagattgtagatgtctttatggaatacaatctaattcagcagtgtactgcattcttgcttgatgctctgaagaataatcgcccatctgaaggtcctttacagacgcggttacttgagatgaaccttatgcatgcgcctcaagttgcagatgctattctaggcaatcagatgttcacacattatgaccgggctcatattgctcaactgtgtgaaaaggctggcctactgcagcgtgcattagaacatttcactgatttatatgatataaaacgtgcagtggttcacacccatcttcttaaccctgagtggttagtcaactactttggttccttatcagtagaagactccctagaatgtctcagagccatgctgtctgccaacatccgtcagaatctgcagatttgtgttcaggtggcttctaaatatcatgaacaactgtcaactcagtctctgattgaactttttgaatctttcaagagttttgaaggtctcttttattttctgggatccattgttaactttagccaggacccagatgtgcactttaaatatattcaggcagctcgcccctgagttagcagctcgcccctgag

SEQ ID NO: 414888 - DNA, 2340 bp, Homo sapiens
cagccgtttccggagtctgcgctgcgcccggttccgccattgcggctctcctggcccctggagcctccgcccccgacccgagctctttcgtctgcctgccagtttcctgcgtccccggagaggatcctgctgagcccagcctcccccctccccttctcctcctctcccttggagagcccgggcagccactgccccgcagccccagtgacaggaggagaccataacccccgacagcgccatggcccagattctgccaattcgttttcaggagcatctccagctccagaacctgggtatcaacccagcaaacattggcttcagtaccctgactatggagtctgacaaattcatctgcattagagaaaaagtaggagagcaggcccaggtggtaatcattgatatgaatgacccaagtaatccaattcgaagaccaatttcagcagacagcgccatcatgaatccagctagcaaagtaattgcactgaaagctgggaaaactcttcagatttttaacattgaaatgaaaagtaaaatgaaggctcataccatgactgatgatgtcaccttttggaaatggatctctttgaatacggttgctcttgttacggataatgcagtttatcactggagtatggaaggagagtctcagccagtgaaaatgtttgatcgccattctagccttgcagggtgccagattatcaattaccgtacagatgcaaaacaaaagtggttacttctgactggtatatctgcacagcaaaatcgtgtggtgggagctatgcagctatattctgtagataggaaagtgtctcagcccattgaaggacatgcagctagctttgcacagtttaagatggaaggaaatgcagaagaatcaacgttattttgttttgcagttcggggccaagctggagggaagttacatattattgaagttggcacaccacctacagggaaccagccctttccaaagaaggcagtggatgtcttctttcctccagaagcacaaaatgattttcctgttgcaatgcagatcagtgaaaagcatgatgtggtgttcttgataaccaagtatggttatatccacctctatgatcttgagactggtacctgcatctacatgaatagaatcagtggagaaacaatttttgttactgcacctcatgaagccacagctggaataattggagtaaacagaaagggacaagttctgtcagtgtgtgtggaagaagaaaacataattccttacatcaccaatgttctacaaaatcctgatttggctctgagaatggctgtacgtaataacttagccggtgctgaagaactctttgcccggaaatttaatgctctttttgcccagggaaattactcggaggcagcaaaggtggctgctaatgcaccaaagggaattcttcgtactccagacactatccgtcggttccagagtgtcccagcccagccaggtcaaacttctcctctacttcagtactttggtatccttttggaccagggacagctcaacaaatacgaatccttagagctttgtaggcctgtacttcagcaagggcgaaaacagcttttggagaaatggttaaaagaagataagctggaatgttctgaagaactgggtgatcttgtgaaatctgtggaccctacattggcacttagtgtgtacctaagggctaacgtcccaaataaagtcattcagtgctttgcagaaacaggtcaagtccaaaagattgttttatatgctaaaaaagttggatacactccagattggatatttctgctgagaaatgtaatgcgaatcagtccagatcagggacagcagtttgcccaaatgttagttcaagatgaagagcctcttgctgacatcacacagattgtagatgtctttatggaatacaatctaattcagcagtgtactgcattcttgcttgatgctctgaagaataatcgcccatctgaaggtcctttacagacgcggttacttgagatgaaccttatgcatgcgcctcaagttgcagatgctattctaggcaatcagatgttcacacattatgaccgggctcatattgctcaactgtgtgaaaaggctggcctactgcagcgtgcattagaacatttcactgatttatatgatataaaacgtgcagtggttcacacccatcttcttaaccctgagtggttagtcaactactttggttccttatcagtagaagactccctagaatgtctcagagccatgctgtctgccaacatccgtcagaatctgcagatttgtgttcaggtggcttctaaatatcatgacaatcacatcatggggtcctctaggtcgcc

SEQ ID NO: 414889 - DNA, 1317 bp, Homo sapiens
  misc_feature (262)..(262): n is a, c, g, or t
cgttgtgacggcgactcgtgttttgttgtcgctgtgcgttgcgctcgtgtgtccgcccctgtcggggttcatccgcgcgctggccacattttgggtgcttcttcggcaatcgggtttacccctcttgtcactgcaacccggggggttgtcaaccaccagtgggatactgggtctttcgtcctgatggttggtcccccagacagcccggttcgccccacctaaggggccctgttacatatgacgggggccacctgtctggcantgttctatagcaatagtgggggaaccgcattggtttagaggccttttgacgctcattttcgagattcaggccaacgtgtcggtgaacatgtgttcaatgaatctggggagcctgccatcccgtgtacgatcgtctgattagtgttgtcttttgttggcactgacagtcttgcatggtcaatatgccagggtttttgctcttagcttttcttttggataaaacagatcttaaatgcatgttagaccatacgtagtttgtaagctggttacatacactaaattttaagagagttccatattagagtgttctttgtttcgtttaaacactacagagtgccaatcaggttcttcacacagattgatattgagcagttctttaaagaaagagggggaagataaaagccccagtgttatacaacacttggaactattccccttcgaaataaattctaaaatgatgtggaatgtgaaataaggtgtttaacatacggtgatcccagttgtataggcttagtctccaagtatgcagtccttcctgacatagcaggcgactagtacatccctgaggtttgtgtatgttggatattgtggtgttttagatcactgagtgtacagaagagagaaattcaaacaaaatattgctgttcttcagttttgtttgtggaatttgaaattactcaaatttaaaataaattactggactgtggaaataacatagaattgaagttttaattaaataccactcaaacgaaaagaacagtagtttttgtagttttatattggatactgaggcattagggaggcatgaaaggaagaggaatgaggattgagacatgtgaagacattgtgcattatatcaatgtgcattcctgtagttcattaacaaggtacatgcaatagtctaaagaaccagagtcactactatagtggcttaacatttaatctgtctccaatattttaaccaagtgacaccgaggtttttatcgaagcatttcacttaaatgaacaaatcatggctgttatattaacttgaaataaaatatatttaaacatgta

SEQ ID NO: 414890 - DNA, 1407 bp, Homo sapiens
cagccgtttccggagtctgcgctgcgcccggttccgccattgcggctctcctggcccctggagcctccgcccccgacccgagctctttcgtctgcctgccagtttcctgcgtccccggagaggatcctgctgagcccagcctcccccctccccttctcctcctctcccttggagagcccgggcagccactgccccgcagccccagtgacaggaggagaccataacccccgacagcgccatggcccagattctgccaattcgttttcaggagcatctccagctccagaacctgggtatcaacccagcaaacattggcttcagtaccctgactatggagtctgacaaattcatctgcattagagaaaaagtaggagagcaggcccaggtggtaatcattgatatgaatgacccaagtaatccaattcgaagaccaatttcagcagacagcgccatcatgaatccagctagcaaagtaattgcactgaaagctgggaaaactcttcagatttttaacattgaaatgaaaagtaaaatgaaggctcataccatgactgatgatgtcaccttttggaaatggatctctttgaatacggttgctcttgttacggataatgcagtttatcactggagtatggaaggagagtctcagccagtgaaaatgtttgatcgccattctagccttgcagggtgccagattatcaattaccgtacagatgcaaaacaaaagtggttacttctgactggtatatctgcacagcaaaatcgtgtggtgggagctatgcagctatattctgtagataggaaagtgtctcagcccattgaaggacatgcagctagctttgcacagtttaagatggaaggaaatgcagaagaatcaacgttattttgttttgcagttcggggccaagctggagggaagttacatattattgaagttggcacaccacctacagggaaccagccctttccaaagaaggcagtggatgtcttctttcctccagaagcacaaaatgattttcctgttgcaatgcagatcagtgaaaagcatgatgtggtgttcttgataaccaagtatggttatatccacctctatgatcttgagactggtacctgcatctacatgaatagaatcagtggagaaacaatttttgttactgcacctcatgaagccacagctggaataattggagtaaacagaaagggacaagttctgtcagtgtgtgtggaagaagaaaacataattccttacatcaccaatgttctacaaaatcctgatttggctctgagaatggctgtacgtaataacttagccggtgctgaagaactctttgcccggtacgctgatccgcttacgggaagaaacgccacagacgaaaatggctaaattcgtgatccgcccagcaactg

SEQ ID NO: 414891 - DNA, 1411 bp, Homo sapiens
cagccgtttccggagtctgcgctgcgcccggttccgccattgcggctctcctggcccctggagcctccgcccccgacccgagctctttcgtctgcctgccagtttcctgcgtccccggagaggatcctgctgagcccagcctcccccctccccttctcctcctctcccttggagagcccgggcagccactgccccgcagccccagtgacaggaggagaccataacccccgacagcgccatggcccagattctgccaattcgttttcaggagcatctccagctccagaacctgggtatcaacccagcaaacattggcttcagtaccctgactatggagtctgacaaattcatctgcattagagaaaaagtaggagagcaggcccaggtggtaatcattgatatgaatgacccaagtaatccaattcgaagaccaatttcagcagacagcgccatcatgaatccagctagcaaagtaattgcactgaaagctgggaaaactcttcagatttttaacattgaaatgaaaagtaaaatgaaggctcataccatgactgatgatgtcaccttttggaaatggatctctttgaatacggttgctcttgttacggataatgcagtttatcactggagtatggaaggagagtctcagccagtgaaaatgtttgatcgccattctagccttgcagggtgccagattatcaattaccgtacagatgcaaaacaaaagtggttacttctgactggtatatctgcacagcaaaatcgtgtggtgggagctatgcagctatattctgtagataggaaagtgtctcagcccattgaaggacatgcagctagctttgcacagtttaagatggaaggaaatgcagaagaatcaacgttattttgttttgcagttcggggccaagctggagggaagttacatattattgaagttggcacaccacctacagggaaccagccctttccaaagaaggcagtggatgtcttctttcctccagaagcacaaaatgattttcctgttgcaatgcagatcagtgaaaagcatgatgtggtgttcttgataaccaagtatggttatatccacctctatgatcttgagactggtacctgcatctacatgaatagaatcagtggagaaacaatttttgttactgcacctcatgaagccacagctggaataattggagtaaacagaaagggacaagtaaggaaaccttgaaacttaagcaataaaataagataacctgatgagttgggaacaatcctgtccttttgagaaattactccccaagattaaaaaatagaaaataaacatattactgttagtttttttccaaaaagtaaatagtaactttggatattagaaaataatatatatcaaagcacgatgtaagctgataaaaaaaaa

SEQ ID NO: 414892 - DNA, 998 bp, Homo sapiens
cagccgtttccggagtctgcgctgcgcccggttccgccattgcggctctcctggcccctggagcctccgcccccgacccgagctctttcgtctgcctgccagtttcctgcgtccccggagaggatcctgctgagcccagcctcccccctccccttctcctcctctcccttggagagcccgggcagccactgccccgcagccccagtgacaggaggagaccataacccccgacagcgccatggcccagattctgccaattcgttttcaggagcatctccagctccagaacctgggtatcaacccagcaaacattggcttcagtaccctgactatggagtctgacaaattcatctgcattagagaaaaagtaggagagcaggcccaggtggtaatcattgatatgaatgacccaagtaatccaattcgaagaccaatttcagcagacagcgccatcatgaatccagctagcaaagtaattgcactgaaagctgggaaaactcttcagatttttaacattgaaatgaaaagtaaaatgaaggctcataccatgactgatgatgtcaccttttggaaatggatctctttgaatacggttgctcttgttacggataatgcagtttatcactggagtatggaaggagagtctcagccagtgaaaatgtttgatcgccattctagccttgcagggtgccagattatcaattaccgtacagatgcaaaacaaaagtggttacttctgactggtatatctgcacaggtaacattttaactatttttttatgaagaagaggtttagaacacggttgtgcccagaatgcagtttgattttgaaattaggtctttctatactcaatcctgttgaatttcacttattttggaagactttttttttccttcctcccatcccttctcttctccttcctccctcccttctcttcttcctcgctcccttgctatactgacatataatttcagaatgctcttaccaagcgttttta

SEQ ID NO: 414893 - DNA, 790 bp, Homo sapiens
cagccgtttccggagtctgcgctgcgcccggttccgccattgcggctctcctggcccctggagcctccgcccccgacccgagctctttcgtctgcctgccagtttcctgcgtccccggagaggatcctgctgagcccagcctcccccctccccttctcctcctctcccttggagagcccgggcagccactgccccgcagccccagtgacaggaggagaccataacccccgacagcgccatggcccagattctgccaattcgttttcaggagcatctccagctccagaacctgggtatcaacccagcaaacattggcttcagtaccctgactatggagtctgacaaattcatctgcattagagaaaaagtaggagagcaggcccaggtggtaatcattgatatgaatgacccaagtaatccaattcgaagaccaatttcagcagacagcgccatcatgaatccagctagcaaagtaattgcactgaaagctgggaaaactcttcagatttttaacattgaaatgaaaagtaaaatgaaggctcataccatgactgatgatgtcaccttttggaaatggatctctttgaatacggttgctcttgttacggataatgcagtttatcactggagtatggaaggagagtctcagccagtgaaaatgtttgatcgccattctagccttgcagggtgccagattatcaattaccgtacagatgcaaaacaaaagtggttacttctgactggtatatctgcacagcaaaatcgtgtagaaagtgaccgggatcctcta

SEQ ID NO: 414894 - DNA, 719 bp, Homo sapiens
cagccgtttccggagtctgcgctgcgcccggttccgccattgcggctctcctggcccctggagcctccgcccccgacccgagctctttcgtctgcctgccagtttcctgcgtccccggagaggatcctgctgagcccagcctcccccctccccttctcctcctctcccttggagagcccgggcagccactgccccgcagccccagtgacaggaggagaccataacccccgacagcgccatggcccagattctgccaattcgttttcaggagcatctccagctccagaacctgggtatcaacccagcaaacattggcttcagtaccctgactatggagtctgacaaattcatctgcattagagaaaaagtaggagagcaggcccaggtggtaatcattgatatgaatgacccaagtaatccaattcgaagaccaatttcagcagacagcgccatcatgaatccagctagcaaagtaattgcactgaaagctgggaaaactcttcagatttttaacattgaaatgaaaagtaaaatgaaggctcataccatgactgatgatgtcaccttttggaaatggatctctttgaatacggttgctcttgttacggataatgcagtttatcactggagtatggaaggagagtctcagccagtgaaaatgtttgatcgccatctatactcatgaagacgccatctatactcatgaagacgccatctat

SEQ ID NO: 414895 - DNA, 301 bp, Homo sapiens
tggataatcttataacattgaaccaggggtatgaaagacagtgactaaatatttactccagatggtaaagatttgaaacttcctaacttgatgttaatagatggattcattcctttaagattgacctaagagattgatctctacagggtgtttagtgtgatgtttggatcactttcgaagagcgtttaacatttctccttcttacactttcgaagagcgtttaacatttctccttcttaaagggaattcttcgtactccagacactatccgtcggttccagagtgtcccagcccagccagg

SEQ ID NO: 414896 - DNA, 361 bp, Homo sapiens
aaagtaggagagcaggcccaggtggtaatcattgatatgaatgacccaagtaatccaattcgaagaccaatttcagcagacagcgccatcatgaatccagctagcaaagtaattgcactgaaaggtataaaagaatgtgggttttccttaaaactcttcctatgtttttgtttttttttgttttttttttgtttgtttgtttgtttttgagacggagttttactcttgtcacccaggctggagtgcaatggcacgatcttggctcactgcaatctccaccccccaggttcaagcgattctcttgcctcagcctcccgagttgctggaattacaggtgcctgccaccacaaccagctagttt

SEQ ID NO: 414897 - DNA, 438 bp, Homo sapiens
agtctgcgctgcgcccggttccgccattgcggctctcctggcccctggagcctccgcccccgacccgagctctttcgtctgcctgccagtttcctgcgtccccggagaggatcctgctgagcccagcctcccccctccccttctcctcctctcccttggagagcccgggcagccactgccccgcagccccagtgacaggaggagaccataacccccgacagcgccatggcccagattctgccaattcgttttcaggagcatctccaggtgcggccgggcccgggctggtgagggctgtggagaaggtggtaggaaggatggaagacgctggagtctgggcccgagcagtatcggagctggaggggcgggggggttgtcggtgattggggtaggtggaggagggggcactatcttggaaagcttaaaatattaaatgat

SEQ ID NO: 414898 - DNA, 277 bp, Homo sapiens
cacttgagcccaaggctgtagtgcacaatgattgtggctgtgaatagccactgcacttcagcctggacaatgtagcaatactcggggggcggggaaaaagtatgtgaaagcacattatagaccataaggtatttacatagttagcatgtcaagagtgtgttatttataatacagtatgtgtgtgtgaggtttttttccttttttcctagattgaaactgcttctgccttggctagaggccagaattcatgagggctgtgaggagcctgctactcaca

SEQ ID NO: 414899 - DNA, 522 bp, Homo sapiens
gctgattttaagttaagaagtatcaaatctacagtgagagatgaagtgacaaataattataaatcctgctaaagatgacaaagcattctaattatttcattacttgatgaatctgagagtttttgatttatgggtcttcaaacgttattctctttgatcctttatagcaaaatcgtgtggtgggagctatgcagctatattctgtagataggaaagtgtctcagcccattgaaggacatgcagctagctttgcacagtttaagatggaaggaaatgcagaagaatcaacgttattttgttttgcagttcggggccaagctggagggaaggtaagttttggctttggtaattattttaatgagaacttgtatttggctttctgctatgaattagtcatctaatttcaaaatagccttctcccttcctaagtaattttagtattcacatttgtggtgacttaatttgttcaaattttgcatctagtgatacttgtctaaaatgaataatgttctttcacaactc

SEQ ID NO: 414900 - DNA, 338 bp, Homo sapiens
attgttaactttagccaggacccagatgtgcactttaaatatattcaggcagcttgcaagactgggcaaatcaaagaagtagaaagaatctgtagagaaagcaactgctacgatcctgagcgagtcaagaattttcttaaggtaagtggttttgagtaatgtgttttctggttggattccaggttagcagttctacaagggtttggtcatagttcaaaaatattttttccctaaatgtgaagttgttagcattcttaagttgtgtgctggattatttcttccaaacataatattctgtggtttcctttgaaatacggaaggaaattggtgagtaagaa

SEQ ID NO: 414901 - DNA, 377 bp, Homo sapiens
tcattttctttgaggctcagcgcatgcagatctgtactgctgccatgctgagttttatcagaagtttctctagagcacagaatcttgccctccatgccaggcgtggtgactcacgcctgtaatcccagcactttgggaggccaaggcaggcggatcacgaggtcaggagatcgagaccatcctggctaacacaatgaaaccccgtctctactaaaataccaaaaaaattagccggttgtggtggcacgtgcctgtagtagcagctactcgggaggctgaggccggagaatcgcttgaaccctagaggcaggttgcagtgagcccagattgcatcaccactgcactccagcctgggcaacagagggagactccatctc

SEQ ID NO: 414902 - DNA, 602 bp, Homo sapiens
taaaaagtcttttaaaaaattcttttattgtgctgattttattgtgtcatgaagtgtaatatgcatgtaggtatgtgtcaagtatacagagtgtcaggcatacggtgttcagtcataagcagttctggcctttggccctgcactgtttgttggctttttaggtaggaaccttcttagagtaagactgtcatgctaaaattgtagcaatcaaatgtgccccccatacaactcatttgaggttgagattatgttgctagagtggaggagattggagtgttctaaatgctaacagtttgtcctgcctccttgcccctgccccctgctcctttttgttttcttctactgtagggtcagccccagttgatgctgacagcaggacccagtgttgccgtccctccccaggcaccttttggttatggttataccgcaccaccgtatggacagccacagcctggctttgggtacagcatgtgagatgaagcgctgatcctgtagtcacctattttcgtactgaaacatcgtctttacccacttctcagtttataatgggggaaaacaggcaacgtgttcttgtaacctttatttcatgaaggacttctttt

SEQ ID NO: 414903 - DNA, 752 bp, Homo sapiens
  misc_feature (716)..(716): n is a, c, g, or t
  misc_feature (732)..(732): n is a, c, g, or t
  misc_feature (741)..(741): n is a, c, g, or t
cgactctacgaggatcccctttacgctacgatcctgagcgagtcaagaataatcttaaggaagcaaaactaacagatcagctaccacttatcattgtgtgtgatcgatttgactttgtccatgatttggtgctctatttatatagaaataatcttcaaaagtatatagagatatatgtacagaaggtgaatccaagtcgacttcctgtagttattggaggattacttgatgttgactgttctgaagatgtcataaaaaacttgattcttgttgtaagaggtcaattctctactgatgagcttgttgctgaggttgaaaaaagaaacagattgaaactgcttctgccttggctagaggccagaattcatgagggctgtgaggagcctgctactcacaatgccttagccaaaatctacatagacagtaataacaacccggagagatttcttcgtgaaaatccctactatgacagtcgcgttgttggaaagtattgtgagaagagagatccacatctggcctgtgttgcttatgaacgtggccaatgtgatctggaacttattaatgtttgcaatgagaattccctcttcaaaagtctttctcgctacctggtacgtcgaaaggatccagaattgtggggcagcgtgctgctggaaagcaatccttacaggagacccctaattgaccaggttgtacaaacagctttgtctgagactcanggacccccttgaaagnaaaaaaggnttttggttccc

SEQ ID NO: 414904 - DNA, 6459 bp, Homo sapiens
gtaacatgtcgaggctactaaaaggacaataaagatgatttgtggataagtgcattacgcccattcagtgagtgagaatcttccccttctcctcctctcccttggagagcccgggcagccactgccccgcagccccagtgacaggaggagaccataacccccgacagcgccatggcccagattctgccaattcgttttcaggagcatctccagctccagaacctgggtatcaacccagcaaacattggcttcagtaccctgactatggagtctgacaaattcatctgcattagagaaaaagtaggagagcaggcccaggtggtaatcattgatatgaatgacccaagtaatccaattcgaagaccaatttcagcagacagcgccatcatgaatccagctagcaaagtaattgcactgaaagctgggaaaactcttcagatttttaacattgaaatgaaaagtaaaatgaaggctcataccatgactgatgatgtcaccttttggaaatggatctctttgaatacggttgctcttgttacggataatgcagtttatcactggagtatggaaggagagtctcagccagtgaaaatgtttgatcgccattctagccttgcagggtgccagattatcaattaccgtacagatgcaaaacaaaagtggttacttctgactggtatatctgcacagcaaaatcgtgtggtgggagctatgcagctatattctgtagataggaaagtgtctcagcccattgaaggacatgcagctagctttgcacagtttaagatggaaggaaatgcagaagaatcaacgttattttgttttgcagttcggggccaagctggagggaagttacatattattgaagttggcacaccacctacagggaaccagccctttccaaagaaggcagtggatgtcttctttcctccagaagcacaaaatgattttcctgttgcaatgcagatcagtgaaaagcatgatgtggtgttcttgataaccaagtatggttatatccacctctatgatcttgagactggtacctgcatctacatgaatagaatcagtggagaaacaatttttgttactgcacctcatgaagccacagctggaataattggagtaaacagaaagggacaagttctgtcagtgtgtgtggaagaagaaaacataattccttacatcaccaatgttctacaaaatcctgatttggctctgagaatggctgtacgtaataacttagccggtgctgaagaactctttgcccggaaatttaatgctctttttgcccagggaaattactcggaggcagcaaaggtggctgctaatgcaccaaagggaattcttcgtactccagacactatccgtcggttccagagtgtcccagcccagccaggtcaaacttctcctctacttcagtactttggtatccttttggaccagggacagctcaacaaatacgaatccttagagctttgtaggcctgtacttcagcaagggcgaaaacagcttttggagaaatggttaaaagaagataagctggaatgttctgaagaactgggtgatcttgtgaaatctgtggaccctacattggcacttagtgtgtacctaagggctaacgtcccaaataaagtcattcagtgctttgcagaaacaggtcaagtccaaaagattgttttatatgctaaaaaagttggatacactccagattggatatttctgctgagaaatgtaatgcgaatcagtccagatcagggacagcagtttgcccaaatgttagttcaagatgaagagcctcttgctgacatcacacagattgtagatgtctttatggaatacaatctaattcagcagtgtactgcattcttgcttgatgctctgaagaataatcgcccatctgaaggtcctttacagacgcggttacttgagatgaaccttatgcatgcgcctcaagttgcagatgctattctaggcaatcagatgttcacacattatgaccgggctcatattgctcaactgtgtgaaaaggctggcctactgcagcgtgcattagaacatttcactgatttatatgatataaaacgtgcagtggttcacacccatcttcttaaccctgagtggttagtcaactactttggttccttatcagtagaagactccctagaatgtctcagagccatgctgtctgccaacatccgtcagaatctgcagatttgtgttcaggtggcttctaaatatcatgaacaactgtcaactcagtctctgattgaactttttgaatctttcaagagttttgaaggtctcttttattttctgggatccattgttaactttagccaggacccagatgtgcactttaaatatattcaggcagcttgcaagactgggcaaatcaaagaagtagaaagaatctgtagagaaagcaactgctacgatcctgagcgagtcaagaattttcttaaggaagcaaaactaacagatcagctaccacttatcattgtgtgtgatcgatttgactttgtccatgatttggtgctctatttatatagaaataatcttcaaaagtatatagagatatatgtacagaaggtgaatccaagtcgacttcctgtagttattggaggattacttgatgttgactgttctgaagatgtcataaaaaacttgattcttgttgtaagaggtcaattctctactgatgagcttgttgctgaggttgaaaaaagaaacagattgaaactgcttctgccttggctagaggccagaattcatgagggctgtgaggagcctgctactcacaatgccttagccaaaatctacatagacagtaataacaacccggagagatttcttcgtgaaaatccctactatgacagtcgcgttgttggaaagtattgtgagaagagagatccacatctggcctgtgttgcttatgaacgtggccaatgtgatctggaacttattaatgtttgcaatgagaattccctcttcaaaagtctttctcgctacctggtacgtcgaaaggatccagaattgtggggcagcgtgctgctggaaagcaatccttacaggagacccctaattgaccaggttgtacaaacagctttgtctgagactcaggaccctgaagaagtgtcagtaactgtaaaggctttcatgactgcagaccttcctaatgaactcattgaactgctggagaaaattgtccttgataactctgtattcagtgaacacaggaatctgcaaaacctccttatcctcactgcaattaaggctgaccgtacacgtgttatggagtatattaaccgcctggataattatgatgccccagatattgccaatatcgccatcagcaatgagctgtttgaagaagcatttgccattttccggaaatttgatgtcaatacttcagcagttcaggtcttaattgagcatattggaaacttggatcgggcatatgagtttgctgaacgttgcaatgaacctgcggtctggagtcaacttgcaaaagcccagttgcagaaaggaatggtgaaagaagccattgattcttatatcaaagcagatgatccttcctcctacatggaagttgttcaggctgccaatactagtggaaactgggaagaactggtgaagtacttgcagatggcccgtaagaaggctcgagagtcctatgtggagacagaactgatattcgcactggctaaaacaaaccgccttgcagagttagaagaatttatcaatggaccaaataatgctcatatccaacaagttggtgaccgttgttatgatgaaaaaatgtatgatgctgctaagttgttgtacaataatgtttccaattttggacgtttggcatctaccctggttcacctgggtgaatatcaggcagctgttgatggggctaggaaagctaacagtactcgaacatggaaagaggtctgcttcgcctgtgtagatgggaaagaattccgtcttgctcagatgtgtggacttcatattgttgtacatgcagatgaattagaagaacttatcaactactatcaggatcgtggctattttgaagagctgatcaccatgttggaagcagcactgggacttgagcgagctcacatgggaatgtttactgaattagctattctatactctaaatttaagcctcagaaaatgagggagcacctggagctgttctggtctagagtgaatattcccaaggtgctaagagctgcagaacaagctcatctttgggcagaactggtgtttttgtatgacaagtatgaagaatatgataatgccataattaccatgatgaatcatccaactgatgcctggaaagaagggcaattcaaagatatcattaccaaggttgccaatgtggaactatactacagagcaatacagttctacttagaattcaagcctctgttgttaaatgatttgctgatggtgctgtctccacggttggatcacactcgtgcagtcaattatttcagcaaggttaaacagctaccactggtgaaaccgtatttgcgttcagttcagaaccataacaacaaatctgtgaatgaatcattgaacaatctttttattacagaagaagattatcaggctctgcgaacatcaatagatgcttatgacaactttgacaatatctcgcttgctcagcgtttggaaaaacatgaactcattgagttcaggagaattgctgcttatctcttcaaaggcaacaatcgctggaaacagagtgtagagctgtgcaagaaagacagcctttacaaggatgcaatgcagtatgcttctgaatctaaagatactgaattggctgaagaactcctgcagtggtttttgcaggaagaaaaaagagagtgctttggagcttgtctgtttacctgttacgatcttttaaggccagatgtcgtcctagaaactgcatggaggcacaatatcatggattttgccatgccctatttcatccaggtcatgaaggagtacttgacaaaggtggataaattagatgcttcagaatcactgagaaaagaagaagaacaagctacagagacacaacccattgtttatggtcagccccagttgatgctgacagcaggacccagtgttgccgtccctccccaggcaccttttggttatggttataccgcaccaccgtatggacagccacagcctggctttgggtacagcatgtgagatgaagcgctgatcctgtagtcacctattttcgtactgaaacatcgtctttacccacttctcagtttataatgggggaaaacaggcaacgtgttcttgtaacctttatttcatgaaggacttctttttgtttctaactataaacttggatcacctatgttaaaaccttatttcacattccacatcattttagaatttattttcgaaggggaatagtttcaatgttttattcacttgggctttttttcttccccctctttctttaaagaactgctcaatattcaatctgttgtgaagaacctgatttgcactctgtagtgtttaaagaaacaaagaaactctaatattgaatctcttaaatttagtgtatgtaaacagcttacaaatacgtattgtctaaatgcatttaaatctgttttattcaaagaaaagctaaagcaaaaacactggcatatgaccatgcaagactgtcagtgccaacaaagacaacactaatcagcacatcgtacactggattgcagtgcttcccagattattgaaaaatgttacagacaacttgcctgatttttaaatgagcgtaaaaggccctctaacctatgcaggtttccccattatgcatatagaaaatgctagtatgttttgctcacttcatatgtaacaggtgcccttatgttgtgctgtatcctgtgctttttctgtgggaccattccattcaggagcaaagagcaccatgattccaatcttgtgtgtgtttactaacccttccctgaggtttgtgtatgttggatattgtggtgttttagatcactgagtgtacagaagagagaaattcaaacaaaatattgctgttcttcagttttgtttgtggaatttgaaattactcaaatttaaaataaattactggactgtggaaataacatagaattgaagttttaattaaataccactcaaacgaaaagaacagtagtttttgtagttttatattggatactgaggcattagggaggcatgaaaggaagaggaatgaggattgagacatgtgaagacattgtgcattatatcaatgtgcattcctgtagttcattaacaaggtacatgcaatagtctaaagaaccagagtcactactatagtggcttaacatttaatctgtctccaatattttaaccaagtgacaccgaggtttttatcgaagcatttcacttaaatgaacaaatcatggctgttatattaacttgaaataaaatatatttaaacatgta

SEQ ID NO: 414905 - DNA, 8362 bp, Homo sapiens
cagccgtttccggagtctgcgctgcgcccggttccgccattgcggctctcctggcccctggagcctccgcccccgacccgagctctttcgtctgcctgccagtttcctgcgtccccggagaggatcctgctgagcccagcctcccccctccccttctcctcctctcccttggagagcccgggcagccactgccccgcagccccagtgacaggaggagaccataacccccgacagcgccatggcccagattctgccaattcgttttcaggagcatctccagctccagaacctgggtatcaacccagcaaacattggcttcagtaccctgactatggagtctgacaaattcatctgcattagagaaaaagtaggagagcaggcccaggtggtaatcattgatatgaatgacccaagtaatccaattcgaagaccaatttcagcagacagcgccatcatgaatccagctagcaaagtaattgcactgaaagctgggaaaactcttcagatttttaacattgaaatgaaaagtaaaatgaaggctcataccatgactgatgatgtcaccttttggaaatggatctctttgaatacggttgctcttgttacggataatgcagtttatcactggagtatggaaggagagtctcagccagtgaaaatgtttgatcgccattctagccttgcagggtgccagattatcaattaccgtacagatgcaaaacaaaagtggttacttctgactggtatatctgcacagcaaaatcgtgtggtgggagctatgcagctatattctgtagataggaaagtgtctcagcccattgaaggacatgcagctagctttgcacagtttaagatggaaggaaatgcagaagaatcaacgttattttgttttgcagttcggggccaagctggagggaagttacatattattgaagttggcacaccacctacagggaaccagccctttccaaagaaggcagtggatgtcttctttcctccagaagcacaaaatgattttcctgttgcaatgcagatcagtgaaaagcatgatgtggtgttcttgataaccaagtatggttatatccacctctatgatcttgagactggtacctgcatctacatgaatagaatcagtggagaaacaatttttgttactgcacctcatgaagccacagctggaataattggagtaaacagaaagggacaagttctgtcagtgtgtgtggaagaagaaaacataattccttacatcaccaatgttctacaaaatcctgatttggctctgagaatggctgtacgtaataacttagccggtgctgaagaactctttgcccggaaatttaatgctctttttgcccagggaaattactcggaggcagcaaaggtggctgctaatgcaccaaagggaattcttcgtactccagacactatccgtcggttccagagtgtcccagcccagccaggtcaaacttctcctctacttcagtactttggtatccttttggaccagggacagctcaacaaatacgaatccttagagctttgtaggcctgtacttcagcaagggcgaaaacagcttttggagaaatggttaaaagaagataagctggaatgttctgaagaactgggtgatcttgtgaaatctgtggaccctacattggcacttagtgtgtacctaagggctaacgtcccaaataaagtcattcagtgctttgcagaaacaggtcaagtccaaaagattgttttatatgctaaaaaagttggatacactccagattggatatttctgctgagaaatgtaatgcgaatcagtccagatcagggacagcagtttgcccaaatgttagttcaagatgaagagcctcttgctgacatcacacagattgtagatgtctttatggaatacaatctaattcagcagtgtactgcattcttgcttgatgctctgaagaataatcgcccatctgaaggtcctttacagacgcggttacttgagatgaaccttatgcatgcgcctcaagttgcagatgctattctaggcaatcagatgttcacacattatgaccgggctcatattgctcaactgtgtgaaaaggctggcctactgcagcgtgcattagaacatttcactgatttatatgatataaaacgtgcagtggttcacacccatcttcttaaccctgagtggttagtcaactactttggttccttatcagtagaagactccctagaatgtctcagagccatgctgtctgccaacatccgtcagaatctgcagatttgtgttcaggtggcttctaaatatcatgaacaactgtcaactcagtctctgattgaactttttgaatctttcaagagttttgaaggtctcttttattttctgggatccattgttaactttagccaggacccagatgtgcactttaaatatattcaggcagcttgcaagactgggcaaatcaaagaagtagaaagaatctgtagagaaagcaactgctacgatcctgagcgagtcaagaattttcttaaggaagcaaaactaacagatcagctaccacttatcattgtgtgtgatcgatttgactttgtccatgatttggtgctctatttatatagaaataatcttcaaaagtatatagagatatatgtacagaaggtgaatccaagtcgacttcctgtagttattggaggattacttgatgttgactgttctgaagatgtcataaaaaacttgattcttgttgtaagaggtcaattctctactgatgagcttgttgctgaggttgaaaaaagaaacagattgaaactgcttctgccttggctagaggccagaattcatgagggctgtgaggagcctgctactcacaatgccttagccaaaatctacatagacagtaataacaacccggagagatttcttcgtgaaaatccctactatgacagtcgcgttgttggaaagtattgtgagaagagagatccacatctggcctgtgttgcttatgaacgtggccaatgtgatctggaacttattaatgtttgcaatgagaattccctcttcaaaagtctttctcgctacctggtacgtcgaaaggatccagaattgtggggcagcgtgctgctggaaagcaatccttacaggagacccctaattgaccaggttgtacaaacagctttgtctgagactcaggaccctgaagaagtgtcagtaactgtaaaggctttcatgactgcagaccttcctaatgaactcattgaactgctggagaaaattgtccttgataactctgtattcagtgaacacaggaatctgcaaaacctccttatcctcactgcaattaaggctgaccgtacacgtgttatggagtatattaaccgcctggataattatgatgccccagatattgccaatatcgccatcagcaatgagctgtttgaagaagcatttgccattttccggaaatttgatgtcaatacttcagcagttcaggtcttaattgagcatattggaaacttggatcgggcatatgagtttgctgaacgttgcaatgaacctgcggtctggagtcaacttgcaaaagcccagttgcagaaaggaatggtgaaagaagccattgattcttatatcaaagcagatgatccttcctcctacatggaagttgttcaggctgccaatactagtggaaactgggaagaactggtgaagtacttgcagatggcccgtaagaaggctcgagagtcctatgtggagacagaactgatattcgcactggctaaaacaaaccgccttgcagagttagaagaatttatcaatggaccaaataatgctcatatccaacaagttggtgaccgttgttatgatgaaaaaatgtatgatgctgctaagttgttgtacaataatgtttccaattttggacgtttggcatctaccctggttcacctgggtgaatatcaggcagctgttgatggggctaggaaagctaacagtactcgaacatggaaagaggtctgcttcgcctgtgtagatgggaaagaattccgtcttgctcagatgtgtggacttcatattgttgtacatgcagatgaattagaagaacttatcaactactatcaggatcgtggctattttgaagagctgatcaccatgttggaagcagcactgggacttgagcgagctcacatgggaatgtttactgaattagctattctatactctaaatttaagcctcagaaaatgagggagcacctggagctgttctggtctagagtgaatattcccaaggtgctaagagctgcagaacaagctcatctttgggcagaactggtgtttttgtatgacaagtatgaagaatatgataatgccataattaccatgatgaatcatccaactgatgcctggaaagaagggcaattcaaagatatcattaccaaggttgccaatgtggaactatactacagagcaatacagttctacttagaattcaagcctctgttgttaaatgatttgctgatggtgctgtctccacggttggatcacactcgtgcagtcaattatttcagcaaggttaaacagctaccactggtgaaaccgtatttgcgttcagttcagaaccataacaacaaatctgtgaatgaatcattgaacaatctttttattacagaagaagattatcaggctctgcgaacatcaatagatgcttatgacaactttgacaatatctcgcttgctcagcgtttggaaaaacatgaactcattgagttcaggagaattgctgcttatctcttcaaaggcaacaatcgctggaaacagagtgtagagctgtgcaagaaagacagcctttacaaggatgcaatgcagtatgcttctgaatctaaagatactgaattggctgaagaactcctgcagtggtttttgcaggaagaaaaaagagagtgctttggagcttgtctgtttacctgttacgatcttttaaggccagatgtcgtcctagaaactgcatggaggcacaatatcatggattttgccatgccctatttcatccaggtcatgaaggagtacttgacaaaggtggataaattagatgcttcagaatcactgagaaaagaagaagaacaagctacagagacacaacccattgtttatggtcagccccagttgatgctgacagcaggacccagtgttgccgtccctccccaggcaccttttggttatggttataccgcaccaccgtatggacagccacagcctggctttgggtacagcatgtgagatgaagcgctgatcctgtagtcacctattttcgtactgaaacatcgtctttacccacttctcagtttataatgggggaaaacaggcaacgtgttcttgtaacctttatttcatgaaggacttctttttgtttctaactataaacttggatcacctatgttaaaaccttatttcacattccacatcattttagaatttattttcgaaggggaatagtttcaatgttttattcacttgggctttttttcttccccctctttctttaaagaactgctcaatattcaatctgttgtgaagaacctgatttgcactctgtagtgtttaaagaaacaaagaaactctaatattgaatctcttaaatttagtgtatgtaaacagcttacaaatacgtattgtctaaatgcatttaaatctgttttattcaaagaaaagctaaagcaaaaacactggcatatgaccatgcaagactgtcagtgccaacaaagacaacactaatcagcacatcgtacactggattgcagtgcttcccagattattgaaaaatgttacagacaacttgcctgatttttaaatgagcgtaaaaggccctctaacctatgcaggtttccccattatgcatatagaaaatgctagtatgttttgctcacttcatatgtaacaggtgcccttatgttgtgctgtatcctgtgctttttctgtgggaccattccattcaggagcaaagagcaccatgattccaatcttgtgtgtgtttactaacccttccctgaggtttgtgtatgttggatattgtggtgttttagatcactgagtgtacagaagagagaaattcaaacaaaatattgctgttcttcagttttgtttgtggaatttgaaattactcaaatttaaaataaattactggactgtggaaataacatagaattgaagttttaattaaataccactcaaacgaaaagaacagtagtttttgtagttttatattggatactgaggcattagggaggcatgaaaggaagaggaatgaggattgagacatgtgaagacattgtgcattatatcaatgtgcattcctgtagttcattaacaaggtacatgcaatagtctaaagaaccagagtcactactatagtggcttaacatttaatctgtctccaatattttaaccaagtgacaccgaggtttttatcgaagcatttcacttaaatgaacaaatcatggctgttatattaacttgaaataaaatatatttaaacatgtagttaacatgctctttctcatcatgaattataaaggtgcccaaattatgggtatcttgatttttttcaaaaattggttgtgtgaatccagctcttgcttatggctgagaatgttcctaaagttcatttcactatcccttaatcctcaatagctacacatacccccttgcctagttagtcttgcactgctttacaactctcttaggcaaattacctaacataagctccacagaagagttttttaaaacttaaaatccctgtcccaccaggtgtggtggctcatgcctgtaatcccagcactttgggaggctgaggcaggcggattgcttgaggccaggagtttgagacaagcctgaccaacatggtgactccatctctactaaaaataaaaaatcagccaggtgtgatggtggatgcctataagatcctagctgctactcaggaggcaggaggctgaggcatgagaatcacttgaacctgtgaggcaaaggttgtagtgagccaagatcacgtcactgcactccatcctgggtgacagaatgagactcttgtctcaaaaaacaaaaaaacctatttagtttcatccaggacattaagtgaaagtgtttaatgtgagtgcaggtcagtgaagaatacaatggtgcccctgctttgatttgtgggaggtgccatcagttttccccaccactgcttttgcaccctcagtgcaaatatcaacacagagaaaaaaaaaataataatagtattatgaaaacattgactctgtggagaccctgtgggttctgcagagtatactttgaaaactataagattatgagttctataaaataccaagtacagatgaactagaaaacaagcatatatccacaattaccagaattttcatagtattccttttagtagatatgccatgacagttacttagccaccccatgccatcctgttgggaatgccactacctttgaatttggagccatcagtctatctgaggcaaacctcagaaattacctgagccagaatcatgcacttagcactgagttcaactcagtcttaacgttgcattttgttgcatcacttttgcagccagtaaacattctgtttagaaatagttgctattgtggcatcattcacagttgcaatttttctcctgtgctgtcatatgcctgtgcgaagtgtattaaatgaatcaaatattagaaatttcaaggctgtctttagtgttctgcccacaatactccaccaatgaccttagaccttgagatggtgctataacgctgcttatattgcagttaaccatagagaggtggagccacttaaaatgggcctattaccaaaattctccctggcatcattacagttcttggggatacactgattttagaaattactgtcagtatcctcctaaaagaaggcttaaatagtttctaacaagatgactatcaggaagctatgtggcttggggagttgggaccctctgcctcatattctgggtaactggtataacatagtaattattaggattgtatcaagtgtatctaaagatcaaaagggaaaaaaggcacccttaattgtcaaagttagttctaggaaaaaatactagcagggatgacaaactacgttcactttacagttaccataaattcttacttgggcccacccatttccatctgttaaggtccataaggttactcaagtttcagtggcttcattgttacaagaaaggggggaagtgagaaactttaataggctgtgatttagaaccactgctgattaacctttggccagtatgggtcagggaaggtgaacatgaaacactgcacagtaggttgtatcaatgc

SEQ ID NO: 414906 - DNA, 8308 bp, Homo sapiens
cagccgtttccggagtctgcgctgcgcccggttccgccattgcggctctcctggcccctggagcctccgcccccgacccgagctctttcgtctgcctgccagtttcctgcgtccccggagaggatcctgctgagcccagcctcccccctccccttctcctcctctcccttggagagcccgggcagccactgccccgcagccccagtgacaggaggagaccataacccccgacagcgccatggcccagattctgccaattcgttttcaggagcatctccagctccagaacctgggtatcaacccagcaaacattggcttcagtaccctgactatggagtctgacaaattcatctgcattagagaaaaagtaggagagcaggcccaggtggtaatcattgatatgaatgacccaagtaatccaattcgaagaccaatttcagcagacagcgccatcatgaatccagctagcaaagtaattgcactgaaagctgggaaaactcttcagatttttaacattgaaatgaaaagtaaaatgaaggctcataccatgactgatgatgtcaccttttggaaatggatctctttgaatacggttgctcttgttacggataatgcagtttatcactggagtatggaaggagagtctcagccagtgaaaatgtttgatcgccattctagccttgcagggtgccagattatcaattaccgtacagatgcaaaacaaaagtggttacttctgactggtatatctgcacagcaaaatcgtgtggtgggagctatgcagctatattctgtagataggaaagtgtctcagcccattgaaggacatgcagctagctttgcacagtttaagatggaaggaaatgcagaagaatcaacgttattttgttttgcagttcggggccaagctggagggaagttacatattattgaagttggcacaccacctacagggaaccagccctttccaaagaaggcagtggatgtcttctttcctccagaagcacaaaatgattttcctgttgcaatgcagatcagtgaaaagcatgatgtggtgttcttgataaccaagtatggttatatccacctctatgatcttgagactggtacctgcatctacatgaatagaatcagtggagaaacaatttttgttactgcacctcatgaagccacagctggaataattggagtaaacagaaagggacaagttctgtcagtgtgtgtggaagaagaaaacataattccttacatcaccaatgttctacaaaatcctgatttggctctgagaatggctgtacgtaataacttagccggtgctgaagaactctttgcccggaaatttaatgctctttttgcccagggaaattactcggaggcagcaaaggtggctgctaatgcaccaaagggaattcttcgtactccagacactatccgtcggttccagagtgtcccagcccagccaggtcaaacttctcctctacttcagtactttggtatccttttggaccagggacagctcaacaaatacgaatccttagagctttgtaggcctgtacttcagcaagggcgaaaacagcttttggagaaatggttaaaagaagataagctggaatgttctgaagaactgggtgatcttgtgaaatctgtggaccctacattggcacttagtgtgtacctaagggctaacgtcccaaataaagtcattcagtgctttgcagaaacaggtcaagtccaaaagattgttttatatgctaaaaaagttggatacactccagattggatatttctgctgagaaatgtaatgcgaatcagtccagatcagggacagcagtttgcccaaatgttagttcaagatgaagagcctcttgctgacatcacacagattgtagatgtctttatggaatacaatctaattcagcagtgtactgcattcttgcttgatgctctgaagaataatcgcccatctgaaggtcctttacagacgcggttacttgagatgaaccttatgcatgcgcctcaagttgcagatgctattctaggcaatcagatgttcacacattatgaccgggctcatattgctcaactgtgtgaaaaggctggcctactgcagcgtgcattagaacatttcactgatttatatgatataaaacgtgcagtggttcacacccatcttcttaaccctgagtggttagtcaactactttggttccttatcagtagaagactccctagaatgtctcagagccatgctgtctgccaacatccgtcagaatctgcagatttgtgttcaggtggcttctaaatatcatgaacaactgtcaactcagtctctgattgaactttttgaatctttcaagagttttgaaggtctcttttattttctgggatccattgttaactttagccaggacccagatgtgcactttaaatatattcaggcagcttgcaagactgggcaaatcaaagaagtagaaagaatctgtagagaaagcaactgctacgatcctgagcgagtcaagaattttcttaaggaagcaaaactaacagatcagctaccacttatcattgtgtgtgatcgatttgactttgtccatgatttggtgctctatttatatagaaataatcttcaaaagtatatagagatatatgtacagaaggtgaatccaagtcgacttcctgtagttattggaggattacttgatgttgactgttctgaagatgtcataaaaaacttgattcttgttgtaagaggtcaattctctactgatgagcttgttgctgaggttgaaaaaagaaacagattgaaactgcttctgccttggctagaggccagaattcatgagggctgtgaggagcctgctactcacaatgccttagccaaaatctacatagacagtaataacaacccggagagatttcttcgtgaaaatccctactatgacagtcgcgttgttggaaagtattgtgagaagagagatccacatctggcctgtgttgcttatgaacgtggccaatgtgatctggaacttattaatgtttgcaatgagaattccctcttcaaaagtctttctcgctacctggtacgtcgaaaggatccagaattgtggggcagcgtgctgctggaaagcaatccttacaggagacccctaattgaccaggttgtacaaacagctttgtctgagactcaggaccctgaagaagtgtcagtaactgtaaaggctttcatgactgcagaccttcctaatgaactcattgaactgctggagaaaattgtccttgataactctgtattcagtgaacacaggaatctgcaaaacctccttatcctcactgcaattaaggctgaccgtacacgtgttatggagtatattaaccgcctggataattatgatgccccagatattgccaatatcgccatcagcaatgagctgtttgaagaagcatttgccattttccggaaatttgatgtcaatacttcagcagttcaggtcttaattgagcatattggaaacttggatcgggcatatgagtttgctgaacgttgcaatgaacctgcggtctggagtcaacttgcaaaagcccagttgcagaaaggaatggtgaaagaagccattgattcttatatcaaagcagatgatccttcctcctacatggaagttgttcaggctgccaatactagtggaaactgggaagaactggtgaagtacttgcagatggcccgtaagaaggctcgagagtcctatgtggagacagaactgatattcgcactggctaaaacaaaccgccttgcagagttagaagaatttatcaatggaccaaataatgctcatatccaacaagttggtgaccgttgttatgatgaaaaaatgtatgatgctgctaagttgttgtacaataatgtttccaattttggacgtttggcatctaccctggttcacctgggtgaatatcaggcagctgttgatggggctaggaaagctaacagtactcgaacatggaaagaggtctgcttcgcctgtgtagatgggaaagaattccgtcttgctcagatgtgtggacttcatattgttgtacatgcagatgaattagaagaacttatcaactactatcaggatcgtggctattttgaagagctgatcaccatgttggaagcagcactgggacttgagcgagctcacatgggaatgtttactgaattagctattctatactctaaatttaagcctcagaaaatgagggagcacctggagctgttctggtctagagtgaatattcccaaggtgctaagagctgcagaacaagctcatctttgggcagaactggtgtttttgtatgacaagtatgaagaatatgataatgccataattaccatgatgaatcatccaactgatgcctggaaagaagggcaattcaaagatatcattaccaaggttgccaatgtggaactatactacagagcaatacagttctacttagaattcaagcctctgttgttaaatgatttgctgatggtgctgtctccacggttggatcacactcgtgcagtcaattatttcagcaaggttaaacagctaccactggtgaaaccgtatttgcgttcagttcagaaccataacaacaaatctgtgaatgaatcattgaacaatctttttattacagaagaagattatcaggctctgcgaacatcaatagatgcttatgacaactttgacaatatctcgcttgctcagcgtttggaaaaacatgaactcattgagttcaggagaattgctgcttatctcttcaaaggcaacaatcgctggaaacagagtgtagagctgtgcaagaaagacagcctttacaaggatgcaatgcagtatgcttctgaatctaaagatactgaattggctgaagaactcctgcagtggtttttgcaggaagaaaaaagagagtgctttggagcttgtctgtttacctgttacgatcttttaaggccagatgtcgtcctagaaactgcatggaggcacaatatcatggattttgccatgccctatttcatccaggtcatgaaggagtacttgacaaaggtggataaattagatgcttcagaatcactgagaaaagaagaagaacaagctacagagacacaacccattgtttatggtcagccccagttgatgctgacagcaggacccagtgttgccgtccctccccaggcaccttttggttatggttataccgcaccaccgtatggacagccacagcctggctttgggtacagcatgtgagatgaagcgctgatcctgtagtcacctattttcgtactgaaacatcgtctttacccacttctcagtttataatgggggaaaacaggcaacgtgttcttgtaacctttatttcatgaaggacttctttttgtttctaactataaacttggatcacctatgttaaaaccttatttcacattccacatcattttagaatttattttcgaaggggaatagtttcaatgttttattcacttgggctttttttcttccccctctttctttaaagaactgctcaatattcaatctgttgtgaagaacctgatttgcactctgtagtgtttaaagaaacaaagaaactctaatattgaatctcttaaatttagtgtatgtaaacagcttacaaatacgtattgtctaaatgcatttaaatctgttttattcaaagaaaagctaaagcaaaaacactggcatatgaccatgcaagactgtcagtgccaacaaagacaacactaatcagcacatcgtacactggattgcagtgcttcccagattattgaaaaatgttacagacaacttgcctgatttttaaatgagcgtaaaaggccctctaacctatgcaggtttccccattatgcatatagaaaatgctagtatgttttgctcacttcatatgtaacaggtgcccttatgttgtgctgtatcctgtgctttttctgtgggaccattccattcaggagcaaagagcaccatgattccaatcttgtgtgtgtttactaacccttccctgaggtttgtgtatgttggatattgtggtgttttagatcactgagtgtacagaagagagaaattcaaacaaaatattgctgttcttcagttttgtttgtggaatttgaaattactcaaatttaaaataaattactggactgtggaaataacatagaattgaagttttaattaaataccactcaaacgatgaaaggaagaggaatgaggattgagacatgtgaagacattgtgcattatatcaatgtgcattcctgtagttcattaacaaggtacatgcaatagtctaaagaaccagagtcactactatagtggcttaacatttaatctgtctccaatattttaaccaagtgacaccgaggtttttatcgaagcatttcacttaaatgaacaaatcatggctgttatattaacttgaaataaaatatatttaaacatgtagttaacatgctctttctcatcatgaattataaaggtgcccaaattatgggtatcttgatttttttcaaaaattggttgtgtgaatccagctcttgcttatggctgagaatgttcctaaagttcatttcactatcccttaatcctcaatagctacacatacccccttgcctagttagtcttgcactgctttacaactctcttaggcaaattacctaacataagctccacagaagagttttttaaaacttaaaatccctgtcccaccaggtgtggtggctcatgcctgtaatcccagcactttgggaggctgaggcaggcggattgcttgaggccaggagtttgagacaagcctgaccaacatggtgactccatctctactaaaaataaaaaatcagccaggtgtgatggtggatgcctataagatcctagctgctactcaggaggcaggaggctgaggcatgagaatcacttgaacctgtgaggcaaaggttgtagtgagccaagatcacgtcactgcactccatcctgggtgacagaatgagactcttgtctcaaaaaacaaaaaaacctatttagtttcatccaggacattaagtgaaagtgtttaatgtgagtgcaggtcagtgaagaatacaatggtgcccctgctttgatttgtgggaggtgccatcagttttccccaccactgcttttgcaccctcagtgcaaatatcaacacagagaaaaaaaaaataataatagtattatgaaaacattgactctgtggagaccctgtgggttctgcagagtatactttgaaaactataagattatgagttctataaaataccaagtacagatgaactagaaaacaagcatatatccacaattaccagaattttcatagtattccttttagtagatatgccatgacagttacttagccaccccatgccatcctgttgggaatgccactacctttgaatttggagccatcagtctatctgaggcaaacctcagaaattacctgagccagaatcatgcacttagcactgagttcaactcagtcttaacgttgcattttgttgcatcacttttgcagccagtaaacattctgtttagaaatagttgctattgtggcatcattcacagttgcaatttttctcctgtgctgtcatatgcctgtgcgaagtgtattaaatgaatcaaatattagaaatttcaaggctgtctttagtgttctgcccacaatactccaccaatgaccttagaccttgagatggtgctataacgctgcttatattgcagttaaccatagagaggtggagccacttaaaatgggcctattaccaaaattctccctggcatcattacagttcttggggatacactgattttagaaattactgtcagtatcctcctaaaagaaggcttaaatagtttctaacaagatgactatcaggaagctatgtggcttggggagttgggaccctctgcctcatattctgggtaactggtataacatagtaattattaggattgtatcaagtgtatctaaagatcaaaagggaaaaaaggcacccttaattgtcaaagttagttctaggaaaaaatactagcagggatgacaaactacgttcactttacagttaccataaattcttacttgggcccacccatttccatctgttaaggtccataaggttactcaagtttcagtggcttcattgttacaagaaaggggggaagtgagaaactttaataggctgtgatttagaaccactgctgattaacctttggccagtatgggtcagggaaggtgaacatgaaacactgcacagtaggttgtatcaatgc

SEQ ID NO: 414907 - DNA, 6333 bp, Homo sapiens
cagccgtttccggagtctgcgctgcgcccggttccgccattgcggctctcctggcccctggagcctccgcccccgacccgagctctttcgtctgcctgccagtttcctgcgtccccggagaggatcctgctgagcccagcctcccccctccccttctcctcctctcccttggagagcccgggcagccactgccccgcagccccagtgacaggaggagaccataacccccgacagcgccatggcccagattctgccaattcgttttcaggagcatctccagctccagaacctgggtatcaacccagcaaacattggcttcagtaccctgactatggagtctgacaaattcatctgcattagagaaaaagtaggagagcaggcccaggtggtaatcattgatatgaatgacccaagtaatccaattcgaagaccaatttcagcagacagcgccatcatgaatccagctagcaaagtaattgcactgaaagctgggaaaactcttcagatttttaacattgaaatgaaaagtaaaatgaaggctcataccatgactgatgatgtcaccttttggaaatggatctctttgaatacggttgctcttgttacggataatgcagtttatcactggagtatggaaggagagtctcagccagtgaaaatgtttgatcgccattctagccttgcagggtgccagattatcaattaccgtacagatgcaaaacaaaagtggttacttctgactggtatatctgcacagcaaaatcgtgtggtgggagctatgcagctatattctgtagataggaaagtgtctcagcccattgaaggacatgcagctagctttgcacagtttaagatggaaggaaatgcagaagaatcaacgttattttgttttgcagttcggggccaagctggagggaagttacatattattgaagttggcacaccacctacagggaaccagccctttccaaagaaggcagtggatgtcttctttcctccagaagcacaaaatgattttcctgttgcaatgcagatcagtgaaaagcatgatgtggtgttcttgataaccaagtatggttatatccacctctatgatcttgagactggtacctgcatctacatgaatagaatcagtggagaaacaatttttgttactgcacctcatgaagccacagctggaataattggagtaaacagaaagggacaagttctgtcagtgtgtgtggaagaagaaaacataattccttacatcaccaatgttctacaaaatcctgatttggctctgagaatggctgtacgtaataacttagccggtgctgaagaactctttgcccggaaatttaatgctctttttgcccagggaaattactcggaggcagcaaaggtggctgctaatgcaccaaagggaattcttcgtactccagacactatccgtcggttccagagtgtcccagcccagccaggtcaaacttctcctctacttcagtactttggtatccttttggaccagggacagctcaacaaatacgaatccttagagctttgtaggcctgtacttcagcaagggcgaaaacagcttttggagaaatggttaaaagaagataagctggaatgttctgaagaactgggtgatcttgtgaaatctgtggaccctacattggcacttagtgtgtacctaagggctaacgtcccaaataaagtcattcagtgctttgcagaaacaggtcaagtccaaaagattgttttatatgctaaaaaagttggatacactccagattggatatttctgctgagaaatgtaatgcgaatcagtccagatcagggacagcagtttgcccaaatgttagttcaagatgaagagcctcttgctgacatcacacagattgtagatgtctttatggaatacaatctaattcagcagtgtactgcattcttgcttgatgctctgaagaataatcgcccatctgaaggtcctttacagacgcggttacttgagatgaaccttatgcatgcgcctcaagttgcagatgctattctaggcaatcagatgttcacacattatgaccgggctcatattgctcaactgtgtgaaaaggctggcctactgcagcgtgcattagaacatttcactgatttatatgatataaaacgtgcagtggttcacacccatcttcttaaccctgagtggttagtcaactactttggttccttatcagtagaagactccctagaatgtctcagagccatgctgtctgccaacatccgtcagaatctgcagatttgtgttcaggtggcttctaaatatcatgaacaactgtcaactcagtctctgattgaactttttgaatctttcaagagttttgaaggtctcttttattttctgggatccattgttaactttagccaggacccagatgtgcactttaaatatattcaggcagcttgcaagactgggcaaatcaaagaagtagaaagaatctgtagagaaagcaactgctacgatcctgagcgagtcaagaattttcttaaggaagcaaaactaacagatcagctaccacttatcattgtgtgtgatcgatttgactttgtccatgatttggtgctctatttatatagaaataatcttcaaaagtatatagagatatatgtacagaaggtgaatccaagtcgacttcctgtagttattggaggattacttgatgttgactgttctgaagatgtcataaaaaacttgattcttgttgtaagaggtcaattctctactgatgagcttgttgctgaggttgaaaaaagaaacagattgaaactgcttctgccttggctagaggccagaattcatgagggctgtgaggagcctgctactcacaatgccttagccaaaatctacatagacagtaataacaacccggagagatttcttcgtgaaaatccctactatgacagtcgcgttgttggaaagtattgtgagaagagagatccacatctggcctgtgttgcttatgaacgtggccaatgtgatctggaacttattaatgtttgcaatgagaattccctcttcaaaagtctttctcgctacctggtacgtcgaaaggatccagaattgtggggcagcgtgctgctggaaagcaatccttacaggagacccctaattgaccaggttgtacaaacagctttgtctgagactcaggaccctgaagaagtgtcagtaactgtaaaggctttcatgactgcagaccttcctaatgaactcattgaactgctggagaaaattgtccttgataactctgtattcagtgaacacaggaatctgcaaaacctccttatcctcactgcaattaaggctgaccgtacacgtgttatggagtatattaaccgcctggataattatgatgccccagatattgccaatatcgccatcagcaatgagctgtttgaagaagcatttgccattttccggaaatttgatgtcaatacttcagcagttcaggtcttaattgagcatattggaaacttggatcgggcatatgagtttgctgaacgttgcaatgaacctgcggtctggagtcaacttgcaaaagcccagttgcagaaaggaatggtgaaagaagccattgattcttatatcaaagcagatgatccttcctcctacatggaagttgttcaggctgccaatactagtggaaactgggaagaactggtgaagtacttgcagatggcccgtaagaaggctcgagagtcctatgtggagacagaactgatattcgcactggctaaaacaaaccgccttgcagagttagaagaatttatcaatggaccaaataatgctcatatccaacaagttggtgaccgttgttatgatgaaaaaatgtatgatgctgctaagttgttgtacaataatgtttccaattttggacgtttggcatctaccctggttcacctgggtgaatatcaggcagctgttgatggggctaggaaagctaacagtactcgaacatggaaagaggtctgcttcgcctgtgtagatgggaaagaattccgtcttgctcagatgtgtggacttcatattgttgtacatgcagatgaattagaagaacttatcaactactatcaggatcgtggctattttgaagagctgatcaccatgttggaagcagcactgggacttgagcgagctcacatgggaatgtttactgaattagctattctatactctaaatttaagcctcagaaaatgagggagcacctggagctgttctggtctagagtgaatattcccaaggtgctaagagctgcagaacaagctcatctttgggcagaactggtgtttttgtatgacaagtatgaagaatatgataatgccataattaccatgatgaatcatccaactgatgcctggaaagaagggcaattcaaagatatcattaccaaggttgccaatgtggaactatactacagagcaatacagttctacttagaattcaagcctctgttgttaaatgatttgctgatggtgctgtctccacggttggatcacactcgtgcagtcaattatttcagcaaggttaaacagctaccactggtgaaaccgtatttgcgttcagttcagaaccataacaacaaatctgtgaatgaatcattgaacaatctttttattacagaagaagattatcaggctctgcgaacatcaatagatgcttatgacaactttgacaatatctcgcttgctcagcgtttggaaaaacatgaactcattgagttcaggagaattgctgcttatctcttcaaaggcaacaatcgctggaaacagagtgtagagctgtgcaagaaagacagcctttacaaggatgcaatgcagtatgcttctgaatctaaagatactgaattggctgaagaactcctgcagtggtttttgcaggaagaaaaaagagagtgctttggagcttgtctgtttacctgttacgatcttttaaggccagatgtcgtcctagaaactgcatggaggcacaatatcatggattttgccatgccctatttcatccaggtcatgaaggagtacttgacaaaggtggataaattagatgcttcagaatcactgagaaaagaagaagaacaagctacagagacacaacccattgtttatggtcagccccagttgatgctgacagcaggacccagtgttgccgtccctccccaggcaccttttggttatggttataccgcaccaccgtatggacagccacagcctggctttgggtacagcatgtgagatgaagcgctgatcctgtagtcacctattttcgtactgaaacatcgtctttacccacttctcagtttataatgggggaaaacaggcaacgtgttcttgtaacctttatttcatgaaggacttctttttgtttctaactataaacttggatcacctatgttaaaaccttatttcacattccacatcattttagaatttattttcgaaggggaatagtttcaatgttttattcacttgggctttttttcttccccctctttctttaaagaactgctcaatattcaatctgttgtgaagaacctgatttgcactctgtagtgtttaaagaaacaaagaaactctaatattgaatctcttaaatttagtgtatgtaaacagcttacaaatacgtattgtctaaatgcatttaaatctgttttattcaaagaaaagctaaagcaaaaacactggcatatgaccatgcaagactgtcagtgccaacaaagacaacactaatcagcacatcgtacactggattgcagtgcttcccagattattgaaaaatgttacagacaacttgcctgatttttaaatgagcgtaaaaggccctctaacctatgcaggtttccccattatgcatatagaaaatgctagtatgttttgctcacttcatatgtaacaggtgcccttatgttgtgctgtatcctgtgctttttctgtgggaccattccattcaggagcaaagagcaccatgattccaatcttgtgtgtgtttactaacccttccctgaggtttgtgtatgttggatattgtggtgttttagatcactgagtgtacagaagagagaaattcaaacaaaatattgctgttcttcagttttgtttgtggaatttgaaattactcaaatttaaaataaattactggactgtggaaataacatagaattgaagttttaattaaataccactcaaacgaaaaaaaaaagggggcggtaaaaaatactcgagggccaagtacagtaccaggtttttgtacaagtggcctaaagagaggttaaagagagggggggttaaagggatgggaatgg

SEQ ID NO: 414908 - DNA, 3016 bp, Homo sapiens
gactctaaggatccccgtaagcgagatgttcacgaatgaacctgcggtctggagtcaacttgcaaaagcccagttgcagaaaggaatggtgaaagaagccattgattcttatatcaaagcagatgatccttcctcctacatggaagttgttcaggctgccaatactagtggaaactgggaagaactggtgaagtacttgcagatggcccgtaagaaggctcgagagtcctatgtggagacagaactgatattcgcactggctaaaacaaaccgccttgcagagttagaagaatttatcaatggaccaaataatgctcatatccaacaagttggtgaccgttgttatgatgaaaaaatgtatgatgctgctaagttgttgtacaataatgtttccaattttggacgtttggcatctaccctggttcacctgggtgaatatcaggcagctgttgatggggctaggaaagctaacagtactcgaacatggaaagaggtctgcttcgcctgtgtagatgggaaagaattccgtcttgctcagatgtgtggacttcatattgttgtacatgcagatgaattagaagaacttatcaactactatcaggatcgtggctattttgaagagctgatcaccatgttggaagcagcactgggacttgagcgagctcacatgggaatgtttactgaattagctattctatactctaaatttaagcctcagaaaatgagggagcacctggagctgttctggtctagagtgaatattcccaaggtgctaagagctgcagaacaagctcatctttgggcagaactggtgtttttgtatgacaagtatgaagaatatgataatgccataattaccatgatgaatcatccaactgatgcctggaaagaagggcaattcaaagatatcattaccaaggttgccaatgtggaactatactacagagcaatacagttctacttagaattcaagcctctgttgttaaatgatttgctgatggtgctgtctccacggttggatcacactcgtgcagtcaattatttcagcaaggttaaacagctaccactggtgaaaccgtatttgcgttcagttcagaaccataacaacaaatctgtgaatgaatcattgaacaatctttttattacagaagaagattatcaggctctgcgaacatcaatagatgcttatgacaactttgacaatatctcgcttgctcagcgtttggaaaaacatgaactcattgagttcaggagaattgctgcttatctcttcaaaggcaacaatcgctggaaacagagtgtagagctgtgcaagaaagacagcctttacaaggatgcaatgcagtatgcttctgaatctaaagatactgaattggctgaagaactcctgcagtggtttttgcaggaagaaaaaagagagtgctttggagcttgtctgtttacctgttacgatcttttaaggccagatgtcgtcctagaaactgcatggaggcacaatatcatggattttgccatgccctatttcatccaggtcatgaaggagtacttgacaaaggtggataaattagatgcttcagaatcactgagaaaagaagaagaacaagctacagagacacaacccattgtttatggtcagccccagttgatgctgacagcaggacccagtgttgccgtccctccccaggcaccttttggttatggttataccgcaccaccgtatggacagccacagcctggctttgggtacagcatgtgagatgaagcgctgatcctgtagtcacctattttcgtactgaaacatcgtctttacccacttctcagtttataatgggggaaaacaggcaacgtgttcttgtaacctttatttcatgaaggacttctttttgtttctaactataaacttggatcacctatgttaaaaccttatttcacattccacatcattttagaatttattttcgaaggggaatagtttcaatgttttattcacttgggctttttttcttccccctctttctttaaagaactgctcaatattcaatctgttgtgaagaacctgatttgcactctgtagtgtttaaagaaacaaagaaactctaatattgaatctcttaaatttagtgtatgtaaacagcttacaaatacgtattgtctaaatgcatttaaatctgttttattcaaagaaaagctaaagcaaaaacactggcatatgaccatgcaagactgtcagtgccaacaaagacaacactaatcagcacatcgtacactggattgcagtgcttcccagattattgaaaaatgttacagacaacttgcctgatttttaaatgagcgtaaaaggccctctaacctatgcaggtttccccattatgcatatagaaaatgctagtatgttttgctcacttcatatgtaacaggtgcccttatgttgtgctgtatcctgtgctttttctgtgggaccattccattcaggagcaaagagcaccatgattccaatcttgtgtgtgtttactaacccttccctgaggtttgtgtatgttggatattgtggtgttttagatcactgagtgtacagaagagagaaattcaaacaaaatattgctgttcttcagttttgtttgtggaatttgaaattactcaaatttaaaataaattactggactgtggaaataacatagaattgaagttttaattaaataccactcaaacgaaaagaacagtagtttttgtagttttatattggatactgaggcattagggaggcatgaaaggaagaggaatgaggattgagacatgtgaagacattgtgcattatatcaatgtgcattcctgtagttcattaacaaggtacatgcaatagtctaaagaaccagagtcactactatagtggcttaacatttaatctgtctccaatattttaaccaagtgacaccgaggtttttatcgaagcatttcacttaaatgaacaaatcatggctgttatattaacttgaaataaaatatatttaaacatgta

SEQ ID NO: 414909 - DNA, 2888 bp, Homo sapiens
caagcagtgtactctcacatgagtgttcagcgccatactagtgaaactgggaagaactggtgaagtacttgcagatggcccgtaagaaggctcgagagtcctatgtggagacagaactgatattcgcactggctaaaacaaaccgccttgcagagttagaagaatttatcaatggaccaaataatgctcatatccaacaagttggtgaccgttgttatgatgaaaaaatgtatgatgctgctaagttgttgtacaataatgtttccaattttggacgtttggcatctaccctggttcacctgggtgaatatcaggcagctgttgatggggctaggaaagctaacagtactcgaacatggaaagaggtctgcttcgcctgtgtagatgggaaagaattccgtcttgctcagatgtgtggacttcatattgttgtacatgcagatgaattagaagaacttatcaactactatcaggatcgtggctattttgaagagctgatcaccatgttggaagcagcactgggacttgagcgagctcacatgggaatgtttactgaattagctattctatactctaaatttaagcctcagaaaatgagggagcacctggagctgttctggtctagagtgaatattcccaaggtgctaagagctgcagaacaagctcatctttgggcagaactggtgtttttgtatgacaagtatgaagaatatgataatgccataattaccatgatgaatcatccaactgatgcctggaaagaagggcaattcaaagatatcattaccaaggttgccaatgtggaactatactacagagcaatacagttctacttagaattcaagcctctgttgttaaatgatttgctgatggtgctgtctccacggttggatcacactcgtgcagtcaattatttcagcaaggttaaacagctaccactggtgaaaccgtatttgcgttcagttcagaaccataacaacaaatctgtgaatgaatcattgaacaatctttttattacagaagaagattatcaggctctgcgaacatcaatagatgcttatgacaactttgacaatatctcgcttgctcagcgtttggaaaaacatgaactcattgagttcaggagaattgctgcttatctcttcaaaggcaacaatcgctggaaacagagtgtagagctgtgcaagaaagacagcctttacaaggatgcaatgcagtatgcttctgaatctaaagatactgaattggctgaagaactcctgcagtggtttttgcaggaagaaaaaagagagtgctttggagcttgtctgtttacctgttacgatcttttaaggccagatgtcgtcctagaaactgcatggaggcacaatatcatggattttgccatgccctatttcatccaggtcatgaaggagtacttgacaaaggtggataaattagatgcttcagaatcactgagaaaagaagaagaacaagctacagagacacaacccattgtttatggtcagccccagttgatgctgacagcaggacccagtgttgccgtccctccccaggcaccttttggttatggttataccgcaccaccgtatggacagccacagcctggctttgggtacagcatgtgagatgaagcgctgatcctgtagtcacctattttcgtactgaaacatcgtctttacccacttctcagtttataatgggggaaaacaggcaacgtgttcttgtaacctttatttcatgaaggacttctttttgtttctaactataaacttggatcacctatgttaaaaccttatttcacattccacatcattttagaatttattttcgaaggggaatagtttcaatgttttattcacttgggctttttttcttccccctctttctttaaagaactgctcaatattcaatctgttgtgaagaacctgatttgcactctgtagtgtttaaagaaacaaagaaactctaatattgaatctcttaaatttagtgtatgtaaacagcttacaaatacgtattgtctaaatgcatttaaatctgttttattcaaagaaaagctaaagcaaaaacactggcatatgaccatgcaagactgtcagtgccaacaaagacaacactaatcagcacatcgtacactggattgcagtgcttcccagattattgaaaaatgttacagacaacttgcctgatttttaaatgagcgtaaaaggccctctaacctatgcaggtttccccattatgcatatagaaaatgctagtatgttttgctcacttcatatgtaacaggtgcccttatgttgtgctgtatcctgtgctttttctgtgggaccattccattcaggagcaaagagcaccatgattccaatcttgtgtgtgtttactaacccttccctgaggtttgtgtatgttggatattgtggtgttttagatcactgagtgtacagaagagagaaattcaaacaaaatattgctgttcttcagttttgtttgtggaatttgaaattactcaaatttaaaataaattactggactgtggaaataacatagaattgaagttttaattaaataccactcaaacgaaaagaacagtagtttttgtagttttatattggatactgaggcattagggaggcatgaaaggaagaggaatgaggattgagacatgtgaagacattgtgcattatatcaatgtgcattcctgtagttcattaacaaggtacatgcaatagtctaaagaaccagagtcactactatagtggcttaacatttaatctgtctccaatattttaaccaagtgacaccgaggtttttatcgaagcatttcacttaaatgaacaaatcatggctgttatattaacttgaaataaaatatatttaaacatgta

SEQ ID NO: 414910 - DNA, 6472 bp, Homo sapiens
cagccgtttccggagtctgcgctgcgcccggttccgccattgcggctctcctggcccctggagcctccgcccccgacccgagctctttcgtctgcctgccagtttcctgcgtccccggagaggatcctgctgagcccagcctcccccctccccttctcctcctctcccttggagagcccgggcagccactgccccgcagccccagtgacaggaggagaccataacccccgacagcgccatggcccagattctgccaattcgttttcaggagcatctccagctccagaacctgggtatcaacccagcaaacattggcttcagtaccctgactatggagtctgacaaattcatctgcattagagaaaaagtaggagagcaggcccaggtggtaatcattgatatgaatgacccaagtaatccaattcgaagaccaatttcagcagacagcgccatcatgaatccagctagcaaagtaattgcactgaaagctgggaaaactcttcagatttttaacattgaaatgaaaagtaaaatgaaggctcataccatgactgatgatgtcaccttttggaaatggatctctttgaatacggttgctcttgttacggataatgcagtttatcactggagtatggaaggagagtctcagccagtgaaaatgtttgatcgccattctagccttgcagggtgccagattatcaattaccgtacagatgcaaaacaaaagtggttacttctgactggtatatctgcacagcaaaatcgtgtggtgggagctatgcagctatattctgtagataggaaagtgtctcagcccattgaaggacatgcagctagctttgcacagtttaagatggaaggaaatgcagaagaatcaacgttattttgttttgcagttcggggccaagctggagggaagttacatattattgaagttggcacaccacctacagggaaccagccctttccaaagaaggcagtggatgtcttctttcctccagaagcacaaaatgattttcctgttgcaatgcagatcagtgaaaagcatgatgtggtgttcttgataaccaagtatggttatatccacctctatgatcttgagactggtacctgcatctacatgaatagaatcagtggagaaacaatttttgttactgcacctcatgaagccacagctggaataattggagtaaacagaaagggacaagttctgtcagtgtgtgtggaagaagaaaacataattccttacatcaccaatgttctacaaaatcctgatttggctctgagaatggctgtacgtaataacttagccggtgctgaagaactctttgcccggaaatttaatgctctttttgcccagggaaattactcggaggcagcaaaggtggctgctaatgcaccaaagggaattcttcgtactccagacactatccgtcggttccagagtgtcccagcccagccaggtcaaacttctcctctacttcagtactttggtatccttttggaccagggacagctcaacaaatacgaatccttagagctttgtaggcctgtacttcagcaagggcgaaaacagcttttggagaaatggttaaaagaagataagctggaatgttctgaagaactgggtgatcttgtgaaatctgtggaccctacattggcacttagtgtgtacctaagggctaacgtcccaaataaagtcattcagtgctttgcagaaacaggtcaagtccaaaagattgttttatatgctaaaaaagttggatacactccagattggatatttctgctgagaaatgtaatgcgaatcagtccagatcagggacagcagtttgcccaaatgttagttcaagatgaagagcctcttgctgacatcacacagattgtagatgtctttatggaatacaatctaattcagcagtgtactgcattcttgcttgatgctctgaagaataatcgcccatctgaaggtcctttacagacgcggttacttgagatgaaccttatgcatgcgcctcaagttgcagatgctattctaggcaatcagatgttcacacattatgaccgggctcatattgctcaactgtgtgaaaaggctggcctactgcagcgtgcattagaacatttcactgatttatatgatataaaacgtgcagtggttcacacccatcttcttaaccctgagtggttagtcaactactttggttccttatcagtagaagactccctagaatgtctcagagccatgctgtctgccaacatccgtcagaatctgcagatttgtgttcaggtggcttctaaatatcatgaacaactgtcaactcagtctctgattgaactttttgaatctttcaagagttttgaaggtctcttttattttctgggatccattgttaactttagccaggacccagatgtgcactttaaatatattcaggcagcttgcaagactgggcaaatcaaagaagtagaaagaatctgtagagaaagcaactgctacgatcctgagcgagtcaagaattttcttaaggaagcaaaactaacagatcagctaccacttatcattgtgtgtgatcgatttgactttgtccatgatttggtgctctatttatatagaaataatcttcaaaagtatatagagatatatgtacagaaggtgaatccaagtcgacttcctgtagttattggaggattacttgatgttgactgttctgaagatgtcataaaaaacttgattcttgttgtaagaggtcaattctctactgatgagcttgttgctgaggttgaaaaaagaaacagattgaaactgcttctgccttggctagaggccagaattcatgagggctgtgaggagcctgctactcacaatgccttagccaaaatctacatagacagtaataacaacccggagagatttcttcgtgaaaatccctactatgacagtcgcgttgttggaaagtattgtgagaagagagatccacatctggcctgtgttgcttatgaacgtggccaatgtgatctggaacttattaatgtttgcaatgagaattccctcttcaaaagtctttctcgctacctggtacgtcgaaaggatccagaattgtggggcagcgtgctgctggaaagcaatccttacaggagacccctaattgaccaggttgtacaaacagctttgtctgagactcaggaccctgaagaagtgtcagtaactgtaaaggctttcatgactgcagaccttcctaatgaactcattgaactgctggagaaaattgtccttgataactctgtattcagtgaacacaggaatctgcaaaacctccttatcctcactgcaattaaggctgaccgtacacgtgttatggagtatattaaccgcctggataattatgatgccccagatattgccaatatcgccatcagcaatgagctgtttgaagaagcatttgccattttccggaaatttgatgtcaatacttcagcagttcaggtcttaattgagcatattggaaacttggatcgggcatatgagtttgctgaacgttgcaatgaacctgcggtctggagtcaacttgcaaaagcccagttgcagaaaggaatggtgaaagaagccattgattcttatatcaaagcagatgatccttcctcctacatggaagttgttcaggctgccaatactagtggaaactgggaagaactggtgaagtacttgcagatggcccgtaagaaggctcgagagtcctatgtggagacagaactgatattcgcactggctaaaacaaaccgccttgcagagttagaagaatttatcaatggaccaaataatgctcatatccaacaagttggtgaccgttgttatgatgaaaaaatgtatgatgctgctaagttgttgtacaataatgtttccaattttggacgtttggcatctaccctggttcacctgggtgaatatcaggcagctgttgatggggctaggaaagctaacagtactcgaacatggaaagaggtctgcttcgcctgtgtagatgggaaagaattccgtcttgctcagatgtgtggacttcatattgttgtacatgcagatgaattagaagaacttatcaactactatcaggatcgtggctattttgaagagctgatcaccatgttggaagcagcactgggacttgagcgagctcacatgggaatgtttactgaattagctattctatactctaaatttaagcctcagaaaatgagggagcacctggagctgttctggtctagagtgaatattcccaaggtgctaagagctgcagaacaagctcatctttgggcagaactggtgtttttgtatgacaagtatgaagaatatgataatgccataattaccatgatgaatcatccaactgatgcctggaaagaagggcaattcaaagatatcattaccaaggttgccaatgtggaactatactacagagcaatacagttctacttagaattcaagcctctgttgttaaatgatttgctgatggtgctgtctccacggttggatcacactcgtgcagtcaattatttcagcaaggttaaacagctaccactggtgaaaccgtatttgcgttcagttcagaaccataacaacaaatctgtgaatgaatcattgaacaatctttttattacagaagaagattatcaggctctgcgaacatcaatagatgcttatgacaactttgacaatatctcgcttgctcagcgtttggaaaaacatgaactcattgagttcaggagaattgctgcttatctcttcaaaggcaacaatcgctggaaacagagtgtagagctgtgcaagaaagacagcctttacaaggatgcaatgcagtatgcttctgaatctaaagatactgaattggctgaagaactcctgcagtggtttttgcaggaagaaaatgtcgtcctagaaactgcatggaggcacaatatcatggattttgccatgccctatttcatccaggtcatgaaggagtacttgacaaaggtggataaattagatgcttcagaatcactgagaaaagaagaagaacaagctacagagacacaacccattgtttatggtcagccccagttgatgctgacagcaggacccagtgttgccgtccctccccaggcaccttttggttatggttataccgcaccaccgtatggacagccacagcctggctttgggtacagcatgtgagatgaagcgctgatcctgtagtcacctattttcgtactgaaacatcgtctttacccacttctcagtttataatgggggaaaacaggcaacgtgttcttgtaacctttatttcatgaaggacttctttttgtttctaactataaacttggatcacctatgttaaaaccttatttcacattccacatcattttagaatttattttcgaaggggaatagtttcaatgttttattcacttgggctttttttcttccccctctttctttaaagaactgctcaatattcaatctgttgtgaagaacctgatttgcactctgtagtgtttaaagaaacaaagaaactctaatattgaatctcttaaatttagtgtatgtaaacagcttacaaatacgtattgtctaaatgcatttaaatctgttttattcaaagaaaagctaaagcaaaaacactggcatatgaccatgcaagactgtcagtgccaacaaagacaacactaatcagcacatcgtacactggattgcagtgcttcccagattattgaaaaatgttacagacaacttgcctgatttttaaatgagcgtaaaaggccctctaacctatgcaggtttccccattatgcatatagaaaatgctagtatgttttgctcacttcatatgtaacaggtgcccttatgttgtgctgtatcctgtgctttttctgtgggaccattccattcaggagcaaagagcaccatgattccaatcttgtgtgtgtttactaacccttccctgaggtttgtgtatgttggatattgtggtgttttagatcactgagtgtacagaagagagaaattcaaacaaaatattgctgttcttcagttttgtttgtggaatttgaaattactcaaatttaaaataaattactggactgtggaaataacatagaattgaagttttaattaaataccactcaaacgaaaagaacagtagtttttgtagttttatattggatactgaggcattagggaggcatgaaaggaagaggaatgaggattgagacatgtgaagacattgtgcattatatcaatgtgcattcctgtagttcattaacaaggtacatgcaatagtctaaagaaccagagtcactactatagtggcttaacatttaatctgtctccaatattttaaccaagtgacaccgaggtttttatcgaagcatttcacttaaatgaacaaatcatggctgttatattaacttgaaataaaatatatttaaacatgta

SEQ ID NO: 414911 - DNA, 2172 bp, Homo sapiens
ccggaccggcatactggaccttctcatccaactgatgcctggaaagaagggcaattcaaagatatcattaccaaggttgccaatgtggaactatactacagagcaatacagttctacttagaattcaagcctctgttgttaaatgatttgctgatggtgctgtctccacggttggatcacactcgtgcagtcaattatttcagcaaggttaaacagctaccactggtgaaaccgtatttgcgttcagttcagaaccataacaacaaatctgtgaatgaatcattgaacaatctttttattacagaagaagattatcaggctctgcgaacatcaatagatgcttatgacaactttgacaatatctcgcttgctcagcgtttggaaaaacatgaactcattgagttcaggagaattgctgcttatctcttcaaaggcaacaatcgctggaaacagagtgtagagctgtgcaagaaagacagcctttacaaggatgcaatgcagtatgcttctgaatctaaagatactgaattggctgaagaactcctgcagtggtttttgcaggaagaaaaaagagagtgctttggagcttgtctgtttacctgttacgatcttttaaggccagatgtcgtcctagaaactgcatggaggcacaatatcatggattttgccatgccctatttcatccaggtcatgaaggagtacttgacaaaggtggataaattagatgcttcagaatcactgagaaaagaagaagaacaagctacagagacacaacccattgtttatggtcagccccagttgatgctgacagcaggacccagtgttgccgtccctccccaggcaccttttggttatggttataccgcaccaccgtatggacagccacagcctggctttgggtacagcatgtgagatgaagcgctgatcctgtagtcacctattttcgtactgaaacatcgtctttacccacttctcagtttataatgggggaaaacaggcaacgtgttcttgtaacctttatttcatgaaggacttctttttgtttctaactataaacttggatcacctatgttaaaaccttatttcacattccacatcattttagaatttattttcgaaggggaatagtttcaatgttttattcacttgggctttttttcttccccctctttctttaaagaactgctcaatattcaatctgttgtgaagaacctgatttgcactctgtagtgtttaaagaaacaaagaaactctaatattgaatctcttaaatttagtgtatgtaaacagcttacaaatacgtattgtctaaatgcatttaaatctgttttattcaaagaaaagctaaagcaaaaacactggcatatgaccatgcaagactgtcagtgccaacaaagacaacactaatcagcacatcgtacactggattgcagtgcttcccagattattgaaaaatgttacagacaacttgcctgatttttaaatgagcgtaaaaggccctctaacctatgcaggtttccccattatgcatatagaaaatgctagtatgttttgctcacttcatatgtaacaggtgcccttatgttgtgctgtatcctgtgctttttctgtgggaccattccattcaggagcaaagagcaccatgattccaatcttgtgtgtgtttactaacccttccctgaggtttgtgtatgttggatattgtggtgttttagatcactgagtgtacagaagagagaaattcaaacaaaatattgctgttcttcagttttgtttgtggaatttgaaattactcaaatttaaaataaattactggactgtggaaataacatagaattgaagttttaattaaataccactcaaacgaaaagaacagtagtttttgtagttttatattggatactgaggcattagggaggcatgaaaggaagaggaatgaggattgagacatgtgaagacattgtgcattatatcaatgtgcattcctgtagttcattaacaaggtacatgcaatagtctaaagaaccagagtcactactatagtggcttaacatttaatctgtctccaatattttaaccaagtgacaccgaggtttttatcgaagcatttcacttaaatgaacaaatcatggctgttatattaacttgaaataaaatatatttaaacatgta

SEQ ID NO: 414912 - DNA, 1725 bp, Homo sapiens
aagcgcacgatggcgcgtcccaagaaagacagcctttacaaggatgcaatgcagtatgcttctgaatctaaagatactgaattggctgaagaactcctgcagtggtttttgcaggaagaaaaaagagagtgctttggagcttgtctgtttacctgttacgatcttttaaggccagatgtcgtcctagaaactgcatggaggcacaatatcatggattttgccatgccctatttcatccaggtcatgaaggagtacttgacaaaggtggataaattagatgcttcagaatcactgagaaaagaagaagaacaagctacagagacacaacccattgtttatggtcagccccagttgatgctgacagcaggacccagtgttgccgtccctccccaggcaccttttggttatggttataccgcaccaccgtatggacagccacagcctggctttgggtacagcatgtgagatgaagcgctgatcctgtagtcacctattttcgtactgaaacatcgtctttacccacttctcagtttataatgggggaaaacaggcaacgtgttcttgtaacctttatttcatgaaggacttctttttgtttctaactataaacttggatcacctatgttaaaaccttatttcacattccacatcattttagaatttattttcgaaggggaatagtttcaatgttttattcacttgggctttttttcttccccctctttctttaaagaactgctcaatattcaatctgttgtgaagaacctgatttgcactctgtagtgtttaaagaaacaaagaaactctaatattgaatctcttaaatttagtgtatgtaaacagcttacaaatacgtattgtctaaatgcatttaaatctgttttattcaaagaaaagctaaagcaaaaacactggcatatgaccatgcaagactgtcagtgccaacaaagacaacactaatcagcacatcgtacactggattgcagtgcttcccagattattgaaaaatgttacagacaacttgcctgatttttaaatgagcgtaaaaggccctctaacctatgcaggtttccccattatgcatatagaaaatgctagtatgttttgctcacttcatatgtaacaggtgcccttatgttgtgctgtatcctgtgctttttctgtgggaccattccattcaggagcaaagagcaccatgattccaatcttgtgtgtgtttactaacccttccctgaggtttgtgtatgttggatattgtggtgttttagatcactgagtgtacagaagagagaaattcaaacaaaatattgctgttcttcagttttgtttgtggaatttgaaattactcaaatttaaaataaattactggactgtggaaataacatagaattgaagttttaattaaataccactcaaacgaaaagaacagtagtttttgtagttttatattggatactgaggcattagggaggcatgaaaggaagaggaatgaggattgagacatgtgaagacattgtgcattatatcaatgtgcattcctgtagttcattaacaaggtacatgcaatagtctaaagaaccagagtcactactatagtggcttaacatttaatctgtctccaatattttaaccaagtgacaccgaggtttttatcgaagcatttcacttaaatgaacaaatcatggctgttatattaacttgaaataaaatatatttaaacatgta

SEQ ID NO: 414913 - DNA, 6065 bp, Homo sapiens
cagccgtttccggagtctgcgctgcgcccggttccgccattgcggctctcctggcccctggagcctccgcccccgacccgagctctttcgtctgcctgccagtttcctgcgtccccggagaggatcctgctgagcccagcctcccccctccccttctcctcctctcccttggagagcccgggcagccactgccccgcagccccagtgacaggaggagaccataacccccgacagcgccatggcccagattctgccaattcgttttcaggagcatctccagctccagaacctgggtatcaacccagcaaacattggcttcagtaccctgactatggagtctgacaaattcatctgcattagagaaaaagtaggagagcaggcccaggtggtaatcattgatatgaatgacccaagtaatccaattcgaagaccaatttcagcagacagcgccatcatgaatccagctagcaaagtaattgcactgaaagctgggaaaactcttcagatttttaacattgaaatgaaaagtaaaatgaaggctcataccatgactgatgatgtcaccttttggaaatggatctctttgaatacggttgctcttgttacggataatgcagtttatcactggagtatggaaggagagtctcagccagtgaaaatgtttgatcgccattctagccttgcagggtgccagattatcaattaccgtacagatgcaaaacaaaagtggttacttctgactggtatatctgcacagcaaaatcgtgtggtgggagctatgcagctatattctgtagataggaaagtgtctcagcccattgaaggacatgcagctagctttgcacagtttaagatggaaggaaatgcagaagaatcaacgttattttgttttgcagttcggggccaagctggagggaagttacatattattgaagttggcacaccacctacagggaaccagccctttccaaagaaggcagtggatgtcttctttcctccagaagcacaaaatgattttcctgttgcaatgcagatcagtgaaaagcatgatgtggtgttcttgataaccaagtatggttatatccacctctatgatcttgagactggtacctgcatctacatgaatagaatcagtggagaaacaatttttgttactgcacctcatgaagccacagctggaataattggagtaaacagaaagggacaagttctgtcagtgtgtgtggaagaagaaaacataattccttacatcaccaatgttctacaaaatcctgatttggctctgagaatggctgtacgtaataacttagccggtgctgaagaactctttgcccggaaatttaatgctctttttgcccagggaaattactcggaggcagcaaaggtggctgctaatgcaccaaagggaattcttcgtactccagacactatccgtcggttccagagtgtcccagcccagccaggtcaaacttctcctctacttcagtactttggtatccttttggaccagggacagctcaacaaatacgaatccttagagctttgtaggcctgtacttcagcaagggcgaaaacagcttttggagaaatggttaaaagaagataagctggaatgttctgaagaactgggtgatcttgtgaaatctgtggaccctacattggcacttagtgtgtacctaagggctaacgtcccaaataaagtcattcagtgctttgcagaaacaggtcaagtccaaaagattgttttatatgctaaaaaagttggatacactccagattggatatttctgctgagaaatgtaatgcgaatcagtccagatcagggacagcagtttgcccaaatgttagttcaagatgaagagcctcttgctgacatcacacagattgtagatgtctttatggaatacaatctaattcagcagtgtactgcattcttgcttgatgctctgaagaataatcgcccatctgaaggtcctttacagacgcggttacttgagatgaaccttatgcatgcgcctcaagttgcagatgctattctaggcaatcagatgttcacacattatgaccgggctcatattgctcaactgtgtgaaaaggctggcctactgcagcgtgcattagaacatttcactgatttatatgatataaaacgtgcagtggttcacacccatcttcttaaccctgagtggttagtcaactactttggttccttatcagtagaagactccctagaatgtctcagagccatgctgtctgccaacatccgtcagaatctgcagatttgtgttcaggtggcttctaaatatcatgaacaactgtcaactcagtctctgattgaactttttgaatctttcaagagttttgaaggtctcttttattttctgggatccattgttaactttagccaggacccagatgtgcactttaaatatattcaggcagcttgcaagactgggcaaatcaaagaagtagaaagaatctgtagagaaagcaactgctacgatcctgagcgagtcaagaattttcttaaggaagcaaaactaacagatcagctaccacttatcattgtgtgtgatcgatttgactttgtccatgatttggtgctctatttatatagaaataatcttcaaaagtatatagagatatatgtacagaaggtgaatccaagtcgacttcctgtagttattggaggattacttgatgttgactgttctgaagatgtcataaaaaacttgattcttgttgtaagaggtcaattctctactgatgagcttgttgctgaggttgaaaaaagaaacagattgaaactgcttctgccttggctagaggccagaattcatgagggctgtgaggagcctgctactcacaatgccttagccaaaatctacatagacagtaataacaacccggagagatttcttcgtgaaaatccctactatgacagtcgcgttgttggaaagtattgtgagaagagagatccacatctggcctgtgttgcttatgaacgtggccaatgtgatctggaacttattaatgtttgcaatgagaattccctcttcaaaagtctttctcgctacctggtacgtcgaaaggatccagaattgtggggcagcgtgctgctggaaagcaatccttacaggagacccctaattgaccaggttgtacaaacagctttgtctgagactcaggaccctgaagaagtgtcagtaactgtaaaggctttcatgactgcagaccttcctaatgaactcattgaactgctggagaaaattgtccttgataactctgtattcagtgaacacaggaatctgcaaaacctccttatcctcactgcaattaaggctgaccgtacacgtgttatggagtatattaaccgcctggataattatgatgccccagatattgccaatatcgccatcagcaatgagctgtttgaagaagcatttgccattttccggaaatttgatgtcaatacttcagcagttcaggtcttaattgagcatattggaaacttggatcgggcatatgagtttgctgaacgttgcaatgaacctgcggtctggagtcaacttgcaaaagcccagttgcagaaaggaatggtgaaagaagccattgattcttatatcaaagcagatgatccttcctcctacatggaagttgttcaggctgccaatactagtggaaactgggaagaactggtgaagtacttgcagatggcccgtaagaaggctcgagagtcctatgtggagacagaactgatattcgcactggctaaaacaaaccgccttgcagagttagaagaatttatcaatggaccaaataatgctcatatccaacaagttggtgaccgttgttatgatgaaaaaatgtatgatgctgctaagttgttgtacaataatgtttccaattttggacgtttggcatctaccctggttcacctgggtgaatatcaggcagctgttgatggggctaggaaagctaacagtactcgaacatggaaagaggtctgcttcgcctgtgtagatgggaaagaattccgtcttgctcagatgtgtggacttcatattgttgtacatgcagatgaattagaagaacttatcaactactatcaggatcgtggctattttgaagagctgatcaccatgttggaagcagcactgggacttgagcgagctcacatgggaatgtttactgaattagctattctatactctaaatttaagcctcagaaaatgagggagcacctggagctgttctggtctagagtgaatattcccaaggtgctaagagctgcagaacaagctcatctttgggcagaactggtgtttttgtatgacaagtatgaagaatatgataatgccataattaccatgatgaatcatccaactgatgcctggaaagaagggcaattcaaagatatcattaccaaggttgccaatgtggaactatactacagagcaatacagttctacttagaattcaagcctctgttgttaaatgatttgctgatggtgctgtctccacggttggatcacactcgtgcagtcaattatttcagcaaggttaaacagctaccactggtgaaaccgtatttgcgttcagttcagaaccataacaacaaatctgtgaatgaatcattgaacaatctttttattacagaagaagattatcaggctctgcgaacatcaatagatgcttatgacaactttgacaatatctcgcttgctcagcgtttggaaaaacatgaactcattgagttcaggagaattgctgcttatctcttcaaaggcaacaatcgctggaaacagagtgtagagctgtgcaagaaagacagcctttacaaggatgcaatgcagtatgcttctgaatctaaagatactgaattggctgaagaactcctgcagtggtttttgcaggaagaaaaaagagagtgctttggagcttgtctgtttacctgttacgatcttttaaggccagatgtcgtcctagaaactgcatggaggcacaatatcatggattttgccatgccctatttcatccaggtcatgaaggagtacttgacaaaggtggataaattagatgcttcagaatcactgagaaaagaagaagaacaagctacagagacacaacccattgtttatggtcagccccagttgatgctgacagcaggacccagtgttgccgtccctccccaggcaccttttggttatggttataccgcaccaccgtatggacagccacagcctggctttgggtacagcatgtgagatgaagcgctgatcctgtagtcacctattttcgtactgaaacatcgtctttacccacttctcagtttataatgggggaaaacaggcaacgtgttcttgtaacctttatttcatgaaggacttctttttgtttctaactataaacttggatcacctatgttaaaaccttatttcacattccacatcattttagaatttattttcgaaggggaatagtttcaatgttttattcacttgggctttttttcttccccctctttctttaaagaactgctcaatattcaatctgttgtgaagaacctgatttgcactctgtagtgtttaaagaaacaaagaaactctaatattgaatctcttaaatttagtgtatgtaaacagcttacaaatacgtattgtctaaatgcatttaaatctgttttattcaaagaaaagctaaagcaaaaacactggcatatgaccatgcaagactgtcagtgccaacaaagacaacactaatcagcacatcgtacactggattgcagtgcttcccagattattgaaaaatgttacagacaacttgcctgatttttaaatgagcgtaaaaggccctctaacctatgcaggtttccccattatgcatatagaaaatgctagtatgttttgctcacttcatatgtaacaggtgcccttatgttgtgctgtatcctgtgctttttctgtgggaccattccattcaggagcaaagagcaccatgattccaatcttgtgtgtgtttactaacccttgggaaaagtaggaccgagctcgatttacatggtgg

SEQ ID NO: 414914 - DNA, 6114 bp, Homo sapiens
cagccgtttccggagtctgcgctgcgcccggttccgccattgcggctctcctggcccctggagcctccgcccccgacccgagctctttcgtctgcctgccagtttcctgcgtccccggagaggatcctgctgagcccagcctcccccctccccttctcctcctctcccttggagagcccgggcagccactgccccgcagccccagtgacaggaggagaccataacccccgacagcgccatggcccagattctgccaattcgttttcaggagcatctccagctccagaacctgggtatcaacccagcaaacattggcttcagtaccctgactatggagtctgacaaattcatctgcattagagaaaaagtaggagagcaggcccaggtggtaatcattgatatgaatgacccaagtaatccaattcgaagaccaatttcagcagacagcgccatcatgaatccagctagcaaagtaattgcactgaaagctgggaaaactcttcagatttttaacattgaaatgaaaagtaaaatgaaggctcataccatgactgatgatgtcaccttttggaaatggatctctttgaatacggttgctcttgttacggataatgcagtttatcactggagtatggaaggagagtctcagccagtgaaaatgtttgatcgccattctagccttgcagggtgccagattatcaattaccgtacagatgcaaaacaaaagtggttacttctgactggtatatctgcacagcaaaatcgtgtggtgggagctatgcagctatattctgtagataggaaagtgtctcagcccattgaaggacatgcagctagctttgcacagtttaagatggaaggaaatgcagaagaatcaacgttattttgttttgcagttcggggccaagctggagggaagttacatattattgaagttggcacaccacctacagggaaccagccctttccaaagaaggcagtggatgtcttctttcctccagaagcacaaaatgattttcctgttgcaatgcagatcagtgaaaagcatgatgtggtgttcttgataaccaagtatggttatatccacctctatgatcttgagactggtacctgcatctacatgaatagaatcagtggagaaacaatttttgttactgcacctcatgaagccacagctggaataattggagtaaacagaaagggacaagttctgtcagtgtgtgtggaagaagaaaacataattccttacatcaccaatgttctacaaaatcctgatttggctctgagaatggctgtacgtaataacttagccggtgctgaagaactctttgcccggaaatttaatgctctttttgcccagggaaattactcggaggcagcaaaggtggctgctaatgcaccaaagggaattcttcgtactccagacactatccgtcggttccagagtgtcccagcccagccaggtcaaacttctcctctacttcagtactttggtatccttttggaccagggacagctcaacaaatacgaatccttagagctttgtaggcctgtacttcagcaagggcgaaaacagcttttggagaaatggttaaaagaagataagctggaatgttctgaagaactgggtgatcttgtgaaatctgtggaccctacattggcacttagtgtgtacctaagggctaacgtcccaaataaagtcattcagtgctttgcagaaacaggtcaagtccaaaagattgttttatatgctaaaaaagttggatacactccagattggatatttctgctgagaaatgtaatgcgaatcagtccagatcagggacagcagtttgcccaaatgttagttcaagatgaagagcctcttgctgacatcacacagattgtagatgtctttatggaatacaatctaattcagcagtgtactgcattcttgcttgatgctctgaagaataatcgcccatctgaaggtcctttacagacgcggttacttgagatgaaccttatgcatgcgcctcaagttgcagatgctattctaggcaatcagatgttcacacattatgaccgggctcatattgctcaactgtgtgaaaaggctggcctactgcagcgtgcattagaacatttcactgatttatatgatataaaacgtgcagtggttcacacccatcttcttaaccctgagtggttagtcaactactttggttccttatcagtagaagactccctagaatgtctcagagccatgctgtctgccaacatccgtcagaatctgcagatttgtgttcaggtggcttctaaatatcatgaacaactgtcaactcagtctctgattgaactttttgaatctttcaagagttttgaaggtctcttttattttctgggatccattgttaactttagccaggacccagatgtgcactttaaatatattcaggcagcttgcaagactgggcaaatcaaagaagtagaaagaatctgtagagaaagcaactgctacgatcctgagcgagtcaagaattttcttaaggaagcaaaactaacagatcagctaccacttatcattgtgtgtgatcgatttgactttgtccatgatttggtgctctatttatatagaaataatcttcaaaagtatatagagatatatgtacagaaggtgaatccaagtcgacttcctgtagttattggaggattacttgatgttgactgttctgaagatgtcataaaaaacttgattcttgttgtaagaggtcaattctctactgatgagcttgttgctgaggttgaaaaaagaaacagattgaaactgcttctgccttggctagaggccagaattcatgagggctgtgaggagcctgctactcacaatgccttagccaaaatctacatagacagtaataacaacccggagagatttcttcgtgaaaatccctactatgacagtcgcgttgttggaaagtattgtgagaagagagatccacatctggcctgtgttgcttatgaacgtggccaatgtgatctggaacttattaatgtttgcaatgagaattccctcttcaaaagtctttctcgctacctggtacgtcgaaaggatccagaattgtggggcagcgtgctgctggaaagcaatccttacaggagacccctaattgaccaggttgtacaaacagctttgtctgagactcaggaccctgaagaagtgtcagtaactgtaaaggctttcatgactgcagaccttcctaatgaactcattgaactgctggagaaaattgtccttgataactctgtattcagtgaacacaggaatctgcaaaacctccttatcctcactgcaattaaggctgaccgtacacgtgttatggagtatattaaccgcctggataattatgatgccccagatattgccaatatcgccatcagcaatgagctgtttgaagaagcatttgccattttccggaaatttgatgtcaatacttcagcagttcaggtcttaattgagcatattggaaacttggatcgggcatatgagtttgctgaacgttgcaatgaacctgcggtctggagtcaacttgcaaaagcccagttgcagaaaggaatggtgaaagaagccattgattcttatatcaaagcagatgatccttcctcctacatggaagttgttcaggctgccaatactagtggaaactgggaagaactggtgaagtacttgcagatggcccgtaagaaggctcgagagtcctatgtggagacagaactgatattcgcactggctaaaacaaaccgccttgcagagttagaagaatttatcaatggaccaaataatgctcatatccaacaagttggtgaccgttgttatgatgaaaaaatgtatgatgctgctaagttgttgtacaataatgtttccaattttggacgtttggcatctaccctggttcacctgggtgaatatcaggcagctgttgatggggctaggaaagctaacagtactcgaacatggaaagaggtctgcttcgcctgtgtagatgggaaagaattccgtcttgctcagatgtgtggacttcatattgttgtacatgcagatgaattagaagaacttatcaactactatcaggatcgtggctattttgaagagctgatcaccatgttggaagcagcactgggacttgagcgagctcacatgggaatgtttactgaattagctattctatactctaaatttaagcctcagaaaatgagggagcacctggagctgttctggtctagagtgaatattcccaaggtgctaagagctgcagaacaagctcatctttgggcagaactggtgtttttgtatgacaagtatgaagaatatgataatgccataattaccatgatgaatcatccaactgatgcctggaaagaagggcaattcaaagatatcattaccaaggttgccaatgtggaactatactacagagcaatacagttctacttagaattcaagcctctgttgttaaatgatttgctgatggtgctgtctccacggttggatcacactcgtgcagtcaattatttcagcaaggttaaacagctaccactggtgaaaccgtatttgcgttcagttcagaaccataacaacaaatctgtgaatgaatcattgaacaatctttttattacagaagaagattatcaggctctgcgaacatcaatagatgcttatgacaactttgacaatatctcgcttgctcagcgtttggaaaaacatgaactcattgagttcaggagaattgctgcttatctcttcaaaggcaacaatcgctggaaacagagtgtagagctgtgcaagaaagacagcctttacaaggatgcaatgcagtatgcttctgaatctaaagatactgaattggctgaagaactcctgcagtggtttttgcaggaagaaaaaagagagtgctttggagcttgtctgtttacctgttacgatcttttaaggccagatgtcgtcctagaaactgcatggaggcacaatatcatggattttgccatgccctatttcatccaggtcatgaaggagtacttgacaaaggtaatgactcttctaagtgtattcagaactagtttccttgcatgtaaaattctacatgcacattaatttttttaaatgcttttttctttagtagaagtaagtcatttagtcgatcataaaatattcctgttcttttgaaatttttttttaatagctgacaaatgacactgattggaaggggaactcaaatgtagctgtttaccctcagtgtatttatgagggtgaaaataatctatgtatttttttatttaaaaaactttgataaattttatttcaaaatagtatttttctcaaaatcagttcttgtaactcaaatattcatgactagtattgtagattcccttttatttggttggttcctgactttaatgatgtctatgcctgtttcccctggggaagctgcatgtatattcttaacatccttttaatcttcacaatttttttgatagtttaacccctgatttaaaaataccataggaggtgaacatgggaaaaaaaaaacaagctgggggtctaattgccttataacattcactattcgtcttagtgtccttttttgatgtatgaatttactcaccctatcttcagcagttactagctgtctctctgtagaacatttttaaatggttttagaggatccttttcgtcaaagcaaaaaacatgattaaaatcagagtctcacatctgattccttcagcctgcctgagttggggggatgggagggtgaagaagcgctaccaacaacccctcccatactgaatttttcctcaggataccatttaattagataccattgtgtctgtttaaagtttttaaagaattaacattttctgtattcaatgtaagagaaaaaacatgttgccttatcttagccatagatgagaatagcttcttaaacataatgccaacttgtgagacctgtctttaagctgctgttaacctaagtgctgtaaatttttctagtgattaagctgctttctttcatactgtagcataaattcttctgcattaagctttgaagttacacaaaattctaaattttgcttcca

SEQ ID NO: 414915 - DNA, 4851 bp, Homo sapiens
cagccgtttccggagtctgcgctgcgcccggttccgccattgcggctctcctggcccctggagcctccgcccccgacccgagctctttcgtctgcctgccagtttcctgcgtccccggagaggatcctgctgagcccagcctcccccctccccttctcctcctctcccttggagagcccgggcagccactgccccgcagccccagtgacaggaggagaccataacccccgacagcgccatggcccagattctgccaattcgttttcaggagcatctccagctccagaacctgggtatcaacccagcaaacattggcttcagtaccctgactatggagtctgacaaattcatctgcattagagaaaaagtaggagagcaggcccaggtggtaatcattgatatgaatgacccaagtaatccaattcgaagaccaatttcagcagacagcgccatcatgaatccagctagcaaagtaattgcactgaaagctgggaaaactcttcagatttttaacattgaaatgaaaagtaaaatgaaggctcataccatgactgatgatgtcaccttttggaaatggatctctttgaatacggttgctcttgttacggataatgcagtttatcactggagtatggaaggagagtctcagccagtgaaaatgtttgatcgccattctagccttgcagggtgccagattatcaattaccgtacagatgcaaaacaaaagtggttacttctgactggtatatctgcacagcaaaatcgtgtggtgggagctatgcagctatattctgtagataggaaagtgtctcagcccattgaaggacatgcagctagctttgcacagtttaagatggaaggaaatgcagaagaatcaacgttattttgttttgcagttcggggccaagctggagggaagttacatattattgaagttggcacaccacctacagggaaccagccctttccaaagaaggcagtggatgtcttctttcctccagaagcacaaaatgattttcctgttgcaatgcagatcagtgaaaagcatgatgtggtgttcttgataaccaagtatggttatatccacctctatgatcttgagactggtacctgcatctacatgaatagaatcagtggagaaacaatttttgttactgcacctcatgaagccacagctggaataattggagtaaacagaaagggacaagttctgtcagtgtgtgtggaagaagaaaacataattccttacatcaccaatgttctacaaaatcctgatttggctctgagaatggctgtacgtaataacttagccggtgctgaagaactctttgcccggaaatttaatgctctttttgcccagggaaattactcggaggcagcaaaggtggctgctaatgcaccaaagggaattcttcgtactccagacactatccgtcggttccagagtgtcccagcccagccaggtcaaacttctcctctacttcagtactttggtatccttttggaccagggacagctcaacaaatacgaatccttagagctttgtaggcctgtacttcagcaagggcgaaaacagcttttggagaaatggttaaaagaagataagctggaatgttctgaagaactgggtgatcttgtgaaatctgtggaccctacattggcacttagtgtgtacctaagggctaacgtcccaaataaagtcattcagtgctttgcagaaacaggtcaagtccaaaagattgttttatatgctaaaaaagttggatacactccagattggatatttctgctgagaaatgtaatgcgaatcagtccagatcagggacagcagtttgcccaaatgttagttcaagatgaagagcctcttgctgacatcacacagattgtagatgtctttatggaatacaatctaattcagcagtgtactgcattcttgcttgatgctctgaagaataatcgcccatctgaaggtcctttacagacgcggttacttgagatgaaccttatgcatgcgcctcaagttgcagatgctattctaggcaatcagatgttcacacattatgaccgggctcatattgctcaactgtgtgaaaaggctggcctactgcagcgtgcattagaacatttcactgatttatatgatataaaacgtgcagtggttcacacccatcttcttaaccctgagtggttagtcaactactttggttccttatcagtagaagactccctagaatgtctcagagccatgctgtctgccaacatccgtcagaatctgcagatttgtgttcaggtggcttctaaatatcatgaacaactgtcaactcagtctctgattgaactttttgaatctttcaagagttttgaaggtctcttttattttctgggatccattgttaactttagccaggacccagatgtgcactttaaatatattcaggcagcttgcaagactgggcaaatcaaagaagtagaaagaatctgtagagaaagcaactgctacgatcctgagcgagtcaagaattttcttaaggaagcaaaactaacagatcagctaccacttatcattgtgtgtgatcgatttgactttgtccatgatttggtgctctatttatatagaaataatcttcaaaagtatatagagatatatgtacagaaggtgaatccaagtcgacttcctgtagttattggaggattacttgatgttgactgttctgaagatgtcataaaaaacttgattcttgttgtaagaggtcaattctctactgatgagcttgttgctgaggttgaaaaaagaaacagattgaaactgcttctgccttggctagaggccagaattcatgagggctgtgaggagcctgctactcacaatgccttagccaaaatctacatagacagtaataacaacccggagagatttcttcgtgaaaatccctactatgacagtcgcgttgttggaaagtattgtgagaagagagatccacatctggcctgtgttgcttatgaacgtggccaatgtgatctggaacttattaatgtttgcaatgagaattccctcttcaaaagtctttctcgctacctggtacgtcgaaaggatccagaattgtggggcagcgtgctgctggaaagcaatccttacaggagacccctaattgaccaggttgtacaaacagctttgtctgagactcaggaccctgaagaagtgtcagtaactgtaaaggctttcatgactgcagaccttcctaatgaactcattgaactgctggagaaaattgtccttgataactctgtattcagtgaacacaggaatctgcaaaacctccttatcctcactgcaattaaggctgaccgtacacgtgttatggagtatattaaccgcctggataattatgatgccccagatattgccaatatcgccatcagcaatgagctgtttgaagaagcatttgccattttccggaaatttgatgtcaatacttcagcagttcaggtcttaattgagcatattggaaacttggatcgggcatatgagtttgctgaacgttgcaatgaacctgcggtctggagtcaacttgcaaaagcccagttgcagaaaggaatggtgaaagaagccattgattcttatatcaaagcagatgatccttcctcctacatggaagttgttcaggctgccaatactagtggaaactgggaagaactggtgaagtacttgcagatggcccgtaagaaggctcgagagtcctatgtggagacagaactgatattcgcactggctaaaacaaaccgccttgcagagttagaagaatttatcaatggaccaaataatgctcatatccaacaagttggtgaccgttgttatgatgaaaaaatgtatgatgctgctaagttgttgtacaataatgtttccaattttggacgtttggcatctaccctggttcacctgggtgaatatcaggcagctgttgatggggctaggaaagctaacagtactcgaacatggaaagaggtctgcttcgcctgtgtagatgggaaagaattccgtcttgctcagatgtgtggacttcatattgttgtacatgcagatgaattagaagaacttatcaactactatcaggatcgtggctattttgaagagctgatcaccatgttggaagcagcactgggacttgagcgagctcacatgggaatgtttactgaattagctattctatactctaaatttaagcctcagaaaatgagggagcacctggagctgttctggtctagagtgaatattcccaaggtgctaagagctgcagaacaagctcatctttgggcagaactggtgtttttgtatgacaagtatgaagaatatgataatgccataattaccatgatgaatcatccaactgatgcctggaaagaagggcaattcaaagatatcattaccaaggttgccaatgtggaactatactacagagcaatacagttctacttagaattcaagcctctgttgttaaatgatttgctgatggtgctgtctccacggttggatcacactcgtgcagtcaattatttcagcaaggttaaacagctaccactggtgaaaccgtatttgcgttcagttcagaaccataacaacaaatctgtgaatgaatcattgaacaatctttttattacagaagaagattatcaggctctgcgaacatcaatagatgcttatgacaactttgacaatatctcgcttgctcagcgctcgctgagcaataccagaccacgaagaaatttaatacctgagcagaccaatattgagttccaaaactgaatcagtaataaaaaagcctacaactaagaaatgcccagaccagatagtag

SEQ ID NO: 414916 - DNA, 2565 bp, Homo sapiens
ggcacgaggcaaggagcctgcacactgatggaggaggtacagccgtggaggagaaccagagtctggaggggaggcacagtcctcaggagcccccaggctgacaggggaaacaaaacacacaataaaccccaaacttgcaaggttctggggcaggcaccgaggtccgagtggcaaggagacaggatccagccctgtgcagtggtgaggaggcccctggggctgctgtgatcggcctggaatgtcaggctgtgagctcagccctctcggcctgcgtgtcgggctgtcagcagggccggtgcacgggagaagatttccagccccctctgggccatggacaggcctaaatttagctagtagacaaggggctggccccaagcccagggacagtcggccttataaagcggccgcagtcggagcctggcacgctcgcccagaggcctgcgcccacaccctctcctgtccagccttcgcccgcctgggcagggcccggcgccgtccgtggatgagccacagaacctcttccaccttccgagcggagagaagtttccattcctcttcttcttcctcctcctcttccacctcctcctcggcctcccgtgccctcccggcccaggacccgcccatggagaaggccctgagcatgttttccgatgactttggcagcttcatgcggccccactcggagcccctggccttcccagcccgccccggtggggcaggcaacatcaagaccctaggagacgcctatgagtttgcggtggacgtgagagacttctcacctgaagacatcattgtcaccacctccaacaaccacatcgaggtgcgggctgagaagctggcggctgacggcaccgtcatgaacaccttcgctcacaagtgccagctgccggaggacgtggacccgacgtcggtgacctcggctctgcgggaggacggcagcctcactatccgggcacggcgtcacccgcatacagaacacgtccagcagaccttccggacggagatcaaaatctgagtgcctctcccttccctttccctgtccccccgccccacgcctgccagcaaagcctcgctaaccccattacaacagctccaggacatctcagcccaggttctagcccccacgcaccccagaccccaggtggaccatcctcccaaactagggccctccactctatccagggcaggccagggactccctggcctgacacatgatgcccagatttcagatttggcctccgtcacttaatccagagtacaggggctggggtcagggaaggaagatctaaagaacccactgtgggtcaggggaatgggaccagcaggacatatgggcaagctctgcaggacagacaggcagacaaaccctctgatctatgaagtctctgcagggcaaggggaccagggacctggaaccctcttggccaaggggagtgggagagacagagggaaggtcacaggcaagggtgcctatctaagtggaactaattgcccgagggctcagcaaggccaagaggagacagccgtgacggtaaacttcccctctaccagcctccaagccccacgccagcgagcaggctgcctgcccaccccgtgcccccagccagctggctgtgccagggcagagccatgccacatctgtatatagatggggtttttccaatacagctggttcgtgataaactgcatgaaactcctgccgtcctgcgcctgctggggcctccaggcaaggccacgtggggttgggggtggggctggtccttctccctcccacaggcctgtgttcttggggctgctcccatgcagacaggatcacctaacagagatggaagccagggcatggatggggctttgggtcctcgaggttggaccccagcttcttgccaccttcccctccgggcagtcagctctccatccatccccctctttaatctatgaatctataggctcggtgtgtgtaacacacacacccctatcgttgtccttcaaatactcagcattaccattggttgaggccaaattcagagctttctcaaatcagatttacaatctccattttcattaacggggaaacatccccgagccactgagtgctgtgctttgtcactgaaggttagatctgaacccagggtgtcaacagctgctctcaactccccacctctgggcactgaggagtatttcccctcattctacctctctaaggctatgcacccctccccacgtcttccagctgggggatggggggagtcataggaaaagcccccatctcccatctgggatagggaccttccatcagccttaaccctgggaaatgcctgctgcccccagtgactcttggtttcgtctcccacatacagaagcagggtggaggggaagggtgggtctcagttagcaggggtccccagggcaagtcagcctcctccctccatgcctctctggtcagtgtgccttagggtggcctctcactcccaccactctgggccccttgggggaggactggggagggggccgtgggagagccctgacgctggaacctgtatacacaataaaggacagtctcacaga

SEQ ID NO: 414917 - DNA, 3122 bp, Homo sapiens
ggcacgaggcaaggagcctgcacactgatggaggaggtacagccgtggaggagaaccagagtctggaggggaggcacagtcctcaggagcccccaggctgacaggggaaacaaaacacacaataaaccccaaacttgcaaggttctggggcaggcaccgaggtccgagtggcaaggagacaggatccagccctgtgcagtggtgaggaggcccctggggctgctgtgatcggcctggaatgtcaggctgtgagctcagccctctcggcctgcgtgtcgggctgtcagcagggccggtgcacgggagaagatttccagccccctctgggccatggacaggcctaaatttagctagtagacaaggggctggccccaagcccagggacagtcggccttataaagcggccgcagtcggagcctggcacgctcgcccagaggcctgcgcccacaccctctcctgtccagccttcgcccgcctgggcagggcccggcgccgtccgtggatgagccacagaacctcttccaccttccgagcggagagaagtttccattcctcttcttcttcctcctcctcttccacctcctcctcggcctcccgtgccctcccggcccaggacccgcccatggagaaggccctgagcatgttttccgatgactttggcagcttcatgcggccccactcggagcccctggccttcccaggcaagtgatccgggccctgaggggaggggaggtgcacagggaggggacgtctgctccagggcgccaccgaaggcgctgtggctgccggtcggcctggaacaggtgctgcacagcctgcagccatgtgtggccaccaagacagatgtggccacagggacagatgtggccatgaaaacaggtgggcctctaaggaacagttgtggccctgggggttggacatggttccatggccacccatgctctgtaaccacagccaatcccagctggagccctggagggctggatgggtgagcggtggggggcagcccccaggctccaggcctggggtggggttgttacagacctagcctcatatacacacacactgtgctgggtgaggccccacccccaccccagaaaaggtgggctgtaggaatgaggaggaacttagggagaaacagctaggggggaggtagggcctgggggagccgccccttgccccaagagaaggagccagaacccccggatctgcatgcaaggcctgctccatgcctcgctcacagcagcccatcccacagcccgccccggtggggcaggcaacatcaagaccctaggagacgcctatgagtttgcggtggacgtgagagacttctcacctgaagacatcattgtcaccacctccaacaaccacatcgaggtgcgggctgagaagctggcggctgacggcaccgtcatgaacaccttcgctcacaagtgccagctgccggaggacgtggacccgacgtcggtgacctcggctctgcgggaggacggcagcctcactatccgggcacggcgtcacccgcatacagaacacgtccagcagaccttccggacggagatcaaaatctgagtgcctctcccttccctttccctgtccccccgccccacgcctgccagcaaagcctcgctaaccccattacaacagctccaggacatctcagcccaggttctagcccccacgcaccccagaccccaggtggaccatcctcccaaactagggccctccactctatccagggcaggccagggactccctggcctgacacatgatgcccagatttcagatttggcctccgtcacttaatccagagtacaggggctggggtcagggaaggaagatctaaagaacccactgtgggtcaggggaatgggaccagcaggacatatgggcaagctctgcaggacagacaggcagacaaaccctctgatctatgaagtctctgcagggcaaggggaccagggacctggaaccctcttggccaaggggagtgggagagacagagggaaggtcacaggcaagggtgcctatctaagtggaactaattgcccgagggctcagcaaggccaagaggagacagccgtgacggtaaacttcccctctaccagcctccaagccccacgccagcgagcaggctgcctgcccaccccgtgcccccagccagctggctgtgccagggcagagccatgccacatctgtatatagatggggtttttccaatacagctggttcgtgataaactgcatgaaactcctgccgtcctgcgcctgctggggcctccaggcaaggccacgtggggttgggggtggggctggtccttctccctcccacaggcctgtgttcttggggctgctcccatgcagacaggatcacctaacagagatggaagccagggcatggatggggctttgggtcctcgaggttggaccccagcttcttgccaccttcccctccgggcagtcagctctccatccatccccctctttaatctatgaatctataggctcggtgtgtgtaacacacacacccctatcgttgtccttcaaatactcagcattaccattggttgaggccaaattcagagctttctcaaatcagatttacaatctccattttcattaacggggaaacatccccgagccactgagtgctgtgctttgtcactgaaggttagatctgaacccagggtgtcaacagctgctctcaactccccacctctgggcactgaggagtatttcccctcattctacctctctaaggctatgcacccctccccacgtcttccagctgggggatggggggagtcataggaaaagcccccatctcccatctgggatagggaccttccatcagccttaaccctgggaaatgcctgctgcccccagtgactcttggtttcgtctcccacatacagaagcagggtggaggggaagggtgggtctcagttagcaggggtccccagggcaagtcagcctcctccctccatgcctctctggtcagtgtgccttagggtggcctctcactcccaccactctgggccccttgggggaggactggggagggggccgtgggagagccctgacgctggaacctgtatacacaataaaggacagtctcacaga

SEQ ID NO: 414918 - DNA, 2628 bp, Homo sapiens
ggcacgaggcaaggagcctgcacactgatggaggaggtacagccgtggaggagaaccagagtctggaggggaggcacagtcctcaggagcccccaggctgacaggggaaacaaaacacacaataaaccccaaacttgcaaggttctggggcaggcaccgaggtccgagtggcaaggagacaggatccagccctgtgcagtggtgaggaggcccctggggctgctgtgatcggcctggaatgtcaggctgtgagctcagccctctcggcctgcgtgtcgggctgtcagcagggccggtgcacgggagaagatttccagccccctctgggccatggacaggcctaaatttagctagtagacaaggggctggccccaagcccagggacagtcggccttataaagcggccgcagtcggagcctggcacgctcgcccagaggcctgcgcccacaccctctcctgtccagccttcgcccgcctgggcagggcccggcgccgtccgtggatgagccacagaacctcttccaccttccgagcggagagaagtttccattcctcttcttcttcctcctcctcttccacctcctcctcggcctcccgtgccctcccggcccaggacccgcccatggagaaggccctgagcatgttttccgatgactttggcagcttcatgcggccccactcggagcccctggccttcccagcccgccccggtggggcaggcaacatcaagaccctaggagacgcctatgagtttgcggtggacgtgagagacttctcacctgaagacatcattgtcaccacctccaacaaccacatcgaggtgcgggctgagaagctggcggctgacggcaccgtcatgaacaccttcgctcacaagtgccagctgccggaggacgtggacccgacgtcggtgacctcggctctgcgggaggacggcagcctcactatccgggcacggcgtcacccgcatacagaacacgtccagcagaccttccggacggagatcaaaatctgagtgcctctcccttccctttccctgtccccccgccccacgcctgccagcaaagcctcgctaaccccattacaacagctccaggacatctcagcccaggttctagcccccacgcaccccagaccccaggtggaccatcctcccaaactagggccctccactctatccagggcaggccagggactccctggcctgacacatgatgcccagatttcagatttggcctccgtcacttaatccagagtacaggggctggggtcagggaaggaagatctaaagaacccactgtgggtcaggggaatgggaccagcaggacatatgggcaagctctgcaggacagacaggcagacaaaccctctgatctatgaagtctctgcagggcaaggggaccagggacctggaaccctcttggccaaggggagtgggagagacagagggaaggtcacaggcaagggtgcctatctaagtggaactaattgcccgagggctcagcaaggccaagaggagacagccgtgacggtaaacttcccctctaccagcctccaagccccacgccagcgagcaggctgcctgcccaccccgtgcccccagccagctggctgtgccagggcagagccatgccacatctgtatatagatggggtttttccaatacagctggttcgtgataaactgcatgaaactcctgccgtcctgcgcctgctggggcctccaggcaaggccacgtggggttgggggtggggctggtccttctccctcccacaggcctgtgttcttggggctgctcccatgcagacaggatcacctaacagagatggaagccagggcatggatggggctttgggtcctcgaggttggaccccagcttcttgccaccttcccctccgggcagtcagctctccatccatccccctctttaatctatgaatctataggctcggtgtgtgtaacacacacacccctatcgttgtccttcaaatactcagcattaccattggttgaggccaaattcagagctttctcaaatcagatttacaatctccattttcattaacggggaaacatccccgagccactgagtgctgtgctttgtcactgaaggttagatctgaacccagggtgtcaacagctgctctcaactccccacctctgggcactgaggagtatttcccctcattctacctctctaaggctatgcacccctccccacgtcttccagctgggggatggggggagtcataggaaaagcccccatctcccatctgggatagggaccttccatcagccttaaccctgggaaatgcctgctgcccccagtgactcttggtttcgtctcccacatacagaagcagggtggaggggaagggtgggtctcagttagcaggggtccccagggcaagtcagcctcctccctccatgcctctctggtcagtgtgccttagggtggcctctcactcccaccactctgggccccttgggggaggactggggagggggccgtgggagagccctgacgctggaacctgtatacacaataaaggacagtctcacagacttctggaggccgcctgcctggagttctcaaacttagggcagggctggaaaccctgagagaaa

SEQ ID NO: 414919 - DNA, 1299 bp, Homo sapiens
ggcacgaggcaaggagcctgcacactgatggaggaggtacagccgtggaggagaaccagagtctggaggggaggcacagtcctcaggagcccccaggctgacaggggaaacaaaacacacaataaaccccaaacttgcaaggttctggggcaggcaccgaggtccgagtggcaaggagacaggatccagccctgtgcagtggtgaggaggcccctggggctgctgtgatcggcctggaatgtcaggctgtgagctcagccctctcggcctgcgtgtcgggctgtcagcagggccggtgcacgggagaagatttccagccccctctgggccatggacaggcctaaatttagctagtagacaaggggctggccccaagcccagggacagtcggccttataaagcggccgcagtcggagcctggcacgctcgcccagaggcctgcgcccacaccctctcctgtccagccttcgcccgcctgggcagggcccggcgccgtccgtggatgagccacagaacctcttccaccttccgagcggagagaagtttccattcctcttcttcttcctcctcctcttccacctcctcctcggcctcccgtgccctcccggcccaggacccgcccatggagaaggccctgagcatgttttccgatgactttggcagcttcatgcggccccactcggagcccctggccttcccagcccgccccggtggggcaggcaacatcaagaccctaggagacgcctatgagtttgcggtggacgtgagagacttctcacctgaagacatcattgtcaccacctccaacaaccacatcgaggtgcgggctgagaagctggcggctgacggcaccgtcatgaacaccttcgctcacaagtgccagctgccggaggacgtggacccgacgtcggtgacctcggctctgcgggaggacggcagcctcactatccgggcacggcgtcacccgcatacagaacacgtccagcagaccttccggacggagatcaaaatctgagtgcctctcccttccctttccctgtccccccgccccacgcctgccagcaaagcctcgctaaccccattacaacagctccaggacatctcagcccaggttctagcccccacgcaccccagcccagggcaagtcagcctcctccctccatgcctctctggtcagtgtgccttagggtggcctctcactcccaccactctgggccccttgggggaggactggggagggggccgtgggagagccctgacgctggaacctgtatacacaataaaggacagtctcacaga

SEQ ID NO: 414920 - DNA, 2816 bp, Homo sapiens
  misc_feature (2599)..(2599): n is a, c, g, or t
  misc_feature (2609)..(2609): n is a, c, g, or t
  misc_feature (2611)..(2611): n is a, c, g, or t
  misc_feature (2625)..(2625): n is a, c, g, or t
ggcacgaggcaaggagcctgcacactgatggaggaggtacagccgtggaggagaaccagagtctggaggggaggcacagtcctcaggagcccccaggctgacaggggaaacaaaacacacaataaaccccaaacttgcaaggttctggggcaggcaccgaggtccgagtggcaaggagacaggatccagccctgtgcagtggtgaggaggcccctggggctgctgtgatcggcctggaatgtcaggctgtgagctcagccctctcggcctgcgtgtcgggctgtcagcagggccggtgcacgggagaagatttccagccccctctgggccatggacaggcctaaatttagctagtagacaaggggctggccccaagcccagggacagtcggccttataaagcggccgcagtcggagcctggcacgctcgcccagaggcctgcgcccacaccctctcctgtccagccttcgcccgcctgggcagggcccggcgccgtccgtggatgagccacagaacctcttccaccttccgagcggagagaagtttccattcctcttcttcttcctcctcctcttccacctcctcctcggcctcccgtgccctcccggcccaggacccgcccatggagaaggccctgagcatgttttccgatgactttggcagcttcatgcggccccactcggagcccctggccttcccagcccgccccggtggggcaggcaacatcaagaccctaggagacgcctatgagtttgcggtggacgtgagagacttctcacctgaagacatcattgtcaccacctccaacaaccacatcgaggtgcgggctgagaagctggcggctgacggcaccgtcatgaacaccttcgctcacaagtgccagctgccggaggacgtggacccgacgtcggtgacctcggctctgcgggaggacggcagcctcactatccgggcacggcgtcacccgcatacagaacacgtccagcagaccttccggacggagatcaaaatctgagtgcctctcccttccctttccctgtccccccgccccacgcctgccagcaaagcctcgctaaccccattacaacagctccaggacatctcagcccaggttctagcccccacgcaccccagaccccaggtggaccatcctcccaaactagggccctccactctatccagggcaggccagggactccctggcctgacacatgatgcccagatttcagatttggcctccgtcacttaatccagagtacaggggctggggtcagggaaggaagatctaaagaacccactgtgggtcaggggaatgggaccagcaggacatatgggcaagctctgcaggacagacaggcagacaaaccctctgatctatgaagtctctgcagggcaaggggaccagggacctggaaccctcttggccaaggggagtgggagagacagagggaaggtcacaggcaagggtgcctatctaagtggaactaattgcccgagggctcagcaaggccaagaggagacagccgtgacggtaaacttcccctctaccagcctccaagccccacgccagcgagcaggctgcctgcccaccccgtgcccccagccagctggctgtgccagggcagagccatgccacatctgtatatagatggggtttttccaatacagctggttcgtgataaactgcatgaaactcctgccgtcctgcgcctgctggggcctccaggcaaggccacgtggggttgggggtggggctggtccttctccctcccacaggcctgtgttcttggggctgctcccatgcagacaggatcacctaacagagatggaagccagggcatggatggggctttgggtcctcgaggttggaccccagcttcttgccaccttcccctccgggcagtcagctctccatccatccccctctttaatctatgaatctataggctcggtgtgtgtaacacacacacccctatcgttgtccttcaaatactcagcattaccattggttgaggccaaattcagagctttctcaaatcagatttacaatctccattttcattaacggggaaacatccccgagccactgagtgctgtgctttgtcactgaaggttagatctgaacccagggtgtcaacagctgctctcaactccccacctctgggcactgaggagtatttcccctcattctacctctctaaggctatgcacccctccccacgtcttccagctgggggatggggggagtcataggaaaagcccccatctcccatctgggatagggaccttccatcagccttaaccctgggaaatgcctgctgcccccagtgactcttggtttcgtctcccacatacagaagcagggtggaggggaagggtgggtctcagttagcaggggtccccagggcaagtcagcctcctccctccatgcctctctggtcagtgtgccttagggtggcctctcactcccaccactctgggccccttgggggaggactggggagggggccgtgggagagccctgacgctggaacctgtatacacaataaaggacagtctcacagaaaaaaaaaaaaaacaaaaaaaaaaaaaaaaaaanaaacaacaananaaaaaaacaaaaanaaaagaaacaaaaaagacaaccgaaccggcggcggactatatcaggcgggggggagcgcaaaggaacgaatagcgacaaagcagcgcagggggcaaacgggggcagcggacaccacattattgacaaaagggggaggaacaaggcgggcccccagagggggggccgtaataggcgacccgggaacctcgaa

SEQ ID NO: 414921 - DNA, 2990 bp, Homo sapiens
ggcacgaggcaaggagcctgcacactgatggaggaggtacagccgtggaggagaaccagagtctggaggggaggcacagtcctcaggagcccccaggctgacaggggaaacaaaacacacaataaaccccaaacttgcaaggttctggggcaggcaccgaggtccgagtggcaaggagacaggatccagccctgtgcagtggtgaggaggcccctggggctgctgtgatcggcctggaatgtcaggctgtgagctcagccctctcggcctgcgtgtcgggctgtcagcagggccggtgcacgggagaagatttccagccccctctgggccatggacaggcctaaatttagctagtagacaaggggctggccccaagcccagggacagtcggccttataaagcggccgcagtcggagcctggcacgctcgcccagaggcctgcgcccacaccctctcctgtccagccttcgcccgcctgggcagggcccggcgccgtccgtggatgagccacagaacctcttccaccttccgagcggagagaagtttccattcctcttcttcttcctcctcctcttccacctcctcctcggcctcccgtgccctcccggcccaggacccgcccatggagaaggccctgagcatgttttccgatgactttggcagcttcatgcggccccactcggagcccctggccttcccaggcaagtgatccgggccctgaggggaggggaggtgcacagggaggggacgtctgctccagggcgccaccgaaggcgctgtggctgccggtcggcctggaacaggtgctgcacagcctgcagccatgtgtggccaccaagacagatgtggccacagggacagatgtggccatgaaaacaggtgggcctctaaggaacagttgtggccctgggggttggacatggttccatggccacccatgctctgtaaccacagccaatcccagctggagccctggagggctggatgggtgagcggtggggggcagcccccaggctccaggcctggggtggggttgttacagacctagcctcatatacacacacactgtgctgggtgaggccccacccccaccccagaaaaggtgggctgtaggaatgaggaggaacttagggagaaacagctaggggggaggtagggcctgggggagccgccccttgccccaagagaaggagccagaacccccggatctgcatgcaaggcctgctccatgcctcgctcacagcagcccatcccacagcccgccccggtggggcaggcaacatcaagaccctaggagacgcctatgagtttgcggtggacgtggacccgacgtcggtgacctcggctctgcgggaggacggcagcctcactatccgggcacggcgtcacccgcatacagaacacgtccagcagaccttccggacggagatcaaaatctgagtgcctctcccttccctttccctgtccccccgccccacgcctgccagcaaagcctcgctaaccccattacaacagctccaggacatctcagcccaggttctagcccccacgcaccccagaccccaggtggaccatcctcccaaactagggccctccactctatccagggcaggccagggactccctggcctgacacatgatgcccagatttcagatttggcctccgtcacttaatccagagtacaggggctggggtcagggaaggaagatctaaagaacccactgtgggtcaggggaatgggaccagcaggacatatgggcaagctctgcaggacagacaggcagacaaaccctctgatctatgaagtctctgcagggcaaggggaccagggacctggaaccctcttggccaaggggagtgggagagacagagggaaggtcacaggcaagggtgcctatctaagtggaactaattgcccgagggctcagcaaggccaagaggagacagccgtgacggtaaacttcccctctaccagcctccaagccccacgccagcgagcaggctgcctgcccaccccgtgcccccagccagctggctgtgccagggcagagccatgccacatctgtatatagatggggtttttccaatacagctggttcgtgataaactgcatgaaactcctgccgtcctgcgcctgctggggcctccaggcaaggccacgtggggttgggggtggggctggtccttctccctcccacaggcctgtgttcttggggctgctcccatgcagacaggatcacctaacagagatggaagccagggcatggatggggctttgggtcctcgaggttggaccccagcttcttgccaccttcccctccgggcagtcagctctccatccatccccctctttaatctatgaatctataggctcggtgtgtgtaacacacacacccctatcgttgtccttcaaatactcagcattaccattggttgaggccaaattcagagctttctcaaatcagatttacaatctccattttcattaacggggaaacatccccgagccactgagtgctgtgctttgtcactgaaggttagatctgaacccagggtgtcaacagctgctctcaactccccacctctgggcactgaggagtatttcccctcattctacctctctaaggctatgcacccctccccacgtcttccagctgggggatggggggagtcataggaaaagcccccatctcccatctgggatagggaccttccatcagccttaaccctgggaaatgcctgctgcccccagtgactcttggtttcgtctcccacatacagaagcagggtggaggggaagggtgggtctcagttagcaggggtccccagggcaagtcagcctcctccctccatgcctctctggtcagtgtgccttagggtggcctctcactcccaccactctgggccccttgggggaggactggggagggggccgtgggagagccctgacgctggaacctgtatacacaataaaggacagtctcacaga

SEQ ID NO: 414922 - DNA, 2018 bp, Homo sapiens
ggcacgaggcaaggagcctgcacactgatggaggaggtacagccgtggaggagaaccagagtctggaggggaggcacagtcctcaggagcccccaggctgacaggggaaacaaaacacacaataaaccccaaacttgcaaggttctggggcaggcaccgaggtccgagtggcaaggagacaggatccagccctgtgcagtggtgaggaggcccctggggctgctgtgatcggcctggaatgtcaggctgtgagctcagccctctcggcctgcgtgtcgggctgtcagcagggccggtgcacgggagaagatttccagccccctctgggccatggacaggcctaaatttagctagtagacaaggggctggccccaagcccagggacagtcggccttataaagcggccgcagtcggagcctggcacgctcgcccagaggcctgcgcccacaccctctcctgtccagccttcgcccgcctgggcagggcccggcgccgtccgtggatgagccacagaacctcttccaccttccgagcggagagaagtttccattcctcttcttcttcctcctcctcttccacctcctcctcggcctcccgtgccctcccggcccaggacccgcccatggagaaggccctgagcatgttttccgatgactttggcagcttcatgcggccccactcggagcccctggccttcccagcccgccccggtggggcaggcaacatcaagaccctaggagacgcctatgagtttgcggtggacgtgagagacttctcacctgaagacatcattgtcaccacctccaacaaccacatcgaggtgcgggctgagaagctggcggctgacggcaccgtcatgaacaccttcgctcacaagtgccagctgccggaggacgtggacccgacgtcggtgacctcggctctgcgggaggacggcagcctcactatccgggcacggcgtcacccgcatacagaacacgtccagcagaccttccggacggagatcaaaatctgagtgcctctcccttccctttccctgtccccccgccccacgcctgccagcaaagcctcgctaaccccattacaacagctccaggacatctcagcccaggttctagcccccacgcaccccagaccccaggtggaccatcctcccaaactagggccctccactctatccagggcaggccagggactccctggcctgacacatgatgcccagatttcagatttggcctccgtcacttaatccagagtacaggggctggggtcagggaaggaagatctaaagaacccactgtgggtcaggggaatgggaccagcaggacatatgggcaagctctgcaggacagacaggcagacaaaccctctgatctatgaagtctctgcagggcaaggggaccagggacctggaaccctcttggccaaggggagtgggagagacagagggaaggtcacaggcaagggtgcctatctaagtggaactaattgcccgagggctcagcaaggccaagaggagacagccgtgacggtaaacttcccctctaccagcctccaagccccacgccagcgagcaggctgcctgcccaccccgtgcccccagccagctggctgtgccagggcagagccatgccacatctgtatatagatggggtttttccaatacagctggttcgtgataaactgcatgaaactcctgccgtcctgcgcctgctggggcctccaggcaaggccacgtggggttgggggtggggctggtccttctccctcccacaggcctgtgttcttggggctgctcccatgcagacaggatcacctaacagagatggaagccagggcatggatggggctttcccagggcaagtcagcctcctccctccatgcctctctggtcagtgtgccttagggtggcctctcactcccaccactctgggccccttgggggaggactggggagggggccgtgggagagccctgacgctggaacctgtatacacaataaaggacagtctcacaga

SEQ ID NO: 414923 - DNA, 1216 bp, Homo sapiens
cagaacggcggccaggacgccggacgtgcggcagttgcaggcgagcaggcgaggaatcgccgtggcgtcttggtgttctccacgctggttcgcaggtgaagagatggcgtttgtgaagagtggctggttgctgcgacagagtactattttgaagcgctggaagaagaactggtttgatctgtggtcggatggtcacctgatctattatgatgaccagactcggcagaatatcgaggataaggtccacatgccaatggactgcatcaacatccgcacggggcaggaatgtcgggatactcagcccccggatggaaagtcaaaagactgcatgctccagattgtttgtcgagatgggaaaacaattagtctttgtgcagaaagcacagatgattgcttggcctggaaatttacactccaagattctaggacaaacacagcgtatgtgggctctgcagtcatgaccgatgagacatccgtggtttcctcacctccaccatacacggcctatgctgcaccggcccctgaggagctgcacagtaaaggtcccaaaatacacaccaccacgagtgcaaaaacccaggcggttctcccaacgcgatgtttttttcccagcgaatctccgataagaaggtctgtgcagatttctgtgctcctacctgcagtaaatattcgtagacgtataaagctaacttttccccagcctgcccgtccgagggcaccaaggagcctttgcctttggcaaacatggtttgcagggaagagggcgcccagcctccccacagccgccaccgctccggctctcccgagctgcccctcgcccccggccccctcccaggcgctccctccctctctcgctggctggcgctctcctagcagcgctcccctccctcccgagcaggcgctggctccgcgctctttccagctgtcaaagcatcaggcccggccgcggccccatcgccctggaactcctcccgtgccggcttggcctggggtgccgccgccgcctcccgcaaggccgcccgctctccggtagctcgcgtgctcgcccggttccgcttgcgcggccctctgcgcccccagcaccgctgccgccgccgccggcgctggcctcatgtgtcacattttcttaatccagtctatggctgatggatatttgggttggttccaactttttgctattgtgaatagtgccgcaataaacatacgtgtgcatgtg

SEQ ID NO: 414924 - DNA, 650 bp, Homo sapiens
cgtacaggactaagcaatctcatcctgttctcagcaaacacctgtcgctgtacaacaatggttatcaccttcttggcttgttcaaatgttgactctccgggggcactggctcattccaagactgttcttgtgcaactctcagaataccttatttgagcatacctgttttgaaaggcattttctttttagagttaggtgtagtgcttaagggttaatttattttcatgttatgccagtaatatagtgttgtatgcctattgagtgattgtggcaagaaaagctacagcttctttgcgtttaactttttcaaaccacagaccagaactggttgcatgttactttaggagttgtgggttggtaagctcccaggtacttcccgaggctatggtgtgagagcccccgtcctgccctctggggctccacaggcccctggcaaggccgatggctcaggatgatggggcacagcccgcctttgaacaatcatgcttcagaaatctgcctgaccctagctgctgctgctgctcactttattcttgtatggctttggtaggcatacttggagaacatatcccacattaggaattgatttaagcctgagagtttgagggctttaatcctttaaaacttgaaaatggcaataagatcctcgt

SEQ ID NO: 414925 - DNA, 3846 bp, Homo sapiens
cagaacggcggccaggacgccggacgtgcggcagttgcaggcgagcaggcgaggaatcgccgtggcgtcttggtgttctccacgctggttcgcaggtgaagagatggcgtttgtgaagagtggctggttgctgcgacagagtactattttgaagcgctggaagaagaactggtttgatctgtggtcggatggtcacctgatctattatgatgaccagactcggcagaatatcgaggataaggtccacatgccaatggactgcatcaacatccgcacggggcaggaatgtcgggatactcagcccccggatggaaagtcaaaagactgcatgctccagattgtttgtcgagatgggaaaacaattagtctttgtgcagaaagcacagatgattgcttggcctggaaatttacactccaagattctaggacaaacacagcgtatgtgggctctgcagtcatgaccgatgagacatccgtggtttcctcacctccaccatacacggcctatgctgcaccggcccctgagcaggcttatggctatgggccatacggtggtgcgtacccgccaggaactcaagttgtctacgctgcgaatgggcaggcgtatgccgtgccctaccagtacccatatgcaggactttatggacagcagcctgctaaccaagtcatcattcgagagcgctatcgagacaacgacagcgacctggcactgggcatgctggcaggagcagccacgggcatggccttagggtctctattttgggtcttctaggggcctcaaggtcttgatgtgcatagcttctgataaccctgtgtgcaataatatgatttgcagggcatttctgtttgtgacaaaagtttttaataatagttttaatcattcctttgaaagtagtgatgtcataattgtactaatccacataagtaccacagagaagggtttgaactgtgctattttgttcaaatgttgactctccgggggcactggctcattccaagactgttcttgtgcaactctcagaataccttatttgagcatacctgttttgaaaggcattttctttttagagttaggtgtagtgcttaagggttaatttattttcatgttatgccagtaatatagtgttgtatgcctattgagtgattgtggcaagaaaagctacagcttctttgcgtttaactttttcaaaccacagaccagaactggttgcatgttactttaggagttgtgggttggtaagctcccaggtacttcccgaggctatggtgtgagagcccccgtcctgccctctggggctccacaggcccctggcaaggccgatggctcaggatgatggggcacagcccgcctttgaacaatcatgcttcagaaatctgcctgaccctagctgctgctgctgctcactttattcttgtatggctttggtaggcatacttggagaacatatcccacattaggaattgatttaagcctgagagtttgagggctttaatcctttaaaacttggagaagctggctgggcgcggtggctcacgcctgtaatcccagcactttgagagaccgaggcgggcggatcacgaggtcaggagatcgagaccatcctggctaacacggtgaaaccccatctctactaaaaatacaaaaaattagctgggcgtggtggcaggcgcctgtggtcccagctactcgggaggctgaggcaggagaatagtgtgaacccaggaggcggagcttgcagtgagccaagatagtgccactgcacttcagcctgggtgacagagtgagactctgtctcaaaaaaaaaaaaaaaattcctggagaagccagaacaatatacaaacaagtatgtggaggcagatttgctttattccaagaggctgtttgagtgtgtgtctgcctaagcctccttatagcctatttttctacttgcctgagagagtaatattaaaggaacagtgagggagtggaaggagagccttagttagagcgttcccatttctggcctttgggggtttgcactgtgcgggagatgctctctcatcactctgaaggcccatcctgtgcagaagtgggactctgtggctgttcactgagcaccagggcagactgtagctgagcagacttgggttatggatgggatatggggcccagggaccctcaggacacagggaccggctcaaggtaccactcagcctggccaggacccccagctttgcttttgttcttgatctctttgtgatagagaagcttagaacattgaatttggaaccccaaaatgtgtgagtctttggaaaacccattccagcctttcttcaaatgctcttattttcagtatatgaagtgtgtatttgaaatattcatatttctgttatttcttgttttcaagctctgaattattgcagttttctgtcctgcatgctttcaacagtgtgcttttacagtggcagtttagcacagcgaatgtccctgccccacactccatatggtcctgttttcctgaaaatacactccaggtagcacagacttgttattttgcctggctggttacacacatgctgtcttgctttgctgctcagccacctccctctgaggccaacttaggccaacctacataggactccatctttagcgagacaccagagacacctagtgatgaccacgggtctgcttttctctctgatcctaggggacttgttgacatgggagtgtctgtttccacatggaaggatgtctgtttatctctcatctctgaatagatgtatgacaactctagtgtccatggtttaaaatgttgctttgaggattttccatcctgtataagaagaatggctttcttcagattataatcgttattaaagctgtatgtacactttacttaaaaactattaacagtttttcatgttgcactggtggtaattttgaacttggaattactgggtgggaattccaggaaccacagagtattgatttttgctgccaaaatgctcttgaagcagatgtccctgtgctcccctggctgcttctggctgaaggggggaggtgtagactgaagcttgggcactcatgtgtgtcccctccccagtccccatcctagtggggccagtctcattaggcagccatagataagcctggaacttggctgtcattagtgacttgatcctggtatgaaatgcatactgggtataaggttgctcaggtattttatttccttggccacaactcccatagatgccaatgttttgatagcctcagtttctcaacgatgtcttttgtttacagtgctacacttagtgtgagtcaagaagtgcttgagttacaagaaacttcttattcaggtttgagtaagcattttacttccatgtgtacttttaaataatccataccttgaagaagttggccaatgatattatatacatgctgatctgattgttcttttcattccttgagtcaacttcagggtcttggatactaaagagaaggagaactgtggttaatgttttggatcatcatttgtgaacaaggccagactttgcccattttaggctatccaggacttaaggtagccatctggatcataagaaggtcctgcagttgagacaaaatgacccaagtgtattttccacaagttttgatcctgtgtaatatttctttttccttccctagtgtatgtagatacaaggcatggaatgcagttccactttctccccagagttgatctttttgtgattgctttcccgtctctagtagtattctgttgtgtctagagaactgattttttcctacatacgcaaattgtacatttgtaagtgaaaatgtcaatacattaaagcattaaccttaaagca

SEQ ID NO: 414926 - DNA, 3835 bp, Homo sapiens
tcggcttacgtgctacgaggccctgggttgcatcggccgaggcgagatcgccgtgcgtcttgttgttctccacgctgttcgcaggtgaagagatggcgtttgtgaagagtggctggttgctgcgacagagtactattttgaagcgctggaagaagaactggtttgatctgtggtcggatggtcacctgatctattatgatgaccagactcggcagaatatcgaggataaggtccacatgccaatggactgcatcaacatccgcacggggcaggaatgtcgggatactcagcccccggatggaaagtcaaaagactgcatgctccagattgtttgtcgagatgggaaaacaattagtctttgtgcagaaagcacagatgattgcttggcctggaaatttacactccaagattctaggacaaacacagcgtatgtgggctctgcagtcatgaccgatgagacatccgtggtttcctcacctccaccatacacggcctatgctgcaccggcccctgagcaggcttatggctatgggccatacggtggtgcgtacccgccaggaactcaagttgtctacgctgcgaatgggcaggcgtatgccgtgccctaccagtacccatatgcaggactttatggacagcagcctgctaaccaagtcatcattcgagagcgctatcgagacaacgacagcgacctggcactgggcatgctggcaggagcagccacgggcatggccttagggtctctattttgggtcttctaggggcctcaaggtcttgatgtgcatagcttctgataaccctgtgtgcaataatatgatttgcagggcatttctgtttgtgacaaaagtttttaataatagttttaatcattcctttgaaagtagtgatgtcataattgtactaatccacataagtaccacagagaagggtttgaactgtgctattttgttcaaatgttgactctccgggggcactggctcattccaagactgttcttgtgcaactctcagaataccttatttgagcatacctgttttgaaaggcattttctttttagagttaggtgtagtgcttaagggttaatttattttcatgttatgccagtaatatagtgttgtatgcctattgagtgattgtggcaagaaaagctacagcttctttgcgtttaactttttcaaaccacagaccagaactggttgcatgttactttaggagttgtgggttggtaagctcccaggtacttcccgaggctatggtgtgagagcccccgtcctgccctctggggctccacaggcccctggcaaggccgatggctcaggatgatggggcacagcccgcctttgaacaatcatgcttcagaaatctgcctgaccctagctgctgctgctgctcactttattcttgtatggctttggtaggcatacttggagaacatatcccacattaggaattgatttaagcctgagagtttgagggctttaatcctttaaaacttggagaagctggctgggcgcggtggctcacgcctgtaatcccagcactttgagagaccgaggcgggcggatcacgaggtcaggagatcgagaccatcctggctaacacggtgaaaccccatctctactaaaaatacaaaaaattagctgggcgtggtggcaggcgcctgtggtcccagctactcgggaggctgaggcaggagaatagtgtgaacccaggaggcggagcttgcagtgagccaagatagtgccactgcacttcagcctgggtgacagagtgagactctgtctcaaaaaaaaaaaaaaaattcctggagaagccagaacaatatacaaacaagtatgtggaggcagatttgctttattccaagaggctgtttgagtgtgtgtctgcctaagcctccttatagcctatttttctacttgcctgagagagtaatattaaaggaacagtgagggagtggaaggagagccttagttagagcgttcccatttctggcctttgggggtttgcactgtgcgggagatgctctctcatcactctgaaggcccatcctgtgcagaagtgggactctgtggctgttcactgagcaccagggcagactgtagctgagcagacttgggttatggatgggatatggggcccagggaccctcaggacacagggaccggctcaaggtaccactcagcctggccaggacccccagctttgcttttgttcttgatctctttgtgatagagaagcttagaacattgaatttggaaccccaaaatgtgtgagtctttggaaaacccattccagcctttcttcaaatgctcttattttcagtatatgaagtgtgtatttgaaatattcatatttctgttatttcttgttttcaagctctgaattattgcagttttctgtcctgcatgctttcaacagtgtgcttttacagtggcagtttagcacagcgaatgtccctgccccacactccatatggtcctgttttcctgaaaatacactccaggtagcacagacttgttattttgcctggctggttacacacatgctgtcttgctttgctgctcagccacctccctctgaggccaacttaggccaacctacataggactccatctttagcgagacaccagagacacctagtgatgaccacgggtctgcttttctctctgatcctaggggacttgttgacatgggagtgtctgtttccacatggaaggatgtctgtttatctctcatctctgaatagatgtatgacaactctagtgtccatggtttaaaatgttgctttgaggattttccatcctgtataagaagaatggctttcttcagattataatcgttattaaagctgtatgtacactttacttaaaaactattaacagtttttcatgttgcactggtggtaattttgaacttggaattactgggtgggaattccaggaaccacagagtattgatttttgctgccaaaatgctcttgaagcagatgtccctgtgctcccctggctgcttctggctgaaggggggaggtgtagactgaagcttgggcactcatgtgtgtcccctccccagtccccatcctagtggggccagtctcattaggcagccatagataagcctggaacttggctgtcattagtgacttgatcctggtatgaaatgcatactgggtataaggttgctcaggtattttatttccttggccacaactcccatagatgccaatgttttgatagcctcagtttctcaacgatgtcttttgtttacagtgctacacttagtgtgagtcaagaagtgcttgagttacaagaaacttcttattcaggtttgagtaagcattttacttccatgtgtacttttaaataatccataccttgaagaagttggccaatgatattatatacatgctgatctgattgttcttttcattccttgagtcaacttcagggtcttggatactaaagagaaggagaactgtggttaatgttttggatcatcatttgtgaacaaggccagactttgcccattttaggctatccaggacttaaggtagccatctggatcataagaaggtcctgcagttgagacaaaatgacccaagtgtattttccacaagttttgatcctgtgtaatatttctttttccttccctagtgtatgtagatacaaggcatggaatgcagttccactttctccccagagttgatctttttgtgattgctttcccgtctctagtagtattctgttgtgtctagagaactgattttttcctacatacgcaaattgtacatttgtaagtgaaaatgtcaatacattaaagcattaaccttaaagca

SEQ ID NO: 414927 - DNA, 3870 bp, Homo sapiens
cagaacggcggccaggacgccggacgtgcggcagttgcaggcgagcaggcgaggaatcgccgtggcgtcttggtgttctccacgctggttcgcaggtgaagagatggcgtttgtgaagagtggctggttgctgcgacagagtactattttgaagcgctggaagaagaactggtttgatctgtggtcggatggtcacctgatctattatgatgaccagactcggcagaatatcgaggataaggtccacatgccaatggactgcatcaacatccgcacggggcaggaatgtcgggatactcagcccccggatggaaagtcaaaagactgcatgctccagattgtttgtcgagatgggaaaacaattagtctttgtgcagaaagcacagatgattgcttggcctggaaatttacactccaagattctaggacaaacacagcgtatgtgggctctgcagtcatgaccgatgagacatccgtggtttcctcacctccaccatacacggcctatgctgcaccggcccctgaggtagggagaaccctgagcctccagcaggcttatggctatgggccatacggtggtgcgtacccgccaggaactcaagttgtctacgctgcgaatgggcaggcgtatgccgtgccctaccagtacccatatgcaggactttatggacagcagcctgctaaccaagtcatcattcgagagcgctatcgagacaacgacagcgacctggcactgggcatgctggcaggagcagccacgggcatggccttagggtctctattttgggtcttctaggggcctcaaggtcttgatgtgcatagcttctgataaccctgtgtgcaataatatgatttgcagggcatttctgtttgtgacaaaagtttttaataatagttttaatcattcctttgaaagtagtgatgtcataattgtactaatccacataagtaccacagagaagggtttgaactgtgctattttgttcaaatgttgactctccgggggcactggctcattccaagactgttcttgtgcaactctcagaataccttatttgagcatacctgttttgaaaggcattttctttttagagttaggtgtagtgcttaagggttaatttattttcatgttatgccagtaatatagtgttgtatgcctattgagtgattgtggcaagaaaagctacagcttctttgcgtttaactttttcaaaccacagaccagaactggttgcatgttactttaggagttgtgggttggtaagctcccaggtacttcccgaggctatggtgtgagagcccccgtcctgccctctggggctccacaggcccctggcaaggccgatggctcaggatgatggggcacagcccgcctttgaacaatcatgcttcagaaatctgcctgaccctagctgctgctgctgctcactttattcttgtatggctttggtaggcatacttggagaacatatcccacattaggaattgatttaagcctgagagtttgagggctttaatcctttaaaacttggagaagctggctgggcgcggtggctcacgcctgtaatcccagcactttgagagaccgaggcgggcggatcacgaggtcaggagatcgagaccatcctggctaacacggtgaaaccccatctctactaaaaatacaaaaaattagctgggcgtggtggcaggcgcctgtggtcccagctactcgggaggctgaggcaggagaatagtgtgaacccaggaggcggagcttgcagtgagccaagatagtgccactgcacttcagcctgggtgacagagtgagactctgtctcaaaaaaaaaaaaaaaattcctggagaagccagaacaatatacaaacaagtatgtggaggcagatttgctttattccaagaggctgtttgagtgtgtgtctgcctaagcctccttatagcctatttttctacttgcctgagagagtaatattaaaggaacagtgagggagtggaaggagagccttagttagagcgttcccatttctggcctttgggggtttgcactgtgcgggagatgctctctcatcactctgaaggcccatcctgtgcagaagtgggactctgtggctgttcactgagcaccagggcagactgtagctgagcagacttgggttatggatgggatatggggcccagggaccctcaggacacagggaccggctcaaggtaccactcagcctggccaggacccccagctttgcttttgttcttgatctctttgtgatagagaagcttagaacattgaatttggaaccccaaaatgtgtgagtctttggaaaacccattccagcctttcttcaaatgctcttattttcagtatatgaagtgtgtatttgaaatattcatatttctgttatttcttgttttcaagctctgaattattgcagttttctgtcctgcatgctttcaacagtgtgcttttacagtggcagtttagcacagcgaatgtccctgccccacactccatatggtcctgttttcctgaaaatacactccaggtagcacagacttgttattttgcctggctggttacacacatgctgtcttgctttgctgctcagccacctccctctgaggccaacttaggccaacctacataggactccatctttagcgagacaccagagacacctagtgatgaccacgggtctgcttttctctctgatcctaggggacttgttgacatgggagtgtctgtttccacatggaaggatgtctgtttatctctcatctctgaatagatgtatgacaactctagtgtccatggtttaaaatgttgctttgaggattttccatcctgtataagaagaatggctttcttcagattataatcgttattaaagctgtatgtacactttacttaaaaactattaacagtttttcatgttgcactggtggtaattttgaacttggaattactgggtgggaattccaggaaccacagagtattgatttttgctgccaaaatgctcttgaagcagatgtccctgtgctcccctggctgcttctggctgaaggggggaggtgtagactgaagcttgggcactcatgtgtgtcccctccccagtccccatcctagtggggccagtctcattaggcagccatagataagcctggaacttggctgtcattagtgacttgatcctggtatgaaatgcatactgggtataaggttgctcaggtattttatttccttggccacaactcccatagatgccaatgttttgatagcctcagtttctcaacgatgtcttttgtttacagtgctacacttagtgtgagtcaagaagtgcttgagttacaagaaacttcttattcaggtttgagtaagcattttacttccatgtgtacttttaaataatccataccttgaagaagttggccaatgatattatatacatgctgatctgattgttcttttcattccttgagtcaacttcagggtcttggatactaaagagaaggagaactgtggttaatgttttggatcatcatttgtgaacaaggccagactttgcccattttaggctatccaggacttaaggtagccatctggatcataagaaggtcctgcagttgagacaaaatgacccaagtgtattttccacaagttttgatcctgtgtaatatttctttttccttccctagtgtatgtagatacaaggcatggaatgcagttccactttctccccagagttgatctttttgtgattgctttcccgtctctagtagtattctgttgtgtctagagaactgattttttcctacatacgcaaattgtacatttgtaagtgaaaatgtcaatacattaaagcattaaccttaaagca

SEQ ID NO: 414928 - DNA, 3888 bp, Homo sapiens
cagaacggcggccaggacgccggacgtgcggcagttgcaggcgagcaggcgaggaatcgccgtggcgtcttggtgttctccacgctggttcgcaggtgaagagatggcgtttgtgaagagtggctggttgctgcgacagagtactattttgaagcgctggaagaagaactggtttgatctgtggtcggatggtcacctgatctattatgatgaccagactcggcagaatatcgaggataaggtccacatgccaatggactgcatcaacatccgcacggggcaggaatgtcgggatactcagcccccggatggaaagtcaaaagactgcatgctccagattgtttgtcgagatgggaaaacaattagtctttgtgcagaaagcacagatgattgcttggcctggaaatttacactccaagattctaggacaaacacagcgtatgtgggctctgcagtcatgaccgatgagacatccgtggtttcctcacctccaccatacacggcctatgctgcaccggcccctgagcaggcttatggctatgggccatacggtggtgcgtacccgccaggaactcaagttgtctacgctgcgaatgggcaggcgtatgccgtgccctaccagtacccatatgcagagaccatcctcatgacacgtcattgcactgcagtttccaggggactttatggacagcagcctgctaaccaagtcatcattcgagagcgctatcgagacaacgacagcgacctggcactgggcatgctggcaggagcagccacgggcatggccttagggtctctattttgggtcttctaggggcctcaaggtcttgatgtgcatagcttctgataaccctgtgtgcaataatatgatttgcagggcatttctgtttgtgacaaaagtttttaataatagttttaatcattcctttgaaagtagtgatgtcataattgtactaatccacataagtaccacagagaagggtttgaactgtgctattttgttcaaatgttgactctccgggggcactggctcattccaagactgttcttgtgcaactctcagaataccttatttgagcatacctgttttgaaaggcattttctttttagagttaggtgtagtgcttaagggttaatttattttcatgttatgccagtaatatagtgttgtatgcctattgagtgattgtggcaagaaaagctacagcttctttgcgtttaactttttcaaaccacagaccagaactggttgcatgttactttaggagttgtgggttggtaagctcccaggtacttcccgaggctatggtgtgagagcccccgtcctgccctctggggctccacaggcccctggcaaggccgatggctcaggatgatggggcacagcccgcctttgaacaatcatgcttcagaaatctgcctgaccctagctgctgctgctgctcactttattcttgtatggctttggtaggcatacttggagaacatatcccacattaggaattgatttaagcctgagagtttgagggctttaatcctttaaaacttggagaagctggctgggcgcggtggctcacgcctgtaatcccagcactttgagagaccgaggcgggcggatcacgaggtcaggagatcgagaccatcctggctaacacggtgaaaccccatctctactaaaaatacaaaaaattagctgggcgtggtggcaggcgcctgtggtcccagctactcgggaggctgaggcaggagaatagtgtgaacccaggaggcggagcttgcagtgagccaagatagtgccactgcacttcagcctgggtgacagagtgagactctgtctcaaaaaaaaaaaaaaaattcctggagaagccagaacaatatacaaacaagtatgtggaggcagatttgctttattccaagaggctgtttgagtgtgtgtctgcctaagcctccttatagcctatttttctacttgcctgagagagtaatattaaaggaacagtgagggagtggaaggagagccttagttagagcgttcccatttctggcctttgggggtttgcactgtgcgggagatgctctctcatcactctgaaggcccatcctgtgcagaagtgggactctgtggctgttcactgagcaccagggcagactgtagctgagcagacttgggttatggatgggatatggggcccagggaccctcaggacacagggaccggctcaaggtaccactcagcctggccaggacccccagctttgcttttgttcttgatctctttgtgatagagaagcttagaacattgaatttggaaccccaaaatgtgtgagtctttggaaaacccattccagcctttcttcaaatgctcttattttcagtatatgaagtgtgtatttgaaatattcatatttctgttatttcttgttttcaagctctgaattattgcagttttctgtcctgcatgctttcaacagtgtgcttttacagtggcagtttagcacagcgaatgtccctgccccacactccatatggtcctgttttcctgaaaatacactccaggtagcacagacttgttattttgcctggctggttacacacatgctgtcttgctttgctgctcagccacctccctctgaggccaacttaggccaacctacataggactccatctttagcgagacaccagagacacctagtgatgaccacgggtctgcttttctctctgatcctaggggacttgttgacatgggagtgtctgtttccacatggaaggatgtctgtttatctctcatctctgaatagatgtatgacaactctagtgtccatggtttaaaatgttgctttgaggattttccatcctgtataagaagaatggctttcttcagattataatcgttattaaagctgtatgtacactttacttaaaaactattaacagtttttcatgttgcactggtggtaattttgaacttggaattactgggtgggaattccaggaaccacagagtattgatttttgctgccaaaatgctcttgaagcagatgtccctgtgctcccctggctgcttctggctgaaggggggaggtgtagactgaagcttgggcactcatgtgtgtcccctccccagtccccatcctagtggggccagtctcattaggcagccatagataagcctggaacttggctgtcattagtgacttgatcctggtatgaaatgcatactgggtataaggttgctcaggtattttatttccttggccacaactcccatagatgccaatgttttgatagcctcagtttctcaacgatgtcttttgtttacagtgctacacttagtgtgagtcaagaagtgcttgagttacaagaaacttcttattcaggtttgagtaagcattttacttccatgtgtacttttaaataatccataccttgaagaagttggccaatgatattatatacatgctgatctgattgttcttttcattccttgagtcaacttcagggtcttggatactaaagagaaggagaactgtggttaatgttttggatcatcatttgtgaacaaggccagactttgcccattttaggctatccaggacttaaggtagccatctggatcataagaaggtcctgcagttgagacaaaatgacccaagtgtattttccacaagttttgatcctgtgtaatatttctttttccttccctagtgtatgtagatacaaggcatggaatgcagttccactttctccccagagttgatctttttgtgattgctttcccgtctctagtagtattctgttgtgtctagagaactgattttttcctacatacgcaaattgtacatttgtaagtgaaaatgtcaatacattaaagcattaaccttaaagca

SEQ ID NO: 414929 - DNA, 4282 bp, Homo sapiens
ctcaagtgatccacctgcctcagcctcccaaagtgctggcattacaggtgtgagccatcaagcctggccagccagcctttgaaccattaaaggaatagaggatcaaggaggaaagttaacgctattaatacctgagcagtttgaaagctacttagctactaggcattatagctgtgaagcatggaagagagcaaacagtatatttccagttgtaaattttaatcttgcaaattaaatactaaatttgtctgtggtttgtttttttgaagttttcacctctaacataaatatttattttttctctataaagacatgcagtaaaaaagagtaggccgggccgggcgtggtggctcatgcctgtaatctcagcactttgggaggccgacgcgggtggattacgaggtcaggagatcgagaccatcctggctaacacggtgaaaccccgtctctactaaaaatacaaaaaattagccaggcgtggtggtgggcgcctatagtcccagttactcaggaaactgaggtgggagaatagcttgaacctgggcggtggaagttgcagtgagctgagatcatgccactgcactccagcctggggacagagcaagactccttctcaaaaaaaaaaaaaagttatatgtgcagatttaaggcttaatttaaaaattggtttgcgtgcatactaagaagctcatttgctttaagtgagcatttcctttttgggcttttgttgggcactgtgtgtctcccatgttccccatttgtctgccacccaataagcatggtgtcgagggctgaagtagaaatcagaggctagaatctgaaagcttcattagggttctgctttttgcagattagggactttggcccttagtgagctgaggatcttggtttcctcccagtgtgcggtttcagggatgtcggccacatgatgtgcctgttgtggaggagggctgggtcgccagtgtgacaggagacagcagatcccttttgtgaaaggagaactggtactttgcgtgatgttaaacttcacaaaccgctgctcagaaatctgctattttccttctcttttaggactttatggacagcagcctgctaaccaagtcatcattcgagagcgctatcgagacaacgacagcgacctggcactgggcatgctggcaggagcagccacgggcatggccttagggtctctattttgggtcttctaggggcctcaaggtcttgatgtgcatagcttctgataaccctgtgtgcaataatatgatttgcagggcatttctgtttgtgacaaaagtttttaataatagttttaatcattcctttgaaagtagtgatgtcataattgtactaatccacataagtaccacagagaagggtttgaactgtgctattttgttcaaatgttgactctccgggggcactggctcattccaagactgttcttgtgcaactctcagaataccttatttgagcatacctgttttgaaaggcattttctttttagagttaggtgtagtgcttaagggttaatttattttcatgttatgccagtaatatagtgttgtatgcctattgagtgattgtggcaagaaaagctacagcttctttgcgtttaactttttcaaaccacagaccagaactggttgcatgttactttaggagttgtgggttggtaagctcccaggtacttcccgaggctatggtgtgagagcccccgtcctgccctctggggctccacaggcccctggcaaggccgatggctcaggatgatggggcacagcccgcctttgaacaatcatgcttcagaaatctgcctgaccctagctgctgctgctgctcactttattcttgtatggctttggtaggcatacttggagaacatatcccacattaggaattgatttaagcctgagagtttgagggctttaatcctttaaaacttggagaagctggctgggcgcggtggctcacgcctgtaatcccagcactttgagagaccgaggcgggcggatcacgaggtcaggagatcgagaccatcctggctaacacggtgaaaccccatctctactaaaaatacaaaaaattagctgggcgtggtggcaggcgcctgtggtcccagctactcgggaggctgaggcaggagaatagtgtgaacccaggaggcggagcttgcagtgagccaagatagtgccactgcacttcagcctgggtgacagagtgagactctgtctcaaaaaaaaaaaaaaaattcctggagaagccagaacaatatacaaacaagtatgtggaggcagatttgctttattccaagaggctgtttgagtgtgtgtctgcctaagcctccttatagcctatttttctacttgcctgagagagtaatattaaaggaacagtgagggagtggaaggagagccttagttagagcgttcccatttctggcctttgggggtttgcactgtgcgggagatgctctctcatcactctgaaggcccatcctgtgcagaagtgggactctgtggctgttcactgagcaccagggcagactgtagctgagcagacttgggttatggatgggatatggggcccagggaccctcaggacacagggaccggctcaaggtaccactcagcctggccaggacccccagctttgcttttgttcttgatctctttgtgatagagaagcttagaacattgaatttggaaccccaaaatgtgtgagtctttggaaaacccattccagcctttcttcaaatgctcttattttcagtatatgaagtgtgtatttgaaatattcatatttctgttatttcttgttttcaagctctgaattattgcagttttctgtcctgcatgctttcaacagtgtgcttttacagtggcagtttagcacagcgaatgtccctgccccacactccatatggtcctgttttcctgaaaatacactccaggtagcacagacttgttattttgcctggctggttacacacatgctgtcttgctttgctgctcagccacctccctctgaggccaacttaggccaacctacataggactccatctttagcgagacaccagagacacctagtgatgaccacgggtctgcttttctctctgatcctaggggacttgttgacatgggagtgtctgtttccacatggaaggatgtctgtttatctctcatctctgaatagatgtatgacaactctagtgtccatggtttaaaatgttgctttgaggattttccatcctgtataagaagaatggctttcttcagattataatcgttattaaagctgtatgtacactttacttaaaaactattaacagtttttcatgttgcactggtggtaattttgaacttggaattactgggtgggaattccaggaaccacagagtattgatttttgctgccaaaatgctcttgaagcagatgtccctgtgctcccctggctgcttctggctgaaggggggaggtgtagactgaagcttgggcactcatgtgtgtcccctccccagtccccatcctagtggggccagtctcattaggcagccatagataagcctggaacttggctgtcattagtgacttgatcctggtatgaaatgcatactgggtataaggttgctcaggtattttatttccttggccacaactcccatagatgccaatgttttgatagcctcagtttctcaacgatgtcttttgtttacagtgctacacttagtgtgagtcaagaagtgcttgagttacaagaaacttcttattcaggtttgagtaagcattttacttccatgtgtacttttaaataatccataccttgaagaagttggccaatgatattatatacatgctgatctgattgttcttttcattccttgagtcaacttcagggtcttggatactaaagagaaggagaactgtggttaatgttttggatcatcatttgtgaacaaggccagactttgcccattttaggctatccaggacttaaggtagccatctggatcataagaaggtcctgcagttgagacaaaatgacccaagtgtattttccacaagttttgatcctgtgtaatatttctttttccttccctagtgtatgtagatacaaggcatggaatgcagttccactttctccccagagttgatctttttgtgattgctttcccgtctctagtagtattctgttgtgtctagagaactgattttttcctacatacgcaaattgtacatttgtaagtgaaaatgtcaatacattaaagcattaaccttaaagca

SEQ ID NO: 414930 - DNA, 2967 bp, Homo sapiens
cgtacaggactaagcaatctcatcctgttctcagcaaacacctgtcgctgtacaacaatggttatcaccttcttggcttgttcaaatgttgactctccgggggcactggctcattccaagactgttcttgtgcaactctcagaataccttatttgagcatacctgttttgaaaggcattttctttttagagttaggtgtagtgcttaagggttaatttattttcatgttatgccagtaatatagtgttgtatgcctattgagtgattgtggcaagaaaagctacagcttctttgcgtttaactttttcaaaccacagaccagaactggttgcatgttactttaggagttgtgggttggtaagctcccaggtacttcccgaggctatggtgtgagagcccccgtcctgccctctggggctccacaggcccctggcaaggccgatggctcaggatgatggggcacagcccgcctttgaacaatcatgcttcagaaatctgcctgaccctagctgctgctgctgctcactttattcttgtatggctttggtaggcatacttggagaacatatcccacattaggaattgatttaagcctgagagtttgagggctttaatcctttaaaacttggagaagctggctgggcgcggtggctcacgcctgtaatcccagcactttgagagaccgaggcgggcggatcacgaggtcaggagatcgagaccatcctggctaacacggtgaaaccccatctctactaaaaatacaaaaaattagctgggcgtggtggcaggcgcctgtggtcccagctactcgggaggctgaggcaggagaatagtgtgaacccaggaggcggagcttgcagtgagccaagatagtgccactgcacttcagcctgggtgacagagtgagactctgtctcaaaaaaaaaaaaaaaattcctggagaagccagaacaatatacaaacaagtatgtggaggcagatttgctttattccaagaggctgtttgagtgtgtgtctgcctaagcctccttatagcctatttttctacttgcctgagagagtaatattaaaggaacagtgagggagtggaaggagagccttagttagagcgttcccatttctggcctttgggggtttgcactgtgcgggagatgctctctcatcactctgaaggcccatcctgtgcagaagtgggactctgtggctgttcactgagcaccagggcagactgtagctgagcagacttgggttatggatgggatatggggcccagggaccctcaggacacagggaccggctcaaggtaccactcagcctggccaggacccccagctttgcttttgttcttgatctctttgtgatagagaagcttagaacattgaatttggaaccccaaaatgtgtgagtctttggaaaacccattccagcctttcttcaaatgctcttattttcagtatatgaagtgtgtatttgaaatattcatatttctgttatttcttgttttcaagctctgaattattgcagttttctgtcctgcatgctttcaacagtgtgcttttacagtggcagtttagcacagcgaatgtccctgccccacactccatatggtcctgttttcctgaaaatacactccaggtagcacagacttgttattttgcctggctggttacacacatgctgtcttgctttgctgctcagccacctccctctgaggccaacttaggccaacctacataggactccatctttagcgagacaccagagacacctagtgatgaccacgggtctgcttttctctctgatcctaggggacttgttgacatgggagtgtctgtttccacatggaaggatgtctgtttatctctcatctctgaatagatgtatgacaactctagtgtccatggtttaaaatgttgctttgaggattttccatcctgtataagaagaatggctttcttcagattataatcgttattaaagctgtatgtacactttacttaaaaactattaacagtttttcatgttgcactggtggtaattttgaacttggaattactgggtgggaattccaggaaccacagagtattgatttttgctgccaaaatgctcttgaagcagatgtccctgtgctcccctggctgcttctggctgaaggggggaggtgtagactgaagcttgggcactcatgtgtgtcccctccccagtccccatcctagtggggccagtctcattaggcagccatagataagcctggaacttggctgtcattagtgacttgatcctggtatgaaatgcatactgggtataaggttgctcaggtattttatttccttggccacaactcccatagatgccaatgttttgatagcctcagtttctcaacgatgtcttttgtttacagtgctacacttagtgtgagtcaagaagtgcttgagttacaagaaacttcttattcaggtttgagtaagcattttacttccatgtgtacttttaaataatccataccttgaagaagttggccaatgatattatatacatgctgatctgattgttcttttcattccttgagtcaacttcagggtcttggatactaaagagaaggagaactgtggttaatgttttggatcatcatttgtgaacaaggccagactttgcccattttaggctatccaggacttaaggtagccatctggatcataagaaggtcctgcagttgagacaaaatgacccaagtgtattttccacaagttttgatcctgtgtaatatttctttttccttccctagtgtatgtagatacaaggcatggaatgcagttccactttctccccagagttgatctttttgtgattgctttcccgtctctagtagtattctgttgtgtctagagaactgattttttcctacatacgcaaattgtacatttgtaagtgaaaatgtcaatacattaaagcattaaccttaaagca

SEQ ID NO: 414931 - DNA, 1122 bp, Homo sapiens
  misc_feature (280)..(280): n is a, c, g, or t
cattccactcagtattatctttgtctactctataacatccccgcatccagtgcgcacttctggcaggatgtgagggtgcagcccaaggctcctactgaagtggcgcataactgacgctgtgtgtgtcatgactcgaagaacccgctgcacttacaggtagaggtggtcactttgtttacggagtttggaagagacccatactgctacttgtgttttggacttaactgaacttggacatggtctgagttagaaccacttgttttggagaagtgcgcctggntgcgcacccaggcgcacttctggctgaaggggggaggtgtagactgaagcttgggcactcatgtgtgtcccctccccagtccccatcctagtggggccagtctcattaggcagccatagataagcctggaacttggctgtcattagtgacttgatcctggtatgaaatgcatactgggtataaggttgctcaggtattttatttccttggccacaactcccatagatgccaatgttttgatagcctcagtttctcaacgatgtcttttgtttacagtgctacacttagtgtgagtcaagaagtgcttgagttacaagaaacttcttattcaggtttgagtaagcattttacttccatgtgtacttttaaataatccataccttgaagaagttggccaatgatattatatacatgctgatctgattgttcttttcattccttgagtcaacttcagggtcttggatactaaagagaaggagaactgtggttaatgttttggatcatcatttgtgaacaaggccagactttgcccattttaggctatccaggacttaaggtagccatctggatcataagaaggtcctgcagttgagacaaaatgacccaagtgtattttccacaagttttgatcctgtgtaatatttctttttccttccctagtgtatgtagatacaaggcatggaatgcagttccactttctccccagagttgatctttttgtgattgctttcccgtctctagtagtattctgttgtgtctagagaactgattttttcctacatacgcaaattgtacatttgtaagtgaaaatgtcaatacattaaagcattaaccttaaagca

SEQ ID NO: 414932 - DNA, 956 bp, Homo sapiens
  misc_feature (114)..(114): n is a, c, g, or t
tggggttttggtgtggatgtcctttctgtttgttagttttcttctaacagtcaggacccttagctgccagtctgttggagtttgctggaggtccactgcagaagtgcgcctggntgcgcacccaggcgcacttctggctgaaggggggaggtgtagactgaagcttgggcactcatgtgtgtcccctccccagtccccatcctagtggggccagtctcattaggcagccatagataagcctggaacttggctgtcattagtgacttgatcctggtatgaaatgcatactgggtataaggttgctcaggtattttatttccttggccacaactcccatagatgccaatgttttgatagcctcagtttctcaacgatgtcttttgtttacagtgctacacttagtgtgagtcaagaagtgcttgagttacaagaaacttcttattcaggtttgagtaagcattttacttccatgtgtacttttaaataatccataccttgaagaagttggccaatgatattatatacatgctgatctgattgttcttttcattccttgagtcaacttcagggtcttggatactaaagagaaggagaactgtggttaatgttttggatcatcatttgtgaacaaggccagactttgcccattttaggctatccaggacttaaggtagccatctggatcataagaaggtcctgcagttgagacaaaatgacccaagtgtattttccacaagttttgatcctgtgtaatatttctttttccttccctagtgtatgtagatacaaggcatggaatgcagttccactttctccccagagttgatctttttgtgattgctttcccgtctctagtagtattctgttgtgtctagagaactgattttttcctacatacgcaaattgtacatttgtaagtgaaaatgtcaatacattaaagcattaaccttaaagca

SEQ ID NO: 414933 - DNA, 681 bp, Homo sapiens
cagaacggcggccaggacgccggacgtgcggcagttgcaggcgagcaggcgaggaatcgccgtggcgtcttggtgttctccacgctggttcgcaggtgaagagatggcgtttgtgaagagtggctggttgctgcgacagagtactattttgaagcgctggaagaagaactggtttgatctgtggtcggatggtcacctgatctattatgatgaccagactcggcagaatatcgaggataaggtccacatgccaatggactgcatcaacatccgcacggggcaggaatgtcgggatactcagcccccggatggaaagtcaaaagactgcatgctccagattgtttgtcgagatgggaaaacaattagtctttgtgcagaaagcacagatgattgcttggcctggaaatttacactccaagattctaggacaaacacagcgtatgtgggctctgcagtcatgaccgatgagacatccgtggtttcctcacctccaccatacacggcctatgctgcaccggcccctgagcaggcttatggctatgggccatacggtggtgcgtacccgccaggaactcaagttgtctacgctgcgaatgggcaggcgtatgccgtgccctaccagtacccatatgcagactttatggacagcagcctgcgacctatgaggtaccggctgactga

SEQ ID NO: 414934 - DNA, 337 bp, Homo sapiens
cgatgagacatccgtggtttcctcacctccaccatacacggcctatgctgcaccggcccctgaggtagggagaaccctgagcctccaggtgagggaagtttggggtctctgctgctgtcctgctttgttttgtttttttaaatgaaattagaaatgtactctaaaccttttcttcttaaaacagatgatttcttatcaacgtttgttttcatgaaatgaagcaactattttatatagttcagcacattataatgtgctgtattaatgtgtaacacgtttttaagatagatctaaaaatgcatcatgttaatgatagttgccttgggtaatgagattt

SEQ ID NO: 414935 - DNA, 447 bp, Homo sapiens
ggactcggcctccaggcatcccatccttgggggaatgttgccaagcacggggcttggggcagctgctccactataatcatgaaaggcttttgcttcacttgaatgttcacaagtatctctccttttaggagctgcacagtaaaggtcccaaaatacacaccaccacgagtgcaaaaacccaggcggttctcccaacgcgatgtttttttcccagcgaatctccgataagaaggtctgtgcagatttctgtgctcctacctgcagtaaatattcgtagacgtataaagctaacttttccccagcctgcccgtccgagggcaccaaggagcctttgcctttggcaaacatggtttgcagggaagagggcgcccagcctccccacagccgccaccgctccggctctcccgagctgcccctcgcccccggccccctcccaggcgctccctc

SEQ ID NO: 414936 - DNA, 624 bp, Homo sapiens
  misc_feature (26)..(26): n is a, c, g, or t
gtacatatacaatcgagccggtaccncataggtcgcaggtgaagagatggcgtttgtgaagagtggctggttgctgcgacagagtactattttgaagcgctggaagaagaactggtttgatctgtggtcggatggtcacctgatctattatgatgaccagactcggcagaatatcgaggataaggtccacatgccaatggactgcatcaacatccgcacggggcaggaatgtcgggatactcagcccccggatggaaagtcaaaagactgcatgctccagattgtttgtcgagatgggaaaacaattagtctttgtgcagaaagcacagatgattgcttggcctggaaatttacactccaagattctaggacaaacacagcgtatgtgggctctgcagtcatgaccgatgagacatccgtggtttcctcacctccaccatacacggcctatgctgcaccggcccctgagcaggcttatggctatgggccatacggtggtgcgtacccgccaggaactcaagttgtctacgctgcgaatgggcaggcgtatgccgtgccctaccagtacccatatgcagactttatggacagcagcctgcgacctatgaggtaccggctgactga

SEQ ID NO: 414937 - DNA, 3679 bp, Homo sapiens
cagaacggcggccaggacgccggacgtgcggcagttgcaggcgagcaggcgaggaatcgccgtggcgtcttggtgttctccacgctggttcgcaggtgaagagatggcgtttgtgaagagtggctggttgctgcgacagagtactattttgaagcgctggaagaagaactggtttgatctgtggtcggatggtcacctgatctattatgatgaccagactcggcagaatatcgaggataaggtccacatgccaatggactgcatcaacatccgcacggggcaggaatgtcgggatactcagcccccggatggaaagtcaaaagactgcatgctccagattgtttgtcgagatgggaaaacaattagtctttgtgcagaaagcacagatgattgcttggcctggaaatttacactccaagattctaggacaaacacagcgtatgtgggctctgcagtcatgaccgatgagacatccgtggtttcctcacctccaccatacacggcctatgctgcaccggcccctgagcaggcttatggctatgggccatacggtggtgcgtacccgccaggaactcaagttgtctacgctgcgaatgggcaggcgtatgccgtgccctaccagtacccatatgcaggactttatggacagcagcctgctaaccaagtcatcattcgagagcgctatcgagacaacgacagcgacctggcactgggcatgctggcaggagcagccacgggcatggccttagggtctctattttgggtcttctaggggcctcaaggtcttgatgtgcatagcttctgataaccctgtgtgcaataatatgatttgcagggcatttctgtttgtgacaaaagtttttaataatagttttaatcattcctttgaaagtagtgatgtcataattgtactaatccacataagtaccacagagaagggtttgaactgtgctattttgttcaaatgttgactctccgggggcactggctcattccaagactgttcttgtgcaactctcagaataccttatttgagcatacctgttttgaaaggcattttctttttagagttaggtgtagtgcttaagggttaatttattttcatgttatgccagtaatatagtgttgtatgcctattgagtgattgtggcaagaaaagctacagcttctttgcgtttaactttttcaaaccacagaccagaactggttgcatgttactttaggagttgtgggttggtaagctcccaggtacttcccgaggctatggtgtgagagcccccgtcctgccctctggggctccacaggcccctggcaaggccgatggctcaggatgatggggcacagcccgcctttgaacaatcatgcttcagaaatctgcctgaccctagctgctgctgctgctcactttattcttgtatggctttggtaggcatacttggagaacatatcccacattaggaattgatttaagcctgagagtttgagggctttaatcctttaaaacttggagaagctggctgggcgcggtggctcacgcctgtaatcccagcactttgagagaccgaggcgggcggatcacgaggtcaggagatcgagaccatcctggctaacacggtgaaaccccatctctactaaaaatacaaaaaattagctgggcgtggtggcaggcgcctgtggtcccagctactcgggaggctgaggcaggagaatagtgtgaacccaggaggcggagcttgcagtgagccaagatagtgccactgcacttcagcctgggtgacagagtgagactctgtctcaaaaaaaaaaaaaaaattcctggagaagccagaacaatatacaaacaagtatgtggaggcagatttgctttattccaagaggctgtttgagtgtgtgtctgcctaagcctccttatagcctatttttctacttgcctgagagagtaatattaaaggaacagtgagggagtggaaggagagccttagttagagcgttcccatttctggcctttgggggtttgcactgtgcgggagatgctctctcatcactctgaaggcccatcctgtgcagaagtgggactctgtggctgttcactgagcaccagggcagactgtagctgagcagacttgggttatggatgggatatggggcccagggaccctcaggacacagggaccggctcaaggtaccactcagcctggccaggacccccagctttgcttttgttcttgatctctttgtgatagagaagcttagaacattgaatttggaaccccaaaatgtgtgagtctttggaaaacccattccagcctttcttcaaatgctcttattttcagtatatgaagtgtgtatttgaaatattcatatttctgttatttcttgttttcaagctctgaattattgcagttttctgtcctgcatgctttcaacagtgtgcttttacagtggcagtttagcacagcgaatgtccctgccccacactccatatggtcctgttttcctgaaaatacactccaggtagcacagacttgttattttgcctggctggttacacacatgctgtcttgctttgctgctcagccacctccctctgaggccaacttaggccaacctacataggactccatctttagcgagacaccagagacacctagtgatgaccacgggtctgcttttctctctgatcctaggggacttgttgacatgggagtgtctgtttccacatggaaggatgtctgtttatctctcatctctgaatagatgtatgacaactctagtgtccatggtttaaaatgttgctttgaggattttccatcctgtataagaagaatggctttcttcagattataatcgttattaaagctgtatgtacactttacttaaaaactattaacagtttttcatgttgcactggtggtaattttgaacttggaattactgggtgggaattccaggaaccacagagtattgatttttgctgccaaaatgctcttgaagcagatgtccctgtgctcccctggctgcttctggctgaaggggggaggtgtagactgaagcttgggcactcatgtgtgtcccctccccagtccccatcctagtggggccagtctcattaggcagccatagataagcctggaacttggctgtcattagtgacttgatcctggtatgaaatgcatactgggtataaggttgctcaggtattttatttccttggccacaactcccatagatgccaatgttttgatagcctcagtttctcaacgatgtcttttgtttacagtgctacacttagtgtgagtcaagaagtgcttgagttacaagaaacttcttattcaggtttgagtaagcattttacttccatgtgtacttttaaataatccataccttgaagaagttggccaatgatattatatacaatcagatagcctggacttggctgtcatgagtgcttgatcctggtatggaatgctactgggtattacgtgccggtattttattccttggcgcactcccttgatgcaatgtttgtagctcggcgctcagatgtctttggtcagggccctggggggccgaggtcggtcgaactttccggtgggacgttttccccgacgtaaccccccggagggggcttttagggggggccccccggcgccggcggcacacgccgcggtgtttcccc

SEQ ID NO: 414938 - DNA, 3801 bp, Homo sapiens
cagaacggcggccaggacgccggacgtgcggcagttgcaggcgagcaggcgaggaatcgccgtggcgtcttggtgttctccacgctggttcgcaggtactattttgaagcgctggaagaagaactggtttgatctgtggtcggatggtcacctgatctattatgatgaccagactcggcagaatatcgaggataaggtccacatgccaatggactgcatcaacatccgcacggggcaggaatgtcgggatactcagcccccggatggaaagtcaaaagactgcatgctccagattgtttgtcgagatgggaaaacaattagtctttgtgcagaaagcacagatgattgcttggcctggaaatttacactccaagattctaggacaaacacagcgtatgtgggctctgcagtcatgaccgatgagacatccgtggtttcctcacctccaccatacacggcctatgctgcaccggcccctgagcaggcttatggctatgggccatacggtggtgcgtacccgccaggaactcaagttgtctacgctgcgaatgggcaggcgtatgccgtgccctaccagtacccatatgcaggactttatggacagcagcctgctaaccaagtcatcattcgagagcgctatcgagacaacgacagcgacctggcactgggcatgctggcaggagcagccacgggcatggccttagggtctctattttgggtcttctaggggcctcaaggtcttgatgtgcatagcttctgataaccctgtgtgcaataatatgatttgcagggcatttctgtttgtgacaaaagtttttaataatagttttaatcattcctttgaaagtagtgatgtcataattgtactaatccacataagtaccacagagaagggtttgaactgtgctattttgttcaaatgttgactctccgggggcactggctcattccaagactgttcttgtgcaactctcagaataccttatttgagcatacctgttttgaaaggcattttctttttagagttaggtgtagtgcttaagggttaatttattttcatgttatgccagtaatatagtgttgtatgcctattgagtgattgtggcaagaaaagctacagcttctttgcgtttaactttttcaaaccacagaccagaactggttgcatgttactttaggagttgtgggttggtaagctcccaggtacttcccgaggctatggtgtgagagcccccgtcctgccctctggggctccacaggcccctggcaaggccgatggctcaggatgatggggcacagcccgcctttgaacaatcatgcttcagaaatctgcctgaccctagctgctgctgctgctcactttattcttgtatggctttggtaggcatacttggagaacatatcccacattaggaattgatttaagcctgagagtttgagggctttaatcctttaaaacttggagaagctggctgggcgcggtggctcacgcctgtaatcccagcactttgagagaccgaggcgggcggatcacgaggtcaggagatcgagaccatcctggctaacacggtgaaaccccatctctactaaaaatacaaaaaattagctgggcgtggtggcaggcgcctgtggtcccagctactcgggaggctgaggcaggagaatagtgtgaacccaggaggcggagcttgcagtgagccaagatagtgccactgcacttcagcctgggtgacagagtgagactctgtctcaaaaaaaaaaaaaaaattcctggagaagccagaacaatatacaaacaagtatgtggaggcagatttgctttattccaagaggctgtttgagtgtgtgtctgcctaagcctccttatagcctatttttctacttgcctgagagagtaatattaaaggaacagtgagggagtggaaggagagccttagttagagcgttcccatttctggcctttgggggtttgcactgtgcgggagatgctctctcatcactctgaaggcccatcctgtgcagaagtgggactctgtggctgttcactgagcaccagggcagactgtagctgagcagacttgggttatggatgggatatggggcccagggaccctcaggacacagggaccggctcaaggtaccactcagcctggccaggacccccagctttgcttttgttcttgatctctttgtgatagagaagcttagaacattgaatttggaaccccaaaatgtgtgagtctttggaaaacccattccagcctttcttcaaatgctcttattttcagtatatgaagtgtgtatttgaaatattcatatttctgttatttcttgttttcaagctctgaattattgcagttttctgtcctgcatgctttcaacagtgtgcttttacagtggcagtttagcacagcgaatgtccctgccccacactccatatggtcctgttttcctgaaaatacactccaggtagcacagacttgttattttgcctggctggttacacacatgctgtcttgctttgctgctcagccacctccctctgaggccaacttaggccaacctacataggactccatctttagcgagacaccagagacacctagtgatgaccacgggtctgcttttctctctgatcctaggggacttgttgacatgggagtgtctgtttccacatggaaggatgtctgtttatctctcatctctgaatagatgtatgacaactctagtgtccatggtttaaaatgttgctttgaggattttccatcctgtataagaagaatggctttcttcagattataatcgttattaaagctgtatgtacactttacttaaaaactattaacagtttttcatgttgcactggtggtaattttgaacttggaattactgggtgggaattccaggaaccacagagtattgatttttgctgccaaaatgctcttgaagcagatgtccctgtgctcccctggctgcttctggctgaaggggggaggtgtagactgaagcttgggcactcatgtgtgtcccctccccagtccccatcctagtggggccagtctcattaggcagccatagataagcctggaacttggctgtcattagtgacttgatcctggtatgaaatgcatactgggtataaggttgctcaggtattttatttccttggccacaactcccatagatgccaatgttttgatagcctcagtttctcaacgatgtcttttgtttacagtgctacacttagtgtgagtcaagaagtgcttgagttacaagaaacttcttattcaggtttgagtaagcattttacttccatgtgtacttttaaataatccataccttgaagaagttggccaatgatattatatacatgctgatctgattgttcttttcattccttgagtcaacttcagggtcttggatactaaagagaaggagaactgtggttaatgttttggatcatcatttgtgaacaaggccagactttgcccattttaggctatccaggacttaaggtagccatctggatcataagaaggtcctgcagttgagacaaaatgacccaagtgtattttccacaagttttgatcctgtgtaatatttctttttccttccctagtgtatgtagatacaaggcatggaatgcagttccactttctccccagagttgatctttttgtgattgctttcccgtctctagtagtattctgttgtgtctagagaactgattttttcctacatacgcaaattgtacatttgtaagtgaaaatgtcaatacattaaagcattaaccttaaagca

SEQ ID NO: 414939 - DNA, 3655 bp, Homo sapiens
tatgattttgaacctgcctgtttttgttctgtaggtgaagagatggcgtttgtgaagagtggctggttgctgcgacagagtactattttgaagcgctggaagaagaactggtttgatctgtggtcggatggtcacctgatctattatgatgaccagactcggcagaatatcgaggataaggtccacatgccaatggactgcatcaacatccgcacggggcaggaatgtcgggatactcagcccccggatggaaagtcaaaagactgcatgctccagattgtttgtcgagatgggaaaacaattagtctttgtgcagaaagcacagatgattgcttcaggcttatggctatgggccatacggtggtgcgtacccgccaggaactcaagttgtctacgctgcgaatgggcaggcgtatgccgtgccctaccagtacccatatgcaggactttatggacagcagcctgctaaccaagtcatcattcgagagcgctatcgagacaacgacagcgacctggcactgggcatgctggcaggagcagccacgggcatggccttagggtctctattttgggtcttctaggggcctcaaggtcttgatgtgcatagcttctgataaccctgtgtgcaataatatgatttgcagggcatttctgtttgtgacaaaagtttttaataatagttttaatcattcctttgaaagtagtgatgtcataattgtactaatccacataagtaccacagagaagggtttgaactgtgctattttgttcaaatgttgactctccgggggcactggctcattccaagactgttcttgtgcaactctcagaataccttatttgagcatacctgttttgaaaggcattttctttttagagttaggtgtagtgcttaagggttaatttattttcatgttatgccagtaatatagtgttgtatgcctattgagtgattgtggcaagaaaagctacagcttctttgcgtttaactttttcaaaccacagaccagaactggttgcatgttactttaggagttgtgggttggtaagctcccaggtacttcccgaggctatggtgtgagagcccccgtcctgccctctggggctccacaggcccctggcaaggccgatggctcaggatgatggggcacagcccgcctttgaacaatcatgcttcagaaatctgcctgaccctagctgctgctgctgctcactttattcttgtatggctttggtaggcatacttggagaacatatcccacattaggaattgatttaagcctgagagtttgagggctttaatcctttaaaacttggagaagctggctgggcgcggtggctcacgcctgtaatcccagcactttgagagaccgaggcgggcggatcacgaggtcaggagatcgagaccatcctggctaacacggtgaaaccccatctctactaaaaatacaaaaaattagctgggcgtggtggcaggcgcctgtggtcccagctactcgggaggctgaggcaggagaatagtgtgaacccaggaggcggagcttgcagtgagccaagatagtgccactgcacttcagcctgggtgacagagtgagactctgtctcaaaaaaaaaaaaaaaattcctggagaagccagaacaatatacaaacaagtatgtggaggcagatttgctttattccaagaggctgtttgagtgtgtgtctgcctaagcctccttatagcctatttttctacttgcctgagagagtaatattaaaggaacagtgagggagtggaaggagagccttagttagagcgttcccatttctggcctttgggggtttgcactgtgcgggagatgctctctcatcactctgaaggcccatcctgtgcagaagtgggactctgtggctgttcactgagcaccagggcagactgtagctgagcagacttgggttatggatgggatatggggcccagggaccctcaggacacagggaccggctcaaggtaccactcagcctggccaggacccccagctttgcttttgttcttgatctctttgtgatagagaagcttagaacattgaatttggaaccccaaaatgtgtgagtctttggaaaacccattccagcctttcttcaaatgctcttattttcagtatatgaagtgtgtatttgaaatattcatatttctgttatttcttgttttcaagctctgaattattgcagttttctgtcctgcatgctttcaacagtgtgcttttacagtggcagtttagcacagcgaatgtccctgccccacactccatatggtcctgttttcctgaaaatacactccaggtagcacagacttgttattttgcctggctggttacacacatgctgtcttgctttgctgctcagccacctccctctgaggccaacttaggccaacctacataggactccatctttagcgagacaccagagacacctagtgatgaccacgggtctgcttttctctctgatcctaggggacttgttgacatgggagtgtctgtttccacatggaaggatgtctgtttatctctcatctctgaatagatgtatgacaactctagtgtccatggtttaaaatgttgctttgaggattttccatcctgtataagaagaatggctttcttcagattataatcgttattaaagctgtatgtacactttacttaaaaactattaacagtttttcatgttgcactggtggtaattttgaacttggaattactgggtgggaattccaggaaccacagagtattgatttttgctgccaaaatgctcttgaagcagatgtccctgtgctcccctggctgcttctggctgaaggggggaggtgtagactgaagcttgggcactcatgtgtgtcccctccccagtccccatcctagtggggccagtctcattaggcagccatagataagcctggaacttggctgtcattagtgacttgatcctggtatgaaatgcatactgggtataaggttgctcaggtattttatttccttggccacaactcccatagatgccaatgttttgatagcctcagtttctcaacgatgtcttttgtttacagtgctacacttagtgtgagtcaagaagtgcttgagttacaagaaacttcttattcaggtttgagtaagcattttacttccatgtgtacttttaaataatccataccttgaagaagttggccaatgatattatatacatgctgatctgattgttcttttcattccttgagtcaacttcagggtcttggatactaaagagaaggagaactgtggttaatgttttggatcatcatttgtgaacaaggccagactttgcccattttaggctatccaggacttaaggtagccatctggatcataagaaggtcctgcagttgagacaaaatgacccaagtgtattttccacaagttttgatcctgtgtaatatttctttttccttccctagtgtatgtagatacaaggcatggaatgcagttccactttctccccagagttgatctttttgtgattgctttcccgtctctagtagtattctgttgtgtctagagaactgattttttcctacatacgcaaattgtacatttgtaagtgaaaatgtcaatacattaaagcattaaccttaaagca

SEQ ID NO: 414940 - DNA, 2127 bp, Homo sapiens
aatgcatgaaggaaactccgtttacacatgctcgtaggatcccctgcgtggaaacagcagcttgtctctgactacccggaggacatggagcaccccaaataggaactttagagggattgaaatctgttgcctgttccactaggaatattgtttgcaaggcacaaggtgtcttttggtagtgagcgcgctctgcgcatgcgcaggtccattcgggaattactgcccagcagccgactaagttgcattccttgaatcttcgcagaaaagacaattcttttaatcagagttagtaatgtggacagtacaaaatcgagagagtctggggcttctctctttccctgtgatgattaccatggtctgttgtgcacacagcaccaatgaacccagcaacatgtcatacgtgaaagagacagtggacagattgctcaaaggatatgacattcgcttgcggccggacttcggagggccccccgtcgacgttgggatgcggatcgatgtcgccagcatagacatggtctccgaagtgaatatggattatacactcaccatgtatttccagcagtcttggaaagacaaaaggctttcttattctggaatcccactgaacctcaccctagacaatagggtagctgaccaactctgggtaccagacacctactttctgaatgacaagaaatcatttgtgcatggggtcacagtgaaaaatcgaatgattcgactgcatcctgatggaacagttctctatggactccgaatcacaaccacagctgcatgtatgatggatcttcgaagatatccactggatgagcagaactgcaccctggagatcgaaagttatggctataccactgatgacattgaattttactggaatggaggagaaggggcagtcactggtgttaataaaatcgaacttcctcaattttcaattgttgactacaagatggtgtctaagaaggtggagttcacaacaggagcgtatccacgactgtcactaagttttcgtctaaagagaaacattggttacttcattttgcaaacctacatgccttctacactgattacaattctgtcctgggtgtctttttggatcaactatgatgcatctgcagccagagtcgcactaggaatcacgacagtgcttacaatgacaaccatcagcacccacctcagggagaccctgccaaagatcccttatgtcaaagcgattgatatttatctgatgggttgctttgtgtttgtgttcctggctctgctggagtatgcctttgtaaattacatcttctttgggaaaggccctcagaaaaagggagctagcaaacaagaccagagtgccaatgagaagaataaactggagatgaataaagtccaggtcgacgcccacggtaacattctcctcagcaccctggaaatccggaatgagacgagtggctcggaagtgctcacgagcgtgagcgaccccaaggccaccatgtactcctatgacagcgccagcatccagtaccgcaagcccctgagcagccgcgaggcctacgggcgcgccctggaccggcacggggtacccagcaaggggcgcatccgcaggcgtgcctcccagctcaaagtcaagatccccgacttgactgatgtgaattccatagacaagtggtcccgaatgtttttccccatcaccttttctctttttaatgtcgtctattggctttactatgtacactgaggtctgttctaatggttccatttagactactttcctcttctattgttttttaaccttacaggtccccaacagcgatactgctgtttctcgaggtaagagattcagccatccaattggttttaggtcttgcatatcagttttattactgcaccatgtttacttcaaaaagacaaaacaaaaaaaaaattatttttccagtctaccgtggtccaggttatcagctctttaagagctctattaattgccatgtttacaaacaaacacaaagagagaagttagacaggtagatctttagcagtcttttctagtttccctggatttcactgatttattttttagggaaaatgaaaagaggaccttgctgtccgcctgcactgcttcctggtaaactataacaaacttatgctgcc

SEQ ID NO: 414941 - DNA, 557 bp, Homo sapiens
catgtatttccagcagtcttggaaagacaaaaggctttcttattctggaatcccactgaacctcaccctagacaatagggtagctgaccaactctgggtaccagacacctactttctgaatgacaagaaatcatttgtgcatggggtcacagtgaaaaatcgaatgattcgactgcatcctgatggaacagttctctatggactccggtaaatggctttatgttgcatgttttaatgttgttgttgttttgtttcattttaaacttttggaagtgggcaaaggggagagaagcaagaatatatagatgaatatataaatggggtgtcatatacttatgaaggtctattacaaaccctcatgtagttaagggctttttacaaattataggcaacacatcaaaattaactaccagttttaacaaggaaatatctgaactgtaacctgttattataggatatgtaaagtggtggctctttattctttggtgtcacctttagtcattcttttgagaaacagatgaaacctatatattcataaactcatatatgcctcaaat

SEQ ID NO: 414942 - DNA, 367 bp, Homo sapiens
ctcatgtgagctgtgcctctgtcaatcattacggcagatgagaagaggtgtgagggagtgtgtcctgtttgtgaatgttgtctgtcatgtgtgccagtcaagttaacagctgctctaaaacacacacacatgcttctcctcagtggtgttggcacggggtttggggtggggtgagcctctcagcaagggtggtctgtctctggaggcttcctgggccccatagtggtttcctccccatcccttggttctggcccgtcccccttctcctctggctgaaggtaaccgcgggggtgaaggatgtgggcaggaaaggaccagagggctaggggcttgcatctcagaagtcagaagcaagtcctgtgtgctt

SEQ ID NO: 414943 - DNA, 1514 bp, Homo sapiens
gatctggtaaacctgaagcaaatatagaaacctatagggcctgacttcctacataaagtaaggagggtaaaaatggaggctagaataagggttaaaattttgcttctagaacagagaaaatgatttttttcatatatatatgaatatatattatatatacacatatatacatatattcactatagtgtgtatacataaatatataatatatatattgttagtgtagtgtgtgtctgattatttacatgcatatagtatatacacttatgactttagtacccagacgtttttcatttgattaagcattcatttgtattgacacagctgaagtttactggagtttagctgaagtctaatgcaaaattaatagattgttgtcatcctcttaaggtcatagggagaacacacaaatgaaaacagtaaaagaaactgaaagtacagagaaatgttcagaaaatgaaaaccatgtgtttcctattaaaagccatgcatacaagcaatgtcttcagaaaacctagggtccaaggttaagccatatcccagctcagtaaagccaggagcatcctcatttcccaatggccctcctgttccctctactggcagccctagtgatgaccagctatagccctgttggatctctgggctgtgatctgcctcagaaccatggcctacttagcaggaacaccttggtgcttctgcaccaaatgaggagaatctcccctttcttgtgtctcaaggacagaagagacttcaggttcccccaggagatggtaaaagggagccagttgcagaaggcccatgtcatgtctgtcctccatgagatgctgcagcagatcttcagcctcttccacacagagcgctcctctgctgcctggaacatgaccctcctagaccaactccacactggacttcatcagcaactgcaacacctggagacctgcttgctgcaggtagtgggagaaggagaatctgctggggcaattagcagccctgcactgaccttgaggaggtacttccagggaatccgtgtctacctgaaagagaagaaatacagcgactgtgcctgggaagttgtcagaatggaaatcatgaaatccttgttcttatcaacaaacatgcaagaaagactgagaagtaaagatagagacctgggctcatcttgaaatgattctcattgattaatttgccatataacacttgcacatgtgactctggtcaattcaaaagactcttatttcggctttaatcacagaattgactgaattagttctgcaaatactttgtcggtatattaagccagtatatgttaaaaagacttaggttcaggggcatcagtccctaagatgttatttatttttactcatttatttattcttacattttatcatatttatactatttatattcttatataacaaatgtttgcctttacattgtattaagataacaaaacatgttcagctttccatttggttaaatattgtattttgttatttattaaattattttcaaac

SEQ ID NO: 414944 - DNA, 247 bp, Homo sapiens
cgcccagccaaaaattggtgttcatacaaaaacttatgtgcaaatattcacagcagctttatctgtaatagctccaaactggaaacaaccaagatgtctttcaataggtgaacagagggaagtgggtgggcaacatgaaggatcattgtggtgacagatatatttggagccttgactatatcagtgtcaatatgatggttatgatatggttctatagttttgtaagaagttacctcgagaaactgag

SEQ ID NO: 414945 - DNA, 974 bp, Homo sapiens
aacttctgagaagggcttagaacaaattttttcccggagtgccatttcccaaaggtactcacagaacaatcaggtgtgaccataatggctgcactgagttgtctcttggacagtgtcagaagggacataaagaaggtggacagagaactaaggcaactgagatgcatcgacgaatttagcacacggtgcctgtgcgacttgtatatgcacccctattgctgctgtgacttgcacccatatccgtactgcttgtgctattccaagcgatcacgctcttgcggcctgtgtgatctctacccatgttgcctgtgtgattataagctttactgtctgcgaccatctctcagaagtttggagaggaaagccatcagagccatagaagatgagaagcgagagcttgccaaactgagaagaacaacaaatagaattctggcttcctcctgctgtagcagtaacattttaggatcggtgaatgtatgcggttttgaacccgatcaagtcaaagttcgagtgaaggatggaaaggtatgtgtgtcggctgagcgggagaacaggtacgactgccttggatcgaaaaagtacagctacatgaacatctgcaaagagttcagcttgccgccctgtgtggatgagaaggatgtaacatactcctatgggctcggcagctgtgtcaagatcgagtctccttgctacccttgcacttctccttgcagcccgtgcagcccgtgcaacccctgcaacccctgcagcccctgcaacccgtgcagcccatatgatccttgcaacccgtgttatccctgtggaagccgattttcctgtaggaagatgattttgtaaagtgcgcataggaacccattacttaatagaagtcagttactccagccaggcagctctcccaatgtttctcctctccttcccatggcccctgttgttgaagtacgtaggaaactgaatacataactgcaatctgcaaa

SEQ ID NO: 414946 - DNA, 753 bp, Homo sapiens
aacttctgagaagggcttagaacaaattttttcccggagtgccatttcccaaaggtactcacagaacaatcaggtgtgaccataatggctgcactgagttgtctcttggacagtgtcagaagggacataaagaaggtggacagagaactaaggcaactgagatgcatcgacgaatttagcacacggtgcctgtgcgacttgtatatgcacccctattgctgctgtgacttgcacccatatccgtactgcttgtgctattccaagcgatcacgctcttgcggcctgtgtgatctctacccatgttgcctgtgtgattataagctttactgtctgcgaccatctctcagaagtttggagaggaaagccatcagagccatagaagatgagaagcgagagcttgccaaactgagaagaacaacaaatagaattctggcttcctcctgctgtagcagtaacattttaggatcggtgaatgtatgcggttttgaacccgatcaagtcaaagttcgagtgaaggatggaaaggacttgcctgaaactttcccgaaacttctttcttgtgatggaagaaacatggaaggacaaaggtcatccacttgaaaaggttttccacgggtaaccatgaccaagaactagctctatgccaggccgaaactgtcagtgtggcatgctttctcttttctcatccttacagtagccctcagaggttgatgctattattatccctggaacaggatcagtgagatagtcatt

SEQ ID NO: 414947 - DNA, 786 bp, Homo sapiens
aacttctgagaagggcttagaacaaattttttcccggagtgccatttcccaaaggtactcacagaacaatcaggtgtgaccataatggctgcactgagttgtctcttggacagtgtcagaagggacataaagaaggtggacagagaactaaggcaactgagatgcatcgacgaatttagcacacggtgcctgtgcgacttgtatatgcacccctattgctgctgtgacttgcacccatatccgtactgcttgtgctattccaagcgatcacgctcttgcggcctgtgtgatctctacccatgttgcctgtgtgattataagctttactgtctgcgaccatctctcagaagtttggagaggaaagccatcagagccatagaagatgagaagcgagagcttgccaaactgagaagaacaacaaatagaattctggcttcctcctgctgtagcagtaacattttaggatcggtgaatgtatgcggttttgaacccgatcaagtcaaagttcgagtgaaggatggaaagcccgtgcagcccgtgcaacccctgcaacccctgcagcccctgcaacccgtgcagcccatatgatccttgcaacccgtgttatccctgtggaagccgattttcctgtaggaagatgattttgtaaagtgcgcataggaacccattacttaatagaagtcagttactccagccaggcagctctcccaatgtttctcctctccttcccatggcccctgttgttgaagtacgtaggaaactgaatacataactgcaatctgcaaa

SEQ ID NO: 414948 - DNA, 423 bp, Homo sapiens
tggaactgaaacaagacctgcatgaccctgcagtgtagagtatgaaaggactgataaacatttggattgtacacttaaaacgggtgaatggggtggggtgcgaattatagctcactaaaactgcttcagaagacaagatgaggaggcagcactagggccagatggcagaggagcttataagtcatccctcagaggcggaacttcatcctgatgatggcagcaggaagcctttgtagggactggtgtgaagggatttgctgctgggcaaggaatggaatggaggggcagaagtgggtatggagagcactggagtgagagtgagatggtaatgcggtcagaggagaaggcgcagcattgaagtcatgtccatgattagctcctgctttctcacactcactgtgttgctttgcagaagacagtttc

SEQ ID NO: 414949 - DNA, 366 bp, Homo sapiens
ccacaagctgtcggctcggttcggtcgcgttacagggcaggcgccggggccaaggcagggagggatcttaggagagatcgtaggacatctgaagagctgccatgtctggggcatcttcctcagaacagaacaacaacagctatgaaaccaaaaccccaaatcttcgaatgtcagagaagaaatgttgtgagttctggcagagaggagggactgctctctctcagcattttatcttgggaatatagttataatcctggactctgctgcttggtgggagtgataaataattatttgacatggaaatttaatgcaaagtctccagggtagaatgtcctgtcttccagcagtttcttactgctttcttaa

SEQ ID NO: 414950 - DNA, 3270 bp, Homo sapiens
ggataccataggcagcttctaaaggctgcttacctagattcttctcaaaattgtgtccaagatgttaagtaacctgctattcctgtttagtggttacataacatgtacttagtgtctttgtggagctttgggctggtaggggcagggataggggaaagctaaacagaagtagaagaaaaggtccttgtccagaggaaggttattttaagagacaggacatgtaatttataacaaatggacatttgcaatatagcaacagtctgagtctagaagtgttcaaccatcacatcgcttctcctgacttttctgttgtcctatggctatgagactacaggggttgggggatggggatgcccccaccaccaccagtgtgagaatgagatatggttggggaggcgtgtttggcacttttacaaggttgcattgtccacatttgcttggatggtggcatctgtagcccaaatgggcattcagtcttttcttctgctgtgaggtaagagtaattcagacctaatgaatgagaagagggagcactttgatccacagactttggattaacactgtacccactcttagcaaaaggggacttctctaacaagctagcattgtgttaacctgtcattaacccagcattagagacaggtcactgggatgttcattctggctctcagcctgctgttatttccccactctcacctgtgctagttcgctttctccagaagaggagctgaggtggtcttatcctcagataggacatgagaaattggaatttggcaagcaagggcttcagcatcctttagtttctaaagcaagatcccttcagagaagtctagcaggaagaagccaggagaatgtagaatggaaaagagctcttactccaaattttagagaagtttcagctctacttctcatcttttctctcctggtcttacttgaatgcatgttggtaatctgtatacattactatgactgtgtctatcacaagtcctacaaaataaaaatggacttaaaagtactctctgctgaggctgtaagttttgttttgtgagaaataggtaaagacattagcatttaatctactggaataagctggttgctgtggcttatacctgtagtcccagatacttgggaggctgaggcaggagaatcacttgagaccagcctgggcaatatagtgagacctcacctctaaaaaagttttttataaatttacttgtctaaagtggggaaagggaaattattctgttttcttattcttgcttcaagactatgacagatttgaaagagaattctaaagcagatttagagaacctgcttctcttcttatctcctaatccctaaattgtaatttagctcttatctgtattgttgtgttgtttggtaaagggatgatttttacattgagttttaaagtagaataagaaaagcttctaaaaacttgcattgtgctagggatctgccctatatctttgcctctggtgtttcgttgttgttgttattgtttgtttgtttccaaagaagttggagttaaggacacaatatatttgtacccctagactgaatgggtgagtattccatatgaggatctgggtaatcctctttgcaacccacatttggtcttcagagacactggcattttgaagaaacatatgatatagctgtttggaaataaattcatctatgttactttttttttctttttttttttttttatgagcaggagatcttaattgacagaaactcattggtggttggagtggccaatgggcacgggaaaaagtatccagtaatcagaagaattgtatctgggttatgtaatcttatgcacattccattgtctttgccaagcccagaagccatgttgtgttcattgttaagaaatttgatagatttacccagcttttctatgtattttgacttattgaaaatatgtaacaactgagtcgggttgcagcactggtggggtagaatcgactttccctgaaggtgacacagatgtcagaattgtgtccagggatttaatttagacccatactgtccaggagactgtctctagttggatctctgtgctgactgactgacagacagactttagtgtctgtgtgctgactgacagactctagtagtgtctatatgttgaccaactggtagaccaggaggatctgtgtgctgattgactctagtaggatctgtttgtcactgacagactgtagtagtgtctgtgtgctgactgatagatagactatagtaaaatttgggtgttgcctgactaacggtctagggtctgtaagctgacagtctgcctgctttctgattgtatccattgaagtgtatgtacattatggtaattctctgtctattaaatgtgtctaacaaaggaaggaattaagcactccacatgttttctttataggggagttctgtacactatgattttaaatagatatttcttatatagtagtggccaaattctcattattttgtacaagataaaggttatgcatcacttttatggtattttgtgaactcagctaagggaatgcctgttcagagcctggagttgttacctttacttgaagtcatctcatccagtcccctgctttagggcaggacttcagttccactgttcatttctgaagcttctgtgtccccagcttaccctgttctgaaatgttgtattccattggacagggctgctatttttagtcagccatgcatttggattttacacttaatctagtaagtaaaaatgagaagaaaatttggcatttaaaaattgattttaagggttggcaaaagtattttttccagtaagcctttcactggatatctgtgaccaatgtttacctacgcaatgtttttgtatctgaattgcttatgtacgttttttattatattgacctaacaagaagatcaacttatgctggtatggtgatggttttgctatggcaaaatcaaagggctgatcatacatggtgccctttgggaagggggatggtgtggggctgagcacctctgggttgaatgggaatgggtcagattgggaagcctaggaagagagttctactgtagatttcctaggcactgctctgttgaaataggaacataagtctttagcaacattctgatttaatcgggtgacactgataacaaagtatgccactcagatccatttaaagtgtgcataactgtatttgaaatgtgtttttgtgtgcgtgtgtgtagaatgggtaaataaaattgttgagtaacttgaacctaaaaaaaaac

SEQ ID NO: 414951 - DNA, 2813 bp, Homo sapiens
ggctcaagggccagtgtcatgctgacactcctggcagcatcaggacagtggttgaatattcccagcctgccacgctgcctactaggagggtggtatcttaggagcagcagttgtttctggatgagctaccatacttgagatgccctctccataccatcttcaaacttactcctgtggcctatgggtgcaaagtggaaacaattaaacttaacgtggaggctgtgaacacgcaccgtgacaagccaactttcgctttctccagaagaggagctgaggtggtcttatcctcagataggacatgagaaattggaatttggcaagcaagggcttcagcatcctttagtttctaaagcaagatcccttcagagaagtctagcaggaagaagccaggagaatgtagaatggaaaagagctcttactccaaattttagagaagtttcagctctacttctcatcttttctctcctggtcttacttgaatgcatgttggtaatctgtatacattactatgactgtgtctatcacaagtcctacaaaataaaaatggacttaaaagtactctctgctgaggctgtaagttttgttttgtgagaaataggtaaagacattagcatttaatctactggaataagctggttgctgtggcttatacctgtagtcccagatacttgggaggctgaggcaggagaatcacttgagaccagcctgggcaatatagtgagacctcacctctaaaaaagttttttataaatttacttgtctaaagtggggaaagggaaattattctgttttcttattcttgcttcaagactatgacagatttgaaagagaattctaaagcagatttagagaacctgcttctcttcttatctcctaatccctaaattgtaatttagctcttatctgtattgttgtgttgtttggtaaagggatgatttttacattgagttttaaagtagaataagaaaagcttctaaaaacttgcattgtgctagggatctgccctatatctttgcctctggtgtttcgttgttgttgttattgtttgtttgtttccaaagaagttggagttaaggacacaatatatttgtacccctagactgaatgggtgagtattccatatgaggatctgggtaatcctctttgcaacccacatttggtcttcagagacactggcattttgaagaaacatatgatatagctgtttggaaataaattcatctatgttactttttttttctttttttttttttttatgagcaggagatcttaattgacagaaactcattggtggttggagtggccaatgggcacgggaaaaagtatccagtaatcagaagaattgtatctgggttatgtaatcttatgcacattccattgtctttgccaagcccagaagccatgttgtgttcattgttaagaaatttgatagatttacccagcttttctatgtattttgacttattgaaaatatgtaacaactgagtcgggttgcagcactggtggggtagaatcgactttccctgaaggtgacacagatgtcagaattgtgtccagggatttaatttagacccatactgtccaggagactgtctctagttggatctctgtgctgactgactgacagacagactttagtgtctgtgtgctgactgacagactctagtagtgtctatatgttgaccaactggtagaccaggaggatctgtgtgctgattgactctagtaggatctgtttgtcactgacagactgtagtagtgtctgtgtgctgactgatagatagactatagtaaaatttgggtgttgcctgactaacggtctagggtctgtaagctgacagtctgcctgctttctgattgtatccattgaagtgtatgtacattatggtaattctctgtctattaaatgtgtctaacaaaggaaggaattaagcactccacatgttttctttataggggagttctgtacactatgattttaaatagatatttcttatatagtagtggccaaattctcattattttgtacaagataaaggttatgcatcacttttatggtattttgtgaactcagctaagggaatgcctgttcagagcctggagttgttacctttacttgaagtcatctcatccagtcccctgctttagggcaggacttcagttccactgttcatttctgaagcttctgtgtccccagcttaccctgttctgaaatgttgtattccattggacagggctgctatttttagtcagccatgcatttggattttacacttaatctagtaagtaaaaatgagaagaaaatttggcatttaaaaattgattttaagggttggcaaaagtattttttccagtaagcctttcactggatatctgtgaccaatgtttacctacgcaatgtttttgtatctgaattgcttatgtacgttttttattatattgacctaacaagaagatcaacttatgctggtatggtgatggttttgctatggcaaaatcaaagggctgatcatacatggtgccctttgggaagggggatggtgtggggctgagcacctctgggttgaatgggaatgggtcagattgggaagcctaggaagagagttctactgtagatttcctaggcactgctctgttgaaataggaacataagtctttagcaacattctgatttaatcgggtgacactgataacaaagtatgccactcagatccatttaaagtgtgcataactgtatttgaaatgtgtttttgtgtgcgtgtgtgtagaatgggtaaataaaattgttgagtaacttgaacctaaaaaaaaac

SEQ ID NO: 414952 - DNA, 3266 bp, Homo sapiens
  misc_feature (3213)..(3213): n is a, c, g, or t
ggataccataggcagcttctaaaggctgcttacctagattcttctcaaaattgtgtccaagatgttaagtaacctgctattcctgtttagtggttacataacatgtacttagtgtctttgtggagctttgggctggtaggggcagggataggggaaagctaaacagaagtagaagaaaaggtccttgtccagaggaaggttattttaagagacaggacatgtaatttataacaaatggacatttgcaatatagcaacagtctgagtctagaagtgttcaaccatcacatcgcttctcctgacttttctgttgtcctatggctatgagactacaggggttgggggatggggatgcccccaccaccaccagtgtgagaatgagatatggttggggaggcgtgtttggcacttttacaaggttgcattgtccacatttgcttggatggtggcatctgtagcccaaatgggcattcagtcttttcttctgctgtgaggtaagagtaattcagacctaatgaatgagaagagggagcactttgatccacagactttggattaacactgtacccactcttagcaaaaggggacttctctaacaagctagcattgtgttaacctgtcattaacccagcattagagacaggtcactgggatgttcattctggctctcagcctgctgttatttccccactctcacctgtgctagttcgctttctccagaagaggagctgaggtggtcttatcctcagataggacatgagaaattggaatttggcaagcaagggcttcagcatcctttagtttctaaagcaagatcccttcagagaagtctagcaggaagaagccaggagaatgtagaatggaaaagagctcttactccaaattttagagaagtttcagctctacttctcatcttttctctcctggtcttacttgaatgcatgttggtaatctgtatacattactatgactgtgtctatcacaagtcctacaaaataaaaatggacttaaaagtactctctgctgaggctgtaagttttgttttgtgagaaataggtaaagacattagcatttaatctactggaataagctggttgctgtggcttatacctgtagtcccagatacttgggaggctgaggcaggagaatcacttgagaccagcctgggcaatatagtgagacctcacctctaaaaaagttttttataaatttacttgtctaaagtggggaaagggaaattattctgttttcttattcttgcttcaagactatgacagatttgaaagagaattctaaagcagatttagagaacctgcttctcttcttatctcctaatccctaaattgtaatttagctcttatctgtattgttgtgttgtttggtaaagggatgatttttacattgagttttaaagtagaataagaaaagcttctaaaaacttgcattgtgctagggatctgccctatatctttgcctctggtgtttcgttgttgttgttattgtttgtttgtttccaaagaagttggagttaaggacacaatatatttgtacccctagactgaatgggtgagtattccatatgaggatctgggtaatcctctttgcaacccacatttggtcttcagagacactggcattttgaagaaacatatgatatagctgtttggaaataaattcatctatgttactttttttttctttttttttttttttatgagcaggagatcttaattgacagaaactcattggtggttggagtggccaatgggcacgggaaaaagtatccagtaatcagaagaattgtatctgggttatgtaatcttatgcacattccattgtctttgccaagcccagaagccatgttgtgttcattgttaagaaatttgatagatttacccagcttttctatgtattttgacttattgaaaatatgtaacaactgagtcgggttgcagcactggtggggtagaatcgactttccctgaaggtgacacagatgtcagaattgtgtccagggatttaatttagacccatactgtccaggagactgtctctagttggatctctgtgctgactgactgacagacagactttagtgtctgtgtgctgactgacagactctagtagtgtctatatgttgaccaactggtagaccaggaggatctgtgtgctgattgactctagtaggatctgtttgtcactgacagactgtagtagtgtctgtgtgctgactgatagatagactatagtaaaatttgggtgttgcctgactaacggtctagggtctgtaagctgacagtctgcctgctttctgattgtatccattgaagtgtatgtacattatggtaattctctgtctattaaatgtgtctaacaaaggaaggaattaagcactccacatgttttctttataggggagttctgtacactatgattttaaatagatatttcttatatagtagtggccaaattctcattattttgtacaagataaaggttatgcatcacttttatggtattttgtgaactcagctaagggaatgcctgttcagagcctggagttgttacctttacttgaagtcatctcatccagtcccctgctttagggcaggacttcagttccactgttcatttctgaagcttctgtgtccccagcttaccctgttctgaaatgttgtattccattggacagggctgctatttttagtcagccatgcatttggattttacacttaatctagtaagtaaaaatgagaagaaaatttggcatttaaaaattgattttaagggttggcaaaagtattttttccagtaagcctttcactggatatctgtgaccaatgtttacctacgcaatgtttttgtatctgaattgcttatgtacgttttttattatattgacctaacaagaagatcaacttatgctggtatggtgatggttttgctatggcaaaatcaaagggctgatcatacatggtgccctttgggaagggggatggtgtggggctgagcacctctgggttgaatgggaatgggtcagattgggaagcctaggaagagagttctactgtagatttcctaggcactgctctgttgaaataggaacataagtctttagcaccctcctctttttcccgccgcccccctattccccctctcccccccccctcccccctccgctcccccccccccctcacctctccctctccccccnctctccctgtgtgtagaatgggtaaataaaattgttgagtaacttgaaaaaac

SEQ ID NO: 414953 - DNA, 1188 bp, Homo sapiens
ccacaagctgtcggctcggttcggtcgcgttacagggcaggcgccggggccaaggcagggagggatcttaggagagatcgtaggacatctgaagagctgccatgtctggggcatcttcctcagaacagaacaacaacagctatgaaaccaaaaccccaaatcttcgaatgtcagagaagaaatgttcatgggcctcctacatgaccaactccccgactctgatcgttatgattggtttgccagcccggggtaaaacctacgtgtccaagaaactaacacgctacctcaactggattggagtccccaccaaagtgtttaatcttggggtgtatcggcgtgaagcagtcaagtcctataagtcctacgacttctttcggcatgacaatgaggaggccatgaagatccgcaaacagtgtgctctggtggcgctggaagatgttaaggcgtatctcactgaggagaatggtcagattgcggtgtttgatgccaccaatacaacccgggagaggagggacatgattttgaactttgctgaacagaattccttcaaggtattctttgtggaatccgtctgtgatgatcctgatgtcattgctgccaatattctggttggtgacacccctacatatcatctcctcttcaccttttgtgctgtgtgtgttgtggggtgtgtgtgtgtgtgtgtgtgtgtgtgttgttggggaggggtgttttcgtaatgaaagagagaaatagacatgtttaacatcacaaagagatcttttctatctgccagagccccatctggtacttctacactcttctcttgggagaggaaactgaggctttaaggaatcaagtaagaattagctgttgaattgaaaccagggtttaggttgtaggattcttggccctgtgctctaggtattatctggatgttgagacctagatgttggaatagatcagccgggcacggtggctcatgcttgtaggctcagcactttgggaggccgaggcaagtggattgcttgaacccagaaggatcaccttagcctgggaggttgaggccacagtgagccgtgattgtgccactgcagtccagtcttggtgacagagtgagaacatgtccagggaggttgaggctgcagtgagccatgattgtgccactgcagtccagtcttggtaacagagtgagaacatgtctcaaaa

SEQ ID NO: 414954 - DNA, 435 bp, Homo sapiens
tggtgtgacagggcttggtttcatctcagtaaatatcttaaggggaagttaaatggaagttatctgatgggcaagtgaccttgggcttgggtggtcagaagaacagggctcagggtgattgatacctgtgtgcttgtaggagaagtctaaagagggctaagatctgtgcattggggcaggggcaggaaggggttataggatggtgtgaaaaccctcagtgagaaagttgaaagatctagttagagaaaggttttgaacagtgggaaactaagtgggcagggatgtgacttctgtagccacccgaatgtttgtgtctctgactgtttgagcttagctctccttgctggtttcatttgctcttatggcagacagtgtgctctggtggcgctggaagatgttaaggcgtatctcactgaggagaatggtcagattgcg

SEQ ID NO: 414955 - DNA, 575 bp, Homo sapiens
gtcacaggacggggcggggcggggcggggggtactcaatgagtggagtgccaatgttccagtgaaaggcgacatttatggacttctttttcttttttttagcagtggctatttgtaggaggactgttacgggcagacctctgatgaggcctttactggttcctatgatttcaggaggttaaggtatcaagccctgactatcctgaaaggaacagagagaacgtgatggaggacttcctgaagagaattgaatgctacaaagttacctaccgacctcttgacccagacaactatgacaagtaaggtttaaggccatggtttgaagggcccaaggcaaaggtctcatctgggaaaataacctttctccctgagttctctaacttccttctgataatctagatctacagtgttaacatcatcccagagaaataaggtatggatttgtggcttttatgtggattgcatcttgtacatgaaaaattgaagtggttggttttgttttgttttgagacagggtctcactctgtcacccaggctggagtgcagtggcaaaatcagggcccactgcaactgctg

SEQ ID NO: 414956 - DNA, 3523 bp, Homo sapiens
  misc_feature (2318)..(2318): n is a, c, g, or t
ccacaagctgtcggctcggttcggtcgcgttacagggcaggcgccggggccaaggcagggagggatcttaggagagatcgtaggacatctgaagagctgccatgtctggggcatcttcctcagaacagaacaacaacagctatgaaaccaaaaccccaaatcttcgaatgtcagagaagaaatgttcatgggcctcctacatgaccaactccccgactctgatcgttatgattggtttgccagcccggggtaaaacctacgtgtccaagaaactaacacgctacctcaactggattggagtccccaccaaagtgtttaatcttggggtgtatcggcgtgaagcagtcaagtcctataagtcctacgacttctttcggcatgacaatgaggaggccatgaagatccgcaaacagtgtgctctggtggcgctggaagatgttaaggcgtatctcactgaggagaatggtcagattgcggtgtttgatgccaccaatacaacccgggagaggagggacatgattttgaactttgctgaacagaattccttcaaggtattctttgtggaatccgtctgtgatgatcctgatgtcattgctgccaatattctggaggttaaggtatcaagccctgactatcctgaaaggaacagagagaacgtgatggaggacttcctgaagagaattgaatgctacaaagttacctaccgacctcttgacccagacaactatgacaaggatctttctttcatcaaggtgataaacgtgggccagcgatttttagtcaacagagtccaggactacatccagagcaagatagtctactacctcatgaatatccacgtccagcctcgcaccatttacctttgccggcatggagaaagcgagttcaatctcttggggaagattgggggtgactctggcctctcggtgcggggaaagcagtttgcccaagctctaaggaaatttctggaggaacaggaaataacagacctcaaagtgtggacaagccagttgaagaggaccatacagactgctgaatctctcggggtgccctatgagcagtggaagattctgaatgagattgatgctggtgtgtgtgaagagatgacctatgcagagattgagaaacggtacccagaagagtttgcacttcgagatcaagagaagtatctgtatcgatatcctggtggggagtcataccaggacctggtgcagcggctggagcctgtcatcatggagctggaacgtcagggcaatgtcctcgtcatctcccaccaggctgtcatgcgctgcctcctggcctacttcttggataagggcgcagatgagctaccatacttgagatgccctctccataccatcttcaaacttactcctgtggcctatgggtgcaaagtggaaacaattaaacttaacgtggaggctgtgaacacgcaccgtgacaagccaactgcagcagagaccacactggctgtgcgcagacgcccctccgcagcgtccctcatgttgccttgctaatgatgtggatgttcaggcctcacctctccaaacgactgggatctactgaaaagcttgggatgtcagcttcacagaggctagaacaggaagttaagtgggaactggactttgggggccaccaaaacgaggcctggagaaacgtcaccatatttcctcccctcctgcctaatgggaatatcagttacactgaaaaatttaacttccctgtgcctcaaaacatttagcaacctgaaccagtgactttttgtcatctctgtgctgagtttggtccaagttggtcaatctcattctgtataggcatttaacatcctacctgtgactgtctgcatcctttgctggctcttttttgcccaaagtgcaaatgcacttcttcagatttacttttcaagtgagaaggtaagagctggtctctgccactgttccaggcgagcaggctagagtctaatatacttatgctagcagttaccatttgccacattggaagcaagagacaaatcaccaggtgaatggagggtcttctgagaaattcagtccctaaaacatcttctctgccttgatagaagaacagtgtcagtggcaaccttttcatttagagaagtttttcttgttccaggcccttcaggacaggatctgactgcaagactccccaaaatgggtacccatcttttaagttcccttttgtagctactgtacttttgacttgatgcatgtgcctctcatgcatcaagatggggctgatgtggttctcctgggtggttgggaatgtggactagacagaaaagtagagtgccatttatatcncgtgagtaagtcaagaaagctccttgagaatcagcccgatcagggagtgttttggcttcagaacaggtggaaggagacacgcccctctgtgggctctgtcaccatgatacagtccttgagagagctgtggctgtgacttggagggcagtagtctcctgatacctgcctcttggccactggtcactattgtggtcactgatctctcatataaaagtgagggtggcggggtcatggaccagcgcctcagtgcattagtcattcgcttttccttacagacaaatcagataactcttccccagtgattgtcaaatgtatgaatgtatctctgtaaatgtggttttgacatgtcactgttactgaaggagagtatggaatccccacaggatattatatcttgcaaggaaagtctatttttttaaagaatagtatgtttttagctttacttttctttcttttccttttcactcaaatgctcacttgctgggcaaaagggtgagtagcaagaaaagtaatgatatgtagcttttctcaaatggttcttttatactgtggatgatacaggactctgttacctaagatgtgataagctgggctgcaggcggttcagcatccagcaactaggagctgcttttctacgtacaaagctgccttcaggaaggctccttaccctgtagcagatgattttcatctggctgcctaccgcatgctgtactataatgatttagttgtgatatggatttctctctgcatcgaaaactgtcttttgatgatcagacaatgtttatatttagttatttattctatccatgtaaggcatttttgagttttcttgtcactgtttgcatgtatttaatcagaatgtaatataatttatgttgtcaggtttttttttgtttgtttgtttggggttttttttgtagaaatttaggtagttagagcttttaagtctaatgtcatattaacttaagttaaatttccagaacgtagatatctgtcttctgtaaaaggaaaataacgatgttaagggacagtgaattttttttgaatactttgtttctcattgatttttattgtaagtgtaaaccaagagatgcatttctctggagaagtgtttatctcctggattaataaaatcatgctaaaatatgcgagtaatatgtattgcttttgtaataagaacataaaataaaattatttttaattaa

SEQ ID NO: 414957 - DNA, 2157 bp, Homo sapiens
ccacaagctgtcggctcggttcggtcgcgttacagggcaggcgccggggccaaggcagggagggatcttaggagagatcgtaggacatctgaagagctgccatgtctggggcatcttcctcagaacagaacaacaacagctatgaaaccaaaaccccaaatcttcgaatgtcagagaagaaatgttcatgggcctcctacatgaccaactccccgactctgatcgttatgattggtttgccagcccggggtaaaacctacgtgtccaagaaactaacacgctacctcaactggattggagtccccaccaaagtgtttaatcttggggtgtatcggcgtgaagcagtcaagtcctataagtcctacgacttctttcggcatgacaatgaggaggccatgaagatccgcaaacagtgtgctctggtggcgctggaagatgttaaggcgtatctcactgaggagaatggtcagattgcggtgtttgatgccaccaatacaacccgggagaggagggacatgattttgaactttgctgaacagaattccttcaaggtattctttgtggaatccgtctgtgatgatcctgatgtcattgctgccaatattctggaggttaaggtatcaagccctgactatcctgaaaggaacagagagaacgtgatggaggacttcctgaagagaattgaatgctacaaagttacctaccgacctcttgacccagacaactatgacaaggatctttctttcatcaaggtgataaacgtgggccagcgatttttagtcaacagagtccaggactacatccagagcaagatagtctactacctcatgaatatccacgtccagcctcgcaccatttacctttgccggcatggagaaagcgagttcaatctcttggggaagattgggggtgactctggcctctcggtgcggggaaagcagtttgcccaagctctaaggaaatttctggaggaacaggaaataacagacctcaaagtgtggacaagccagttgaagaggaccatacagactgctgaatctctcggggtgccctatgagcagtggaagattctgaatgagattgatgctggtgtgtgtgaagagatgacctatgcagagattgagaaacggtacccagaagagtttgcacttcgagatcaagagaagtatctgtatcgatatcctggtggggagtcataccaggacctggtgcagcggctggagcctgtcatcatggagctggaacgtcagggcaatgtcctcgtcatctcccaccaggctgtcatgcgctgcctcctggcctacttcttggataagggcgcagatgagctaccatacttgagatgccctctccataccatcttcaaacttactcctgtggcctatgggtgcaaagtggaaacaattaaacttaacgtggaggctgtgaacacgcaccgtgacaagccaactaacaacttccccaagaaccaaacccctgtaaggatgagaaggaacagctttacgcctctgtccagttcgaatacaataaggcgtccaagaaattacagtgttgggagccggcccctcaagcccctcagccctctccgtgcccaggacatgcaagaaggggccgactagccgaagacccaagtcagcattccggtggtgtaactgtgtgtttccctccagccctggcctcctgcccttgtcactaatcaccaaggagtcattaacttcctccctctatgcccacccctgacacttcaccatttatcttaacacagaacatgaggttatgtgtagcaaattgagtcttttaggacagattctcagatgggatgatctggaggaggaggaaaaagatacacgcccttggggctgagcatgccccacactcttggatcttctctctgttccctggtgtcttcactaatgtcctcatgttggtgaagtgttgggggatggagggcgggtgagcagtcgggggacaaaaagtctatttttccttcacttttgtctcttcaatgtgtgttttcctcacactccttacttgactgctttcttcccccactttcatgtcccctctggattgtccagtgtaatgcatggcattgtggtgtctgtctaggaaggaaggggtgattgacaagagacaagtctggcccagttaatgctg

SEQ ID NO: 414958 - DNA, 2216 bp, Homo sapiens
ccacaagctgtcggctcggttcggtcgcgttacagggcaggcgccggggccaaggcagggagggatcttaggagagatcgtaggacatctgaagagctgccatgtctggggcatcttcctcagaacagaacaacaacagctatgaaaccaaaaccccaaatcttcgaatgtcagagaagaaatgttcatgggcctcctacatgaccaactccccgactctgatcgttatgattggtttgccagcccggggtaaaacctacgtgtccaagaaactaacacgctacctcaactggattggagtccccaccaaagtgtttaatcttggggtgtatcggcgtgaagcagtcaagtcctataagtcctacgacttctttcggcatgacaatgaggaggccatgaagatccgcaaacagtgtgctctggtggcgctggaagatgttaaggcgtatctcactgaggagaatggtcagattgcggtgtttgatgccaccaatacaacccgggagaggagggacatgattttgaactttgctgaacagaattccttcaaggtattctttgtggaatccgtctgtgatgatcctgatgtcattgctgccaatattctggaggttaaggtatcaagccctgactatcctgaaaggaacagagagaacgtgatggaggacttcctgaagagaattgaatgctacaaagttacctaccgacctcttgacccagacaactatgacaaggatctttctttcatcaaggtgataaacgtgggccagcgatttttagtcaacagagtccaggactacatccagagcaagatagtctactacctcatgaatatccacgtccagcctcgcaccatttacctttgccggcatggagaaagcgagttcaatctcttggggaagattgggggtgactctggcctctcggtgcggggaaagcagtttgcccaagctctaaggaaatttctggaggaacaggaaataacagacctcaaagtgtggacaagccagttgaagaggaccatacagactgctgaatctctcggggtgccctatgagcagtggaagattctgaatgagattgatgctggtgtgtgtgaagagatgacctatgcagagattgagaaacggtacccagaagagtttgcacttcgagatcaagagaagtatctgtatcgatatcctggtggggagtcataccaggacctggtgcagcggctggagcctgtcatcatggagctggaacgtcagggcaatgtcctcgtcatctcccaccaggctgtcatgcgctgcctcctggcctacttcttggataagggcgcagatgagctaccatacttgagatgccctctccataccatcttcaaacttactcctgtggcctatgggtgcaaagtggaaacaattaaacttaacgtggaggctgtgaacacgcaccgtgacaagccaactaacaacttccccaagaaccaaacccctgtaaggatgagaaggaacagctttacgcctctgtccagttcgaatacaataaggcgtccaagaaattacagtgttgggagccggcccctcaagcccctcagccctctccgtgcccaggacatgcaagaaggggccgactagccgaagacccaagtcagcattccggtggtgtaactgtgtgtttccctccagccctggcctcctgcccttgtcactaatcaccaaggagtcattaacttcctccctctatgcccacccctgacacttcaccatttatcttaacacagaacatgaggttatgtgtttataggacaacttaagctgttcttcagtttgaaacatcttttcacccaggggcaaggtagcaaattgagtcttttaggacagattctcagatgggatgatctggaggaggaggaaaaagatacacgcccttggggctgagcatgccccacactcttggatcttctctctgttccctggtgtcttcactaatgtcctcatgttggtgaagtgttgggggatggagggcgggtgagcagtcgggggacaaaaagtctatttttccttcacttttgtctcttcaatgtgtgttttcctcacactccttacttgactgctttcttcccccactttcatgtcccctctggattgtccagtgtaatgcatggcattgtggtgtctgtctaggaaggaaggggtgattgacaagagacaagtctggcccagttaatgctg

SEQ ID NO: 414959 - DNA, 2774 bp, Homo sapiens
atgccgggagtggttgtgtacggtccgcagcggcaggtgaagcctagcagaggacgcggccaggcgattcggtgaagcgattcctgcaggcgttggttcccctctttgacctggatttgaatttgttgaaatgagcagtcgtaaatcaaagagtaacagcttaattcacacagagtgcctttcacaggtacaaagaattttacgtgaaagattttgtcgtcagagtccacatagtaacctatttggagtgcaagtacaatacaaacacttaagtgagctgctgaaaagaactgctctccatggagagagtaactctgtccttattatcggaccccgaggatcaggaaaaactatgttaataagtcatgctttgaaagaactcatggaaatagaagaagtgagtgaaaatgtattacaagttcacttaaatggactgctgcagatcaatgacaaaatcgccctaaaggaaatcacaaggcagttaaatctggaaaatgtagttggagataaagtttttggaagctttgctgaaaacctttcatttcttctggaagctttaaaaaaaggtgaccgaactagcagttgcccagtgatcttcatattagatgaatttgatctttttgctcatcataaaaaccaaacacttctctataatctttttgacatttctcagtctgcacagaccccaatagcagttattggtcttacatgtagattggatattttggaactcttagaaaaaagagtgaagtcaagattttctcaccggcagatacacttaatgaattcatttggttttccacagtatgttaaaatatttaaagaacagttatctctacctgcagagtttccagacaaggtttttgctgagaagtggaatgaaaatgttcagtatctctcagaagatagaagtgtgcaagaagtactacagaagcatttcaatatcagcaaaaacctgcggtcattacacatgctattgatgcttgctttaaatcgagtaacagcatcgcacccatttatgactgccgtagatctaatggaagcaagccaactgtgtagcatggactcgaaagcaaatattgtacatggtctatcagtcttggaaatctgtcttataatagcaatgaaacatttaaatgacatctatgaggaagagccatttaattttcaaatggtctataatgagtttcagaagtttgttcaaaggaaagcacattccgtttataattttgaaaaacctgttgtcatgaaggcttttgaacacttgcagcaattagaattaataaagcccatggaaagaacttcaggaaattcacagagagagtaccagctgatgaaactgcttttggataatactcaaattatgaatgctctgcagaaatatcccaactgtcctacagatgtgaggcagtgggcaacatcctcactaagctggttatgaatataaccagtgacttcaactttggcatttcattcatacttctgtagagaacggaaaactattgtccattaacatgatatgctaaacattctataaacattcttgtatttatgtgagacttgcccatctactgtcttggctgtgtcttgccttttaatcatgaacagttacatgatttataatttcactgattgagattactttgtaagtagctgttcagaagaataaaatatgactgttttagggactagaccatgtgcttttttaacacttatatatataatggtctatttgaagagctcacttcaacctaacagctagatgtctttacaaaccttaaaccaaaggagtaaaaaaaacaatggtaagcactgaagtataataagtaacctttggtacagcaggtttgctgcagtgtttttttctgtccacatgcaaattttggattctatcccagacccaggttttctagttcagaagactaaccagcttagtcagaagatggttccatggaagaaaaaggccaaggagtttgaagatttttcttctagacatctcaaaatgtggtactcataccatccacatcagaatcccttgtaggattttctaaaattacagattgttgagcctaccataggtcaaaaggactggaattttccttcttaacaagtatagtcatggcaccacgtaacattttggtcaatgacattgtataaagggtggtctcataagattataccatatttttactgtaccttttctatgtctaaatatacaaatgttttaccattgtgttacagttgcctacagtatgattacagtaacattctgtacagtgctatagctgaagagtaataggctaggctatctgtatagcctaagtgtgtaacaggctatatacatatcatcagggtctgtgtaagtatactctgtgatgttcatacagtgatgaaatcacccaaagacacatttctcagaacgtagccccatcatgaagtgacgtgactaccagagatttctggaaaagcactcccaaaagtaatgagatgtgtatggcaatgttaactgaacctgtttgtattaaaaagtaaatccctatgaggaatgtggaaatgtccgtcaaagcattgtcttttaagtaagttccaagatccatgaattaacagaggcatatatttaaaatgaaatttaatgagcacttagtgacttcatttgttcaagaatatttgatttcctattgtgtgcatgggaggtttacaaaagacagactgtccctatgcttgtgcagcttacaatctatttaactattagaggccctgtgacctgtgaggca

SEQ ID NO: 414960 - DNA, 1688 bp, Homo sapiens
atgccgggagtggttgtgtacggtccgcagcggcaggtgaagcctagcagaggacgcggccaggcgattcggtgaagcgattcctgcaggcgttggttcccctctttgacctggatttgaatttgttgaaatgagcagtcgtaaatcaaagagtaacagcttaattcacacagagtgcctttcacaggtacaaagaattttacgtgaaagattttgtcgtcagagtccacatagtaacctatttggagtgcaagtacaatacaaacacttaagtgagctgctgaaaagaactgctctccatggagagagtaactctgtccttattatcggaccccgaggatcaggaaaaactatgttaataagtcatgctttgaaagaactcatggaaatagaagaagtgagtgaaaatgtattacaagttcacttaaatggactgctgcagatcaatgacaaaatcgccctaaaggaaatcacaaggcagttaaatctggaaaatgtagttggagataaagtttttggaagctttgctgaaaacctttcatttcttctggaagctttaaaaaaaggtgaccgaactagcagttgcccagtgatcttcatattagatgaatttgatctttttgctcatcataaaaaccaaacacttctctataatctttttgacatttctcagtctgcacagaccccaatagcagttattggtcttacatgtagattggatattttggaactcttagaaaaaagagtgaagtcaagattttctcaccggcagatacacttaatgaattcatttggttttccacagtatgttaaaatatttaaagaacagttatctctacctgcagagtttccagacaaggtttttgctgagaagtggaatgaaaatgttcagtatctctcagaagatagaagtgtgcaagaagtactacagaagcatttcaatatcagcaaaaacctgcggtcattacacatgctattgatgcttgctttaaatcgagtaacagcatcgcacccatttatgactgccgtagatctaatggaagcaagccaactgtgtagcatggactcgaaagcaaatattgtacatggtctatcagtcttggaaatctgtcttataatagcaatgaaacatttaaatgacatctatgaggaagagccatttaattttcaaatggtctataatgagtttcagaagtttgttcaaaggaaagcacattccgtttataattttgaaaaacctgttgtcatgaaggcttttgaacacttgcagcaattagaattaataaagcccatggaaagaacttcaggaaattcacagagagagtaccagctgatgaaactgcttttggataatactcaaattatgaatgctctgcagaaatatcccaactgtcctacagatgtgaggcagtgggcaacatcctcactaagctggttatgaatataaccagtgacttcaactttggcatttcattcatacttctgtagagaacggaaaactattgtccattaacatgatatgctaaacattctataaacattcttgtatttatgtgagacttgcccatctactgtcttggctgtgtcttgccttttaatcatgaacagttacatgatttataatttcactgattgagattactttgtaagtagctgttcagaagaataaaatatgactgttttaggga

SEQ ID NO: 414961 - DNA, 737 bp, Homo sapiens
atgccgggagtggttgtgtacggtccgcagcggcaggtgaagcctagcagaggacgcggccaggcgattcggtgaagcgattcctgcaggcgttggttcccctctttgacctggatttgaatttgttgaaatgagcagtcgtaaatcaaagagtaacagcttaattcacacagagtgcctttcacaggtacaaagaattttacgtgaaagattttgtcgtcagagtccacatagtaacctatttggagtgcaagtacaatacaaacacttaagtgagctgctgaaaagaactgctctccatggagagagtaactctgtccttattatcggaccccgaggatcaggaaaaactatgttaataagtcatgctttgaaagaactcatggaaatagaagaagtgagtgaaaatgtattacaagttcacttaaatggtaagtatgccattattttgccattggagattatgtaaactttgtggggtttttatatgacttgtatatttcaaatccattttaatagttagattttgaaaactagatccatgttttacttagcacaccatatgcagtatttttagaaattaaaataataataatgaaggagtcgcagaaggactctggtttttgtgggttttttggtttttttttttttaatcattctaatcccaaggaggattgttttttgattctaccgaatgtctttattgctaagttttaagaagaaagtgatatgaactc

SEQ ID NO: 414962 - DNA, 311 bp, Homo sapiens
atgccgggagtggttgtgtacggtccgcagcggcaggtgaagcctagcagaggacgcggccaggcgattcggtgaagcgattcctgcaggcgttggttcccctctttgacctggtaaatgcaggcttttatgcgagaggtaatggtgggggtaaacttgctgcaaacgaaggccaggggcgtcggtggcgcaaggtgaatcgaaagtgggaggatggaaggctgtggagattgggaattgggaagggggcagggactgcttcagtttctgtcgacgcggccgcgaatttagtagtagtagtaggcggccgc

SEQ ID NO: 414963 - DNA, 1767 bp, Homo sapiens
  misc_feature (1712)..(1712): n is a, c, g, or t
  misc_feature (1715)..(1715): n is a, c, g, or t
  misc_feature (1717)..(1717): n is a, c, g, or t
  misc_feature (1733)..(1733): n is a, c, g, or t
  misc_feature (1738)..(1739): n is a, c, g, or t
  misc_feature (1746)..(1746): n is a, c, g, or t
  misc_feature (1748)..(1748): n is a, c, g, or t
  misc_feature (1761)..(1761): n is a, c, g, or t
atgccgggagtggttgtgtacggtccgcagcggcaggtgaagcctagcagaggacgcggccaggcgattcggtgaagcgattcctgcaggcgttggttcccctctttgacctggatttgaatttgttgaaatgagcagtcgtaaatcaaagagtaacagcttaattcacacagagtgcctttcacaggtacaaagaattttacgtgaaagattttgtcgtcagagtccacatagtaacctatttggagtgcaagtacaatacaaacacttaagtgagctgctgaaaagaactgctctccatggagagagtaactctgtccttattatcggaccccgaggatcaggaaaaactatgttaataagtcatgctttgaaagaactcatggaaatagaagaagtgagtgaaaatgtattacaagttcacttaaatggactgctgcagatcaatgacaaaatcgccctaaaggaaatcacaaggcagttaaatctggaaaatgtagttggagataaagtttttggaagctttgctgaaaacctttcatttcttctggaagctttaaaaaaaggtgaccgaactagcagttgcccagtgatcttcatattagatgaatttgatctttttgctcatcataaaaaccaaacacttctctataatctttttgacatttctcagtctgcacagaccccaatagcagttattggtcttacatgtagattggatattttggaactcttagaaaaaagagtgaagtcaagattttctcaccggcagatacacttaatgaattcatttggttttccacagtatgttaaaatatttaaagaacagttatctctacctgcagagtttccagacaaggtttttgctgagaagtggaatgaaaatgttcagtatctctcagaagatagaagtgtgcaagaagtactacagaagcatttcaatatcagcaaaaacctgcggtcattacacatgctattgatgcttgctttaaatcgagtaacagcatcgcacccatttatgactgccgtagatctaatggaagcaagccaactgtgtagcatggactcgaaagcaaatattgtacatggtctatcagtcttggaaatctgtcttataatagcaatgaaacatttaaatgacatctatgaggaagagccatttaattttcaaatggtctataatgagtttcagaagtttgttcaaaggaaagcacattccgtttataattttgaaaaacctgttgtcatgaaggcttttgaacacttgcagcaattagaattaataaagcccatggaaagaacttcaggaaattcacagagagagtaccagctgatgaaactgcttttggataatactcaaattatgaatgctctgcagaaatatcccaactgtcctacagatgtgaggcagtgggcaacatcctcactaagctggttatgaatataaccagtgacttcaactttggcatttcattcatacttctgtagagaacggaaaactattgtccattaacatgatatgctaaacattctataaacattcttgtatttatgtgagacttgcccatctactgtcttggctgtgtcttgccttttaatcatgaacagttacatgatttataatttcactgattgagattactttgtaagtagctgttcagaagaataaaatatgactgttttagggaaaacaaaaaaaaaaaaaaaaaacnttntnggcgccccggccccanaaaannttttaanancattgtggggcgngggccc

SEQ ID NO: 414964 - DNA, 2908 bp, Homo sapiens
atgccgggagtggttgtgtacggtccgcagcggcaggtgaagcctagcagaggacgcggccaggcgattcggtgaagcgattcctgcaggcgttggttcccctctttgacctggatttgaatttgttgaaatgagcagtcgtaaatcaaagagtaacagcttaattcacacagagtgcctttcacaggtacaaagaattttacgtgaaagattttgtcgtcagagtccacatagtaacctatttggagtgcaagtacaatacaaacacttaagtgagctgctgaaaagaactgctctccatggagagagtaactctgtccttattatcggaccccgaggatcaggaaaaactatgttaataagtcatgctttgaaagaactcatggaaatagaagaagtgagtgaaaatgtattacaagttcacttaaatggactgctgcagatcaatgacaaaatcgccctaaaggaaatcacaaggcagttaaatctggaaaatgtagttggagataaagtttttggaagctttgctgaaaacctttcatttcttctggaagctttaaaaaaaggtgaccgaactagcagttgcccagtgatcttcatattagatgaatttgatctttttgctcatcataaaaaccaaacacttctctataatctttttgacatttctcagtctgcacagaccccaatagcagttattggtcttacatgtagattggatattttggaactcttagaaaaaagagtgaagtcaagattttctcaccggcagatacacttaatgaattcatttggttttccacagtatgttaaaatatttaaagaacagttatctctacctgcagagtttccagacaaggtttttgctgagaagtggaatgaaaatgttcagttttcattagcaacttcagcttttattttgttgggccttaagaggcagtacagactgtggcacctccagttatattatctaataggtgatcacatctcacagtccctggagacttgagagtcttagatacaaagtatctctcagaagatagaagtgtgcaagaagtactacagaagcatttcaatatcagcaaaaacctgcggtcattacacatgctattgatgcttgctttaaatcgagtaacagcatcgcacccatttatgactgccgtagatctaatggaagcaagccaactgtgtagcatggactcgaaagcaaatattgtacatggtctatcagtcttggaaatctgtcttataatagcaatgaaacatttaaatgacatctatgaggaagagccatttaattttcaaatggtctataatgagtttcagaagtttgttcaaaggaaagcacattccgtttataattttgaaaaacctgttgtcatgaaggcttttgaacacttgcagcaattagaattaataaagcccatggaaagaacttcaggaaattcacagagagagtaccagctgatgaaactgcttttggataatactcaaattatgaatgctctgcagaaatatcccaactgtcctacagatgtgaggcagtgggcaacatcctcactaagctggttatgaatataaccagtgacttcaactttggcatttcattcatacttctgtagagaacggaaaactattgtccattaacatgatatgctaaacattctataaacattcttgtatttatgtgagacttgcccatctactgtcttggctgtgtcttgccttttaatcatgaacagttacatgatttataatttcactgattgagattactttgtaagtagctgttcagaagaataaaatatgactgttttagggactagaccatgtgcttttttaacacttatatatataatggtctatttgaagagctcacttcaacctaacagctagatgtctttacaaaccttaaaccaaaggagtaaaaaaaacaatggtaagcactgaagtataataagtaacctttggtacagcaggtttgctgcagtgtttttttctgtccacatgcaaattttggattctatcccagacccaggttttctagttcagaagactaaccagcttagtcagaagatggttccatggaagaaaaaggccaaggagtttgaagatttttcttctagacatctcaaaatgtggtactcataccatccacatcagaatcccttgtaggattttctaaaattacagattgttgagcctaccataggtcaaaaggactggaattttccttcttaacaagtatagtcatggcaccacgtaacattttggtcaatgacattgtataaagggtggtctcataagattataccatatttttactgtaccttttctatgtctaaatatacaaatgttttaccattgtgttacagttgcctacagtatgattacagtaacattctgtacagtgctatagctgaagagtaataggctaggctatctgtatagcctaagtgtgtaacaggctatatacatatcatcagggtctgtgtaagtatactctgtgatgttcatacagtgatgaaatcacccaaagacacatttctcagaacgtagccccatcatgaagtgacgtgactaccagagatttctggaaaagcactcccaaaagtaatgagatgtgtatggcaatgttaactgaacctgtttgtattaaaaagtaaatccctatgaggaatgtggaaatgtccgtcaaagcattgtcttttaagtaagttccaagatccatgaattaacagaggcatatatttaaaatgaaatttaatgagcacttagtgacttcatttgttcaagaatatttgatttcctattgtgtgcatgggaggtttacaaaagacagactgtccctatgcttgtgcagcttacaatctatttaactattagaggccctgtgacctgtgaggca

SEQ ID NO: 414965 - DNA, 2799 bp, Homo sapiens
atgccgggagtggttgtgtacggtccgcagcggcaggtgaagcctagcagaggacgcggccaggcgattcggtgaagcgattcctgcaggcgttggttcccctctttgacctggtaaatgcaggcttttatgcgagaggatttgaatttgttgaaatgagcagtcgtaaatcaaagagtaacagcttaattcacacagagtgcctttcacaggtacaaagaattttacgtgaaagattttgtcgtcagagtccacatagtaacctatttggagtgcaagtacaatacaaacacttaagtgagctgctgaaaagaactgctctccatggagagagtaactctgtccttattatcggaccccgaggatcaggaaaaactatgttaataagtcatgctttgaaagaactcatggaaatagaagaagtgagtgaaaatgtattacaagttcacttaaatggactgctgcagatcaatgacaaaatcgccctaaaggaaatcacaaggcagttaaatctggaaaatgtagttggagataaagtttttggaagctttgctgaaaacctttcatttcttctggaagctttaaaaaaaggtgaccgaactagcagttgcccagtgatcttcatattagatgaatttgatctttttgctcatcataaaaaccaaacacttctctataatctttttgacatttctcagtctgcacagaccccaatagcagttattggtcttacatgtagattggatattttggaactcttagaaaaaagagtgaagtcaagattttctcaccggcagatacacttaatgaattcatttggttttccacagtatgttaaaatatttaaagaacagttatctctacctgcagagtttccagacaaggtttttgctgagaagtggaatgaaaatgttcagtatctctcagaagatagaagtgtgcaagaagtactacagaagcatttcaatatcagcaaaaacctgcggtcattacacatgctattgatgcttgctttaaatcgagtaacagcatcgcacccatttatgactgccgtagatctaatggaagcaagccaactgtgtagcatggactcgaaagcaaatattgtacatggtctatcagtcttggaaatctgtcttataatagcaatgaaacatttaaatgacatctatgaggaagagccatttaattttcaaatggtctataatgagtttcagaagtttgttcaaaggaaagcacattccgtttataattttgaaaaacctgttgtcatgaaggcttttgaacacttgcagcaattagaattaataaagcccatggaaagaacttcaggaaattcacagagagagtaccagctgatgaaactgcttttggataatactcaaattatgaatgctctgcagaaatatcccaactgtcctacagatgtgaggcagtgggcaacatcctcactaagctggttatgaatataaccagtgacttcaactttggcatttcattcatacttctgtagagaacggaaaactattgtccattaacatgatatgctaaacattctataaacattcttgtatttatgtgagacttgcccatctactgtcttggctgtgtcttgccttttaatcatgaacagttacatgatttataatttcactgattgagattactttgtaagtagctgttcagaagaataaaatatgactgttttagggactagaccatgtgcttttttaacacttatatatataatggtctatttgaagagctcacttcaacctaacagctagatgtctttacaaaccttaaaccaaaggagtaaaaaaaacaatggtaagcactgaagtataataagtaacctttggtacagcaggtttgctgcagtgtttttttctgtccacatgcaaattttggattctatcccagacccaggttttctagttcagaagactaaccagcttagtcagaagatggttccatggaagaaaaaggccaaggagtttgaagatttttcttctagacatctcaaaatgtggtactcataccatccacatcagaatcccttgtaggattttctaaaattacagattgttgagcctaccataggtcaaaaggactggaattttccttcttaacaagtatagtcatggcaccacgtaacattttggtcaatgacattgtataaagggtggtctcataagattataccatatttttactgtaccttttctatgtctaaatatacaaatgttttaccattgtgttacagttgcctacagtatgattacagtaacattctgtacagtgctatagctgaagagtaataggctaggctatctgtatagcctaagtgtgtaacaggctatatacatatcatcagggtctgtgtaagtatactctgtgatgttcatacagtgatgaaatcacccaaagacacatttctcagaacgtagccccatcatgaagtgacgtgactaccagagatttctggaaaagcactcccaaaagtaatgagatgtgtatggcaatgttaactgaacctgtttgtattaaaaagtaaatccctatgaggaatgtggaaatgtccgtcaaagcattgtcttttaagtaagttccaagatccatgaattaacagaggcatatatttaaaatgaaatttaatgagcacttagtgacttcatttgttcaagaatatttgatttcctattgtgtgcatgggaggtttacaaaagacagactgtccctatgcttgtgcagcttacaatctatttaactattagaggccctgtgacctgtgaggca

SEQ ID NO: 414966 - DNA, 2610 bp, Homo sapiens
atgccgggagtggttgtgtacggtccgcagcggcaggtgaagcctagcagaggacgcggccaggcgattcggtgaagcgattcctgcaggcgttggttcccctctttgacctggatttgaatttgttgaaatgagcagtcgtaaatcaaagagtaacagcttaattcacacagagtgcctttcacaggtacaaagaattttacgtgaaagattttgtcgtcagagtccacatagtaacctatttggagtgcaagtacaatacaaacacttaagtgagctgctgaaaagaactgctctccatggagagagtaactctgtccttattatcggaccccgaggatcaggaaaaactatgttaataagtcatgctttgaaagaactcatggaaatagaagaagtgagtgaaaatgtattacaagttcacttaaatggactgctgcagatcaatgacaaaatcgccctaaaggaaatcacaaggcagttaaatctggaaaatgtagttggagataaagtttttggaagctttgctgaaaacctttcatttcttctggaagctttaaaaaaaggtgaccgaactagcagttgcccagtgatcttcatattagatgaatttgatctttttgctcatcataaaaaccaaacacttctctataatctttttgacatttctcagtctgcacagaccccaatagcagttattggtcttacatgtagattggatattttggaactcttagaaaaaagagtgaagtcaagattttctcaccggcagatacacttaatgaattcatttggttttccacagtatgttaaaatatttaaagaacagttatctctacctgcagagtttccagacaaggtttttgctgagaagtggaatgaaaatgttcagtatctctcagaagatagaagtgtgcaagaagtactacagaagcatttcaatatcagcaaaaacctgcggtcattacacatgctattgatgcttgctttaaatcgagtaacagcatcgcacccatttatgactgccgtagatctaatggaagcaagccaactgtgtagcatggactcgaaagcaaatattgtacatggcttttgaacacttgcagcaattagaattaataaagcccatggaaagaacttcaggaaattcacagagagagtaccagctgatgaaactgcttttggataatactcaaattatgaatgctctgcagaaatatcccaactgtcctacagatgtgaggcagtgggcaacatcctcactaagctggttatgaatataaccagtgacttcaactttggcatttcattcatacttctgtagagaacggaaaactattgtccattaacatgatatgctaaacattctataaacattcttgtatttatgtgagacttgcccatctactgtcttggctgtgtcttgccttttaatcatgaacagttacatgatttataatttcactgattgagattactttgtaagtagctgttcagaagaataaaatatgactgttttagggactagaccatgtgcttttttaacacttatatatataatggtctatttgaagagctcacttcaacctaacagctagatgtctttacaaaccttaaaccaaaggagtaaaaaaaacaatggtaagcactgaagtataataagtaacctttggtacagcaggtttgctgcagtgtttttttctgtccacatgcaaattttggattctatcccagacccaggttttctagttcagaagactaaccagcttagtcagaagatggttccatggaagaaaaaggccaaggagtttgaagatttttcttctagacatctcaaaatgtggtactcataccatccacatcagaatcccttgtaggattttctaaaattacagattgttgagcctaccataggtcaaaaggactggaattttccttcttaacaagtatagtcatggcaccacgtaacattttggtcaatgacattgtataaagggtggtctcataagattataccatatttttactgtaccttttctatgtctaaatatacaaatgttttaccattgtgttacagttgcctacagtatgattacagtaacattctgtacagtgctatagctgaagagtaataggctaggctatctgtatagcctaagtgtgtaacaggctatatacatatcatcagggtctgtgtaagtatactctgtgatgttcatacagtgatgaaatcacccaaagacacatttctcagaacgtagccccatcatgaagtgacgtgactaccagagatttctggaaaagcactcccaaaagtaatgagatgtgtatggcaatgttaactgaacctgtttgtattaaaaagtaaatccctatgaggaatgtggaaatgtccgtcaaagcattgtcttttaagtaagttccaagatccatgaattaacagaggcatatatttaaaatgaaatttaatgagcacttagtgacttcatttgttcaagaatatttgatttcctattgtgtgcatgggaggtttacaaaagacagactgtccctatgcttgtgcagcttacaatctatttaactattagaggccctgtgacctgtgaggca

SEQ ID NO: 414967 - DNA, 2647 bp, Homo sapiens
atgccgggagtggttgtgtacggtccgcagcggcaggtgaagcctagcagaggacgcggccaggcgattcggtgaagcgattcctgcaggcgttggttcccctctttgacctggatttgaatttgttgaaatgagcagtcgtaaatcaaagagtaacagcttaattcacacagagtgcctttcacaggtacaaagaattttacgtgaaagattttgtcgtcagagtccacatagtaacctatttggagtgcaagtacaatacaaacacttaagtgagctgctgaaaagaactgctctccatggagagagtaactctgtccttattatcggaccccgaggatcaggaaaaactatgttaataagtcatgctttgaaagaactcatggaaatagaagaagtgagtgaaaatgtattacaagttcacttaaatggactgctgcagatcaatgacaaaatcgccctaaaggaaatcacaaggcagttaaatctggaaaatgtagttggagataaagtttttggaagctttgctgaaaacctttcatttcttctggaagctttaaaaaaaggtgaccgaactagcagttgcccagtgatcttcatattagatgaatttgatctttttgctcatcataaaaaccaaacacttctctataatctttttgacatttctcagtctgcacagaccccaatagcagttattggtcttacatgtagattggatattttggaactcttagaaaaaagagtgaagtcaagattttctcaccggcagatacacttaatgaattcatttggttttccacagtatgttaaaatatttaaagaacactgcggtcattacacatgctattgatgcttgctttaaatcgagtaacagcatcgcacccatttatgactgccgtagatctaatggaagcaagccaactgtgtagcatggactcgaaagcaaatattgtacatggtctatcagtcttggaaatctgtcttataatagcaatgaaacatttaaatgacatctatgaggaagagccatttaattttcaaatggtctataatgagtttcagaagtttgttcaaaggaaagcacattccgtttataattttgaaaaacctgttgtcatgaaggcttttgaacacttgcagcaattagaattaataaagcccatggaaagaacttcaggaaattcacagagagagtaccagctgatgaaactgcttttggataatactcaaattatgaatgctctgcagaaatatcccaactgtcctacagatgtgaggcagtgggcaacatcctcactaagctggttatgaatataaccagtgacttcaactttggcatttcattcatacttctgtagagaacggaaaactattgtccattaacatgatatgctaaacattctataaacattcttgtatttatgtgagacttgcccatctactgtcttggctgtgtcttgccttttaatcatgaacagttacatgatttataatttcactgattgagattactttgtaagtagctgttcagaagaataaaatatgactgttttagggactagaccatgtgcttttttaacacttatatatataatggtctatttgaagagctcacttcaacctaacagctagatgtctttacaaaccttaaaccaaaggagtaaaaaaaacaatggtaagcactgaagtataataagtaacctttggtacagcaggtttgctgcagtgtttttttctgtccacatgcaaattttggattctatcccagacccaggttttctagttcagaagactaaccagcttagtcagaagatggttccatggaagaaaaaggccaaggagtttgaagatttttcttctagacatctcaaaatgtggtactcataccatccacatcagaatcccttgtaggattttctaaaattacagattgttgagcctaccataggtcaaaaggactggaattttccttcttaacaagtatagtcatggcaccacgtaacattttggtcaatgacattgtataaagggtggtctcataagattataccatatttttactgtaccttttctatgtctaaatatacaaatgttttaccattgtgttacagttgcctacagtatgattacagtaacattctgtacagtgctatagctgaagagtaataggctaggctatctgtatagcctaagtgtgtaacaggctatatacatatcatcagggtctgtgtaagtatactctgtgatgttcatacagtgatgaaatcacccaaagacacatttctcagaacgtagccccatcatgaagtgacgtgactaccagagatttctggaaaagcactcccaaaagtaatgagatgtgtatggcaatgttaactgaacctgtttgtattaaaaagtaaatccctatgaggaatgtggaaatgtccgtcaaagcattgtcttttaagtaagttccaagatccatgaattaacagaggcatatatttaaaatgaaatttaatgagcacttagtgacttcatttgttcaagaatatttgatttcctattgtgtgcatgggaggtttacaaaagacagactgtccctatgcttgtgcagcttacaatctatttaactattagaggccctgtgacctgtgaggca

SEQ ID NO: 414968 - DNA, 2700 bp, Homo sapiens
atgccgggagtggttgtgtacggtccgcagcggcaggtgaagcctagcagaggacgcggccaggcgattcggtgaagcgattcctgcaggcgttggttcccctctttgacctggtacaaagaattttacgtgaaagattttgtcgtcagagtccacatagtaacctatttggagtgcaagtacaatacaaacacttaagtgagctgctgaaaagaactgctctccatggagagagtaactctgtccttattatcggaccccgaggatcaggaaaaactatgttaataagtcatgctttgaaagaactcatggaaatagaagaagtgagtgaaaatgtattacaagttcacttaaatggactgctgcagatcaatgacaaaatcgccctaaaggaaatcacaaggcagttaaatctggaaaatgtagttggagataaagtttttggaagctttgctgaaaacctttcatttcttctggaagctttaaaaaaaggtgaccgaactagcagttgcccagtgatcttcatattagatgaatttgatctttttgctcatcataaaaaccaaacacttctctataatctttttgacatttctcagtctgcacagaccccaatagcagttattggtcttacatgtagattggatattttggaactcttagaaaaaagagtgaagtcaagattttctcaccggcagatacacttaatgaattcatttggttttccacagtatgttaaaatatttaaagaacagttatctctacctgcagagtttccagacaaggtttttgctgagaagtggaatgaaaatgttcagtatctctcagaagatagaagtgtgcaagaagtactacagaagcatttcaatatcagcaaaaacctgcggtcattacacatgctattgatgcttgctttaaatcgagtaacagcatcgcacccatttatgactgccgtagatctaatggaagcaagccaactgtgtagcatggactcgaaagcaaatattgtacatggtctatcagtcttggaaatctgtcttataatagcaatgaaacatttaaatgacatctatgaggaagagccatttaattttcaaatggtctataatgagtttcagaagtttgttcaaaggaaagcacattccgtttataattttgaaaaacctgttgtcatgaaggcttttgaacacttgcagcaattagaattaataaagcccatggaaagaacttcaggaaattcacagagagagtaccagctgatgaaactgcttttggataatactcaaattatgaatgctctgcagaaatatcccaactgtcctacagatgtgaggcagtgggcaacatcctcactaagctggttatgaatataaccagtgacttcaactttggcatttcattcatacttctgtagagaacggaaaactattgtccattaacatgatatgctaaacattctataaacattcttgtatttatgtgagacttgcccatctactgtcttggctgtgtcttgccttttaatcatgaacagttacatgatttataatttcactgattgagattactttgtaagtagctgttcagaagaataaaatatgactgttttagggactagaccatgtgcttttttaacacttatatatataatggtctatttgaagagctcacttcaacctaacagctagatgtctttacaaaccttaaaccaaaggagtaaaaaaaacaatggtaagcactgaagtataataagtaacctttggtacagcaggtttgctgcagtgtttttttctgtccacatgcaaattttggattctatcccagacccaggttttctagttcagaagactaaccagcttagtcagaagatggttccatggaagaaaaaggccaaggagtttgaagatttttcttctagacatctcaaaatgtggtactcataccatccacatcagaatcccttgtaggattttctaaaattacagattgttgagcctaccataggtcaaaaggactggaattttccttcttaacaagtatagtcatggcaccacgtaacattttggtcaatgacattgtataaagggtggtctcataagattataccatatttttactgtaccttttctatgtctaaatatacaaatgttttaccattgtgttacagttgcctacagtatgattacagtaacattctgtacagtgctatagctgaagagtaataggctaggctatctgtatagcctaagtgtgtaacaggctatatacatatcatcagggtctgtgtaagtatactctgtgatgttcatacagtgatgaaatcacccaaagacacatttctcagaacgtagccccatcatgaagtgacgtgactaccagagatttctggaaaagcactcccaaaagtaatgagatgtgtatggcaatgttaactgaacctgtttgtattaaaaagtaaatccctatgaggaatgtggaaatgtccgtcaaagcattgtcttttaagtaagttccaagatccatgaattaacagaggcatatatttaaaatgaaatttaatgagcacttagtgacttcatttgttcaagaatatttgatttcctattgtgtgcatgggaggtttacaaaagacagactgtccctatgcttgtgcagcttacaatctatttaactattagaggccctgtgacctgtgaggca

SEQ ID NO: 414969 - DNA, 2781 bp, Homo sapiens
gtggctgctcctgggtgtagtgagatgtctccagccagggccaagcagcagcagtagcagcagcagcagtagcagcagcagcagcaacagcagcagcagcagcaacagcagcagcaaagggatttgaatttgttgaaatgagcagtcgtaaatcaaagagtaacagcttaattcacacagagtgcctttcacaggtacaaagaattttacgtgaaagattttgtcgtcagagtccacatagtaacctatttggagtgcaagtacaatacaaacacttaagtgagctgctgaaaagaactgctctccatggagagagtaactctgtccttattatcggaccccgaggatcaggaaaaactatgttaataagtcatgctttgaaagaactcatggaaatagaagaagtgagtgaaaatgtattacaagttcacttaaatggactgctgcagatcaatgacaaaatcgccctaaaggaaatcacaaggcagttaaatctggaaaatgtagttggagataaagtttttggaagctttgctgaaaacctttcatttcttctggaagctttaaaaaaaggtgaccgaactagcagttgcccagtgatcttcatattagatgaatttgatctttttgctcatcataaaaaccaaacacttctctataatctttttgacatttctcagtctgcacagaccccaatagcagttattggtcttacatgtagattggatattttggaactcttagaaaaaagagtgaagtcaagattttctcaccggcagatacacttaatgaattcatttggttttccacagtatgttaaaatatttaaagaacagttatctctacctgcagagtttccagacaaggtttttgctgagaagtggaatgaaaatgttcagtatctctcagaagatagaagtgtgcaagaagtactacagaagcatttcaatatcagcaaaaacctgcggtcattacacatgctattgatgcttgctttaaatcgagtaacagcatcgcacccatttatgactgccgtagatctaatggaagcaagccaactgtgtagcatggactcgaaagcaaatattgtacatggtctatcagtcttggaaatctgtcttataatagcaatgaaacatttaaatgacatctatgaggaagagccatttaattttcaaatggtctataatgagtttcagaagtttgttcaaaggaaagcacattccgtttataattttgaaaaacctgttgtcatgaaggcttttgaacacttgcagcaattagaattaataaagcccatggaaagaacttcaggaaattcacagagagagtaccagctgatgaaactgcttttggataatactcaaattatgaatgctctgcagaaatatcccaactgtcctacagatgtgaggcagtgggcaacatcctcactaagctggttatgaatataaccagtgacttcaactttggcatttcattcatacttctgtagagaacggaaaactattgtccattaacatgatatgctaaacattctataaacattcttgtatttatgtgagacttgcccatctactgtcttggctgtgtcttgccttttaatcatgaacagttacatgatttataatttcactgattgagattactttgtaagtagctgttcagaagaataaaatatgactgttttagggactagaccatgtgcttttttaacacttatatatataatggtctatttgaagagctcacttcaacctaacagctagatgtctttacaaaccttaaaccaaaggagtaaaaaaaacaatggtaagcactgaagtataataagtaacctttggtacagcaggtttgctgcagtgtttttttctgtccacatgcaaattttggattctatcccagacccaggttttctagttcagaagactaaccagcttagtcagaagatggttccatggaagaaaaaggccaaggagtttgaagatttttcttctagacatctcaaaatgtggtactcataccatccacatcagaatcccttgtaggattttctaaaattacagattgttgagcctaccataggtcaaaaggactggaattttccttcttaacaagtatagtcatggcaccacgtaacattttggtcaatgacattgtataaagggtggtctcataagattataccatatttttactgtaccttttctatgtctaaatatacaaatgttttaccattgtgttacagttgcctacagtatgattacagtaacattctgtacagtgctatagctgaagagtaataggctaggctatctgtatagcctaagtgtgtaacaggctatatacatatcatcagggtctgtgtaagtatactctgtgatgttcatacagtgatgaaatcacccaaagacacatttctcagaacgtagccccatcatgaagtgacgtgactaccagagatttctggaaaagcactcccaaaagtaatgagatgtgtatggcaatgttaactgaacctgtttgtattaaaaagtaaatccctatgaggaatgtggaaatgtccgtcaaagcattgtcttttaagtaagttccaagatccatgaattaacagaggcatatatttaaaatgaaatttaatgagcacttagtgacttcatttgttcaagaatatttgatttcctattgtgtgcatgggaggtttacaaaagacagactgtccctatgcttgtgcagcttacaatctatttaactattagaggccctgtgacctgtgaggca

SEQ ID NO: 414970 - DNA, 2995 bp, Homo sapiens
gtggctgctcctgggtgtagtgagatgtctccagccagggccaagcagcagcagtagcagcagcagcagtagcagcagcagcagcaacagcagcagcagcagcaacagcagcagcaaagggaagcctggagccagaggacttttggtggctgaggccttagctacctggcttacacattaaggaggacacagatttgcttgctgtctgtctgtcaaggcctggctcagctaaggacctgttaacatttctagagaagaaaacagcattaccatgttggttgaatctgctgatgaggagcgactacatattttggattttaacctgttagcagatgatttgaatttgttgaaatgagcagtcgtaaatcaaagagtaacagcttaattcacacagagtgcctttcacaggtacaaagaattttacgtgaaagattttgtcgtcagagtccacatagtaacctatttggagtgcaagtacaatacaaacacttaagtgagctgctgaaaagaactgctctccatggagagagtaactctgtccttattatcggaccccgaggatcaggaaaaactatgttaataagtcatgctttgaaagaactcatggaaatagaagaagtgagtgaaaatgtattacaagttcacttaaatggactgctgcagatcaatgacaaaatcgccctaaaggaaatcacaaggcagttaaatctggaaaatgtagttggagataaagtttttggaagctttgctgaaaacctttcatttcttctggaagctttaaaaaaaggtgaccgaactagcagttgcccagtgatcttcatattagatgaatttgatctttttgctcatcataaaaaccaaacacttctctataatctttttgacatttctcagtctgcacagaccccaatagcagttattggtcttacatgtagattggatattttggaactcttagaaaaaagagtgaagtcaagattttctcaccggcagatacacttaatgaattcatttggttttccacagtatgttaaaatatttaaagaacagttatctctacctgcagagtttccagacaaggtttttgctgagaagtggaatgaaaatgttcagtatctctcagaagatagaagtgtgcaagaagtactacagaagcatttcaatatcagcaaaaacctgcggtcattacacatgctattgatgcttgctttaaatcgagtaacagcatcgcacccatttatgactgccgtagatctaatggaagcaagccaactgtgtagcatggactcgaaagcaaatattgtacatggtctatcagtcttggaaatctgtcttataatagcaatgaaacatttaaatgacatctatgaggaagagccatttaattttcaaatggtctataatgagtttcagaagtttgttcaaaggaaagcacattccgtttataattttgaaaaacctgttgtcatgaaggcttttgaacacttgcagcaattagaattaataaagcccatggaaagaacttcaggaaattcacagagagagtaccagctgatgaaactgcttttggataatactcaaattatgaatgctctgcagaaatatcccaactgtcctacagatgtgaggcagtgggcaacatcctcactaagctggttatgaatataaccagtgacttcaactttggcatttcattcatacttctgtagagaacggaaaactattgtccattaacatgatatgctaaacattctataaacattcttgtatttatgtgagacttgcccatctactgtcttggctgtgtcttgccttttaatcatgaacagttacatgatttataatttcactgattgagattactttgtaagtagctgttcagaagaataaaatatgactgttttagggactagaccatgtgcttttttaacacttatatatataatggtctatttgaagagctcacttcaacctaacagctagatgtctttacaaaccttaaaccaaaggagtaaaaaaaacaatggtaagcactgaagtataataagtaacctttggtacagcaggtttgctgcagtgtttttttctgtccacatgcaaattttggattctatcccagacccaggttttctagttcagaagactaaccagcttagtcagaagatggttccatggaagaaaaaggccaaggagtttgaagatttttcttctagacatctcaaaatgtggtactcataccatccacatcagaatcccttgtaggattttctaaaattacagattgttgagcctaccataggtcaaaaggactggaattttccttcttaacaagtatagtcatggcaccacgtaacattttggtcaatgacattgtataaagggtggtctcataagattataccatatttttactgtaccttttctatgtctaaatatacaaatgttttaccattgtgttacagttgcctacagtatgattacagtaacattctgtacagtgctatagctgaagagtaataggctaggctatctgtatagcctaagtgtgtaacaggctatatacatatcatcagggtctgtgtaagtatactctgtgatgttcatacagtgatgaaatcacccaaagacacatttctcagaacgtagccccatcatgaagtgacgtgactaccagagatttctggaaaagcactcccaaaagtaatgagatgtgtatggcaatgttaactgaacctgtttgtattaaaaagtaaatccctatgaggaatgtggaaatgtccgtcaaagcattgtcttttaagtaagttccaagatccatgaattaacagaggcatatatttaaaatgaaatttaatgagcacttagtgacttcatttgttcaagaatatttgatttcctattgtgtgcatgggaggtttacaaaagacagactgtccctatgcttgtgcagcttacaatctatttaactattagaggccctgtgacctgtgaggca

SEQ ID NO: 414971 - DNA, 1629 bp, Homo sapiens
atgccgggagtggttgtgtacggtccgcagcggcaggtgaagcctagcagaggacgcggccaggcgattcggtgaagcgattcctgcaggcgttggttcccctctttgacctggatttgaatttgttgaaatgagcagtcgtaaatcaaagagtaacagcttaattcacacagagtgcctttcacaggtacaaagaattttacgtgaaagattttgtcgtcagagtccacatagtaacctatttggagtgcaagtacaatacaaacacttaagtgagctgctgaaaagaactgctctccatggagagagtaactctgtccttattatcggaccccgaggatcaggaaaaactatgttaataagtcatgctttgaaagaactcatggaaatagaagaagtgagtgaaaatgtattacaagttcacttaaatggactgctgcagatcaatgacaaaatcgccctaaaggaaatcacaaggcagttaaatctggaaaatgtagttggagataaagtttttggaagctttgctgaaaacctttcatttcttctggaagctttaaaaaaaggtgaccgaactagcagttgcccagtgatcttcatattagatgaatttgatctttttgctcatcataaaaaccaaacacttctctataatctttttgacatttctcagtctgcacagaccccaatagcagttattggtcttacatgtagattggatattttggaactcttagaaaaaagagtgaagtcaagattttctcaccggcagatacacttaatgaattcatttggttttccacagtatgttaaaatatttaaagaacagttatctctacctgcagagtttccagacaaggtttttgctgagaagtggaatgaaaatgttcagtatctctcagaagatagaagtgtgcaagaagtactacagaagcatttcaatatcagcaaaaacctgcggtcattacacatgctattgatgcttgctttaaatcgagtaacagcatcgcacccatttatgactgccgtagatctaatggaagcaagccaactgtgtagcatggactcgaaagcaaatattgtacatggtctatcagtcttggaaatctgtcttataatagcaatagtttcagaagtttgttcaaaggaaagcacattccgtttataattttgaaaaacctgttgtcatgaaggcttttgaacacttgcagcaattagaattaataaagcccatggaaagaacttcaggaaattcacagagagagtaccagctgatgaaactgcttttggataatactcaaattatgaatgctctgcagaaatatcccaactgtcctacagatgtgaggcagtgggcaacatcctcactaagctggttatgaatataaccagtgacttcaactttggcatttcattcatacttctgtagagaacggaaaactattgtccattaacatgatatgctaaacattctataaacattcttgtatttatgtgagacttgcccatctactgtcttggctgtgtcttgccttttaatcatgaacagttacatgatttataatttcactgattgagattactttgtaagtagctgttcagaagaataaaatatgactgttttaggga

SEQ ID NO: 414972 - DNA, 2532 bp, Homo sapiens
atgccgggagtggttgtgtacggtccgcagcggcaggtgaagcctagcagaggacgcggccaggcgattcggtgaagcgattcctgcaggcgttggttcccctctttgacctgttaataagtcatgctttgaaagaactcatggaaatagaagaagtgagtgaaaatgtattacaagttcacttaaatggactgctgcagatcaatgacaaaatcgccctaaaggaaatcacaaggcagttaaatctggaaaatgtagttggagataaagtttttggaagctttgctgaaaacctttcatttcttctggaagctttaaaaaaaggtgaccgaactagcagttgcccagtgatcttcatattagatgaatttgatctttttgctcatcataaaaaccaaacacttctctataatctttttgacatttctcagtctgcacagaccccaatagcagttattggtcttacatgtagattggatattttggaactcttagaaaaaagagtgaagtcaagattttctcaccggcagatacacttaatgaattcatttggttttccacagtatgttaaaatatttaaagaacagttatctctacctgcagagtttccagacaaggtttttgctgagaagtggaatgaaaatgttcagtatctctcagaagatagaagtgtgcaagaagtactacagaagcatttcaatatcagcaaaaacctgcggtcattacacatgctattgatgcttgctttaaatcgagtaacagcatcgcacccatttatgactgccgtagatctaatggaagcaagccaactgtgtagcatggactcgaaagcaaatattgtacatggtctatcagtcttggaaatctgtcttataatagcaatgaaacatttaaatgacatctatgaggaagagccatttaattttcaaatggtctataatgagtttcagaagtttgttcaaaggaaagcacattccgtttataattttgaaaaacctgttgtcatgaaggcttttgaacacttgcagcaattagaattaataaagcccatggaaagaacttcaggaaattcacagagagagtaccagctgatgaaactgcttttggataatactcaaattatgaatgctctgcagaaatatcccaactgtcctacagatgtgaggcagtgggcaacatcctcactaagctggttatgaatataaccagtgacttcaactttggcatttcattcatacttctgtagagaacggaaaactattgtccattaacatgatatgctaaacattctataaacattcttgtatttatgtgagacttgcccatctactgtcttggctgtgtcttgccttttaatcatgaacagttacatgatttataatttcactgattgagattactttgtaagtagctgttcagaagaataaaatatgactgttttagggactagaccatgtgcttttttaacacttatatatataatggtctatttgaagagctcacttcaacctaacagctagatgtctttacaaaccttaaaccaaaggagtaaaaaaaacaatggtaagcactgaagtataataagtaacctttggtacagcaggtttgctgcagtgtttttttctgtccacatgcaaattttggattctatcccagacccaggttttctagttcagaagactaaccagcttagtcagaagatggttccatggaagaaaaaggccaaggagtttgaagatttttcttctagacatctcaaaatgtggtactcataccatccacatcagaatcccttgtaggattttctaaaattacagattgttgagcctaccataggtcaaaaggactggaattttccttcttaacaagtatagtcatggcaccacgtaacattttggtcaatgacattgtataaagggtggtctcataagattataccatatttttactgtaccttttctatgtctaaatatacaaatgttttaccattgtgttacagttgcctacagtatgattacagtaacattctgtacagtgctatagctgaagagtaataggctaggctatctgtatagcctaagtgtgtaacaggctatatacatatcatcagggtctgtgtaagtatactctgtgatgttcatacagtgatgaaatcacccaaagacacatttctcagaacgtagccccatcatgaagtgacgtgactaccagagatttctggaaaagcactcccaaaagtaatgagatgtgtatggcaatgttaactgaacctgtttgtattaaaaagtaaatccctatgaggaatgtggaaatgtccgtcaaagcattgtcttttaagtaagttccaagatccatgaattaacagaggcatatatttaaaatgaaatttaatgagcacttagtgacttcatttgttcaagaatatttgatttcctattgtgtgcatgggaggtttacaaaagacagactgtccctatgcttgtgcagcttacaatctatttaactattagaggccctgtgacctgtgaggca

SEQ ID NO: 414973 - DNA, 2539 bp, Homo sapiens
gtggctgctcctgggtgtagtgagatgtctccagccagggccaagcagcagcagtagcagcagcagcagtagcagcagcagcagcaacagcagcagcagcagcaacagcagcagcaaaggttaataagtcatgctttgaaagaactcatggaaatagaagaagtgagtgaaaatgtattacaagttcacttaaatggactgctgcagatcaatgacaaaatcgccctaaaggaaatcacaaggcagttaaatctggaaaatgtagttggagataaagtttttggaagctttgctgaaaacctttcatttcttctggaagctttaaaaaaaggtgaccgaactagcagttgcccagtgatcttcatattagatgaatttgatctttttgctcatcataaaaaccaaacacttctctataatctttttgacatttctcagtctgcacagaccccaatagcagttattggtcttacatgtagattggatattttggaactcttagaaaaaagagtgaagtcaagattttctcaccggcagatacacttaatgaattcatttggttttccacagtatgttaaaatatttaaagaacagttatctctacctgcagagtttccagacaaggtttttgctgagaagtggaatgaaaatgttcagtatctctcagaagatagaagtgtgcaagaagtactacagaagcatttcaatatcagcaaaaacctgcggtcattacacatgctattgatgcttgctttaaatcgagtaacagcatcgcacccatttatgactgccgtagatctaatggaagcaagccaactgtgtagcatggactcgaaagcaaatattgtacatggtctatcagtcttggaaatctgtcttataatagcaatgaaacatttaaatgacatctatgaggaagagccatttaattttcaaatggtctataatgagtttcagaagtttgttcaaaggaaagcacattccgtttataattttgaaaaacctgttgtcatgaaggcttttgaacacttgcagcaattagaattaataaagcccatggaaagaacttcaggaaattcacagagagagtaccagctgatgaaactgcttttggataatactcaaattatgaatgctctgcagaaatatcccaactgtcctacagatgtgaggcagtgggcaacatcctcactaagctggttatgaatataaccagtgacttcaactttggcatttcattcatacttctgtagagaacggaaaactattgtccattaacatgatatgctaaacattctataaacattcttgtatttatgtgagacttgcccatctactgtcttggctgtgtcttgccttttaatcatgaacagttacatgatttataatttcactgattgagattactttgtaagtagctgttcagaagaataaaatatgactgttttagggactagaccatgtgcttttttaacacttatatatataatggtctatttgaagagctcacttcaacctaacagctagatgtctttacaaaccttaaaccaaaggagtaaaaaaaacaatggtaagcactgaagtataataagtaacctttggtacagcaggtttgctgcagtgtttttttctgtccacatgcaaattttggattctatcccagacccaggttttctagttcagaagactaaccagcttagtcagaagatggttccatggaagaaaaaggccaaggagtttgaagatttttcttctagacatctcaaaatgtggtactcataccatccacatcagaatcccttgtaggattttctaaaattacagattgttgagcctaccataggtcaaaaggactggaattttccttcttaacaagtatagtcatggcaccacgtaacattttggtcaatgacattgtataaagggtggtctcataagattataccatatttttactgtaccttttctatgtctaaatatacaaatgttttaccattgtgttacagttgcctacagtatgattacagtaacattctgtacagtgctatagctgaagagtaataggctaggctatctgtatagcctaagtgtgtaacaggctatatacatatcatcagggtctgtgtaagtatactctgtgatgttcatacagtgatgaaatcacccaaagacacatttctcagaacgtagccccatcatgaagtgacgtgactaccagagatttctggaaaagcactcccaaaagtaatgagatgtgtatggcaatgttaactgaacctgtttgtattaaaaagtaaatccctatgaggaatgtggaaatgtccgtcaaagcattgtcttttaagtaagttccaagatccatgaattaacagaggcatatatttaaaatgaaatttaatgagcacttagtgacttcatttgttcaagaatatttgatttcctattgtgtgcatgggaggtttacaaaagacagactgtccctatgcttgtgcagcttacaatctatttaactattagaggccctgtgacctgtgaggca

SEQ ID NO: 414974 - DNA, 2422 bp, Homo sapiens
tacttaactggaaaacaacctgctgtatcaaatacatgtttaattttaattaaatacttttaaatggactttattttaggactgctgcagatcaatgacaaaatcgccctaaaggaaatcacaaggcagttaaatctggaaaatgtagttggagataaagtttttggaagctttgctgaaaacctttcatttcttctggaagctttaaaaaaaggtgaccgaactagcagttgcccagtgatcttcatattagatgaatttgatctttttgctcatcataaaaaccaaacacttctctataatctttttgacatttctcagtctgcacagaccccaatagcagttattggtcttacatgtagattggatattttggaactcttagaaaaaagagtgaagtcaagattttctcaccggcagatacacttaatgaattcatttggttttccacagtatgttaaaatatttaaagaacagttatctctacctgcagagtttccagacaaggtttttgctgagaagtggaatgaaaatgttcagtatctctcagaagatagaagtgtgcaagaagtactacagaagcatttcaatatcagcaaaaacctgcggtcattacacatgctattgatgcttgctttaaatcgagtaacagcatcgcacccatttatgactgccgtagatctaatggaagcaagccaactgtgtagcatggactcgaaagcaaatattgtacatggtctatcagtcttggaaatctgtcttataatagcaatgaaacatttaaatgacatctatgaggaagagccatttaattttcaaatggtctataatgagtttcagaagtttgttcaaaggaaagcacattccgtttataattttgaaaaacctgttgtcatgaaggcttttgaacacttgcagcaattagaattaataaagcccatggaaagaacttcaggaaattcacagagagagtaccagctgatgaaactgcttttggataatactcaaattatgaatgctctgcagaaatatcccaactgtcctacagatgtgaggcagtgggcaacatcctcactaagctggttatgaatataaccagtgacttcaactttggcatttcattcatacttctgtagagaacggaaaactattgtccattaacatgatatgctaaacattctataaacattcttgtatttatgtgagacttgcccatctactgtcttggctgtgtcttgccttttaatcatgaacagttacatgatttataatttcactgattgagattactttgtaagtagctgttcagaagaataaaatatgactgttttagggactagaccatgtgcttttttaacacttatatatataatggtctatttgaagagctcacttcaacctaacagctagatgtctttacaaaccttaaaccaaaggagtaaaaaaaacaatggtaagcactgaagtataataagtaacctttggtacagcaggtttgctgcagtgtttttttctgtccacatgcaaattttggattctatcccagacccaggttttctagttcagaagactaaccagcttagtcagaagatggttccatggaagaaaaaggccaaggagtttgaagatttttcttctagacatctcaaaatgtggtactcataccatccacatcagaatcccttgtaggattttctaaaattacagattgttgagcctaccataggtcaaaaggactggaattttccttcttaacaagtatagtcatggcaccacgtaacattttggtcaatgacattgtataaagggtggtctcataagattataccatatttttactgtaccttttctatgtctaaatatacaaatgttttaccattgtgttacagttgcctacagtatgattacagtaacattctgtacagtgctatagctgaagagtaataggctaggctatctgtatagcctaagtgtgtaacaggctatatacatatcatcagggtctgtgtaagtatactctgtgatgttcatacagtgatgaaatcacccaaagacacatttctcagaacgtagccccatcatgaagtgacgtgactaccagagatttctggaaaagcactcccaaaagtaatgagatgtgtatggcaatgttaactgaacctgtttgtattaaaaagtaaatccctatgaggaatgtggaaatgtccgtcaaagcattgtcttttaagtaagttccaagatccatgaattaacagaggcatatatttaaaatgaaatttaatgagcacttagtgacttcatttgttcaagaatatttgatttcctattgtgtgcatgggaggtttacaaaagacagactgtccctatgcttgtgcagcttacaatctatttaactattagaggccctgtgacctgtgaggca

SEQ ID NO: 414975 - DNA, 1010 bp, Homo sapiens
atgccgggagtggttgtgtacggtccgcagcggcaggtgaagcctagcagaggacgcggccaggcgattcggtgaagcgattcctgcaggcgttggttcccctctttgacctggatttgaatttgttgaaatgagcagtcgtaaatcaaagagtaacagcttaattcacacagagtgcctttcacaggtacaaagaattttacgtgaaagattttgtcgtcagagtccacatagtaacctatttggagtgcaagtacaatacaaacacttaagtgagctgctgaaaagaactgctctccatggagagagtaactctgtccttattatcggaccccgaggatcaggaaaaactatgttaataagtcatgctttgaaagaactcatggaaatagaagaagtgagtgaaaatgtattacaagttcacttaaatggactgctgcagatcaatgacaaaatcgccctaaaggaaatcacaaggcagttaaatctggaaaatgtagttggagataaagtttttggaagctttgctgaaaacctttcatttcttctggaagctttaaaaaaaggtgaccgaactagcagttgcccagtgatcttcatattagatgaatttgatctttttgctcatcataaaaaccaaacacttctctataatctttttgacatttctcagtctgcacagaccccaatagcagttattggtcttacatgtagattggatattttggaactcttagaaaaaagagtgaagtcaagattttctcaccggcagatacacttaatgaattcatttggttttccacagtatgttaaaatatttaaagaacagttatctctacctgcagagtttccagacaaggtttttgctgagaagtggaatgaaaatgttcaggtatcttaaaaggcaataaagctaaatgttccttgctatatgatttaaagcaattaaaacacaaattttagaaattagtaaattaacacaaagtttctaatattgctgaaggataatg

SEQ ID NO: 414976 - DNA, 1825 bp, Homo sapiens
aggagctatgatagagaatgaggctaggaagaaaaccatattgtatatattgaattaaagtttgccgtgtttacattcaacaatatatggacaagtaagtgtgcactgacactgttttacctgataatatgagttttcatggggttgtgagagtttttttaatcctattgattgttgttacattttgcttcccagtactctgttctgcagctgaccaaaatgctaactgttctctgggacgagaacaggagagttgtcactctcctctcctattcaacctaaactatttctttcatctttcaggcttttgaacacttgcagcaattagaattaataaagcccatggaaagaacttcaggaaattcacagagagagtaccagctgatgaaactgcttttggataatactcaaattatgaatgctctgcagaaatatcccaactgtcctacagatgtgaggcagtgggcaacatcctcactaagctggttatgaatataaccagtgacttcaactttggcatttcattcatacttctgtagagaacggaaaactattgtccattaacatgatatgctaaacattctataaacattcttgtatttatgtgagacttgcccatctactgtcttggctgtgtcttgccttttaatcatgaacagttacatgatttataatttcactgattgagattactttgtaagtagctgttcagaagaataaaatatgactgttttagggactagaccatgtgcttttttaacacttatatatataatggtctatttgaagagctcacttcaacctaacagctagatgtctttacaaaccttaaaccaaaggagtaaaaaaaacaatggtaagcactgaagtataataagtaacctttggtacagcaggtttgctgcagtgtttttttctgtccacatgcaaattttggattctatcccagacccaggttttctagttcagaagactaaccagcttagtcagaagatggttccatggaagaaaaaggccaaggagtttgaagatttttcttctagacatctcaaaatgtggtactcataccatccacatcagaatcccttgtaggattttctaaaattacagattgttgagcctaccataggtcaaaaggactggaattttccttcttaacaagtatagtcatggcaccacgtaacattttggtcaatgacattgtataaagggtggtctcataagattataccatatttttactgtaccttttctatgtctaaatatacaaatgttttaccattgtgttacagttgcctacagtatgattacagtaacattctgtacagtgctatagctgaagagtaataggctaggctatctgtatagcctaagtgtgtaacaggctatatacatatcatcagggtctgtgtaagtatactctgtgatgttcatacagtgatgaaatcacccaaagacacatttctcagaacgtagccccatcatgaagtgacgtgactaccagagatttctggaaaagcactcccaaaagtaatgagatgtgtatggcaatgttaactgaacctgtttgtattaaaaagtaaatccctatgaggaatgtggaaatgtccgtcaaagcattgtcttttaagtaagttccaagatccatgaattaacagaggcatatatttaaaatgaaatttaatgagcacttagtgacttcatttgttcaagaatatttgatttcctattgtgtgcatgggaggtttacaaaagacagactgtccctatgcttgtgcagcttacaatctatttaactattagaggccctgtgacctgtgaggca

SEQ ID NO: 414977 - DNA, 1103 bp, Homo sapiens
atgccgggagtggttgtgtacggtccgcagcggcaggtgaagcctagcagaggacgcggccaggcgattcggtgaagcgattcctgcaggcgttggttcccctctttgacctggatttgaatttgttgaaatgagcagtcgtaaatcaaagagtaacagcttaattcacacagagtgcctttcacaggtacaaagaattttacgtgaaagattttgtcgtcagagtccacatagtaacctatttggagtgcaagtacaatacaaacacttaagtgagctgctgaaaagaactgctctccatggagagagtaactctgtccttattatcggaccccgaggatcaggaaaaactatggtaaaagctgttgatttctggtgtttgttggcatgtgatgattcttattttatataagaataaataaattcatatataaatcttattttatgtaatactgaaaatacttttcattattttgtaatgttttacttttttgtttttttcttttttaatcacagaagacatgtaaaactttataaacttagggtggtatatttgagtgtagcagacctttttcccccttatttgtcctcctagtgaaaaattgtcaattgatgtttgttccaacatggtcttttgtccttaaagaagtagagatttccagtggaaaaagaaaatagcatgtattgagcatgtactatgtgtctttttattgtgttctctcatttattctttacatcaacactgcacggtagggtttttccctttgttataggttagggaactatcatatcatgcattctttttatttttcctacatcattactatttgtttaaccctaacttacacagtttttcagtgcatgctcacatcttatatcattcttgtctccttttgctctttatcatatttgcttagttacctcaaaaagatattcttacttatttccctttactcttttctttgatatcctttatgcaatataggagacaaattatgggtgttaacttttgaaagcaattaatttcaatgctaagtagtctgtgtaaaatctgttctcatgtattatatacaataaatttcaatttttgaccaatgtacttt

SEQ ID NO: 414978 - DNA, 517 bp, Homo sapiens
tgctaaaaaatgctgacagacacaaaatggggacatggtgtttgaaaaatggtgcctatcgacttgttggacacagagttgctacaaaccttcagtttactttaaaaaaaaaatgcaccatctgcaaagcacagtaaaacaaagtgtgcctaaagtgtggtatgagagtgttgaatcagcctgtacttagacaaaatgaagccatcgaagattttgaaggtcttagggtttgagcattttttacttttaaaaacttgtatttattttaattctagaacagtaaattcttaagtaatctctttaagtcactacgtttataatatttatgccaatttttttaaaggatttgaatttgttgaaatgagcagtcgtaaatcaaagagtaacagcttaattcacacagagtgcctttcacaggttagtatgtattttcattaatctcaagatattttaccctgtaaagctgttcagagaaatagttatcttcttaacctgaattttccctttagcatttagg

SEQ ID NO: 414979 - DNA, 5526 bp, Homo sapiens
atgcctggagggaggccgggcaggcggctgagcggcgcggctctcaacgtgacggggaagtggttcgggcggccgcggcttactaccccagggcgaacggacggacgacggaggcgggagccggtagccgagccgggcgacctagagaacgagcgggtcaggctcagcgtcggccactctgtcggtccgctgaatgaagtgcccgcccctctgagcccggagcccggcgctttccccgcaagatggacggtttcgccggcagtctcgatgatagtatttctgctgcaagtacttctgatgttcaagatcgcctgtcagctcttgagtcacgagttcagcaacaagaagatgaaatcactgtgctaaaggcggctttggctgatgttttgaggcgtcttgcaatctctgaagatcatgtggcctcagtgaaaaaatcagtctcaagtaaaggccaaccaagccctcgagcagttattcccatgtcctgtataaccaatggaagtggtgcaaacagaaaaccaagtcataccagtgctgtctcaattgcaggaaaagaaactctttcatctgctgctaaaagtggtacagaaaaaaagaaagaaaaaccacaaggacagagagaaaaaaaagaggaatctcattctaatgatcaaagtccacaaattcgagcatcaccttctccccagccctcttcacaacctctccaaatacacagacaaactccagaaagcaagaatgctactcccaccaaaagcataaaacgaccatcaccagctgaaaagtcacataattcttgggaaaattcagatgatagccgtaataaattgtcgaaaataccttcaacacccaaattaataccaaaagttaccaaaactgcagacaagcataaagatgtcatcatcaaccaagaaggagaatatattaaaatgtttatgcgcggtcggccaattaccatgttcattccttccgatgttgacaactatgatgacatcagaacggaactgcctcctgagaagctcaaactggagtgggcatatggttatcgaggaaaggactgtagagctaatgtttaccttcttccgaccggggaaatagtttatttcattgcatcagtagtagtactatttaattatgaggagagaactcagcgacactacctgggccatacagactgtgtgaaatgccttgctatacatcctgacaaaattaggattgcaactggacagatagctggcgtggataaagatggaaggcctctacaaccccacgtcagagtgtgggattctgttactctatccacactgcagattattggacttggcacttttgagcgtggagtaggatgcctggatttttcaaaagcagattcaggtgttcatttatgtgttattgatgactccaatgagcatatgcttactgtatgggactggcagaagaaagcaaaaggagcagaaataaagacaacaaatgaagttgttttggctgtggagtttcacccaacagatgcaaataccataattacatgcggtaaatctcatattttcttctggacctggagcggcaattcactaacaagaaaacagggaatttttgggaaatatgaaaagccaaaatttgtgcagtgtttagcattcttggggaatggagatgttcttactggagactcaggtggagtcatgcttatatggagcaaaactactgtagagcccacacctgggaaaggacctaaaggtgtatatcaaatcagcaaacaaatcaaagctcatgatggcagtgtgttcacactttgtcagatgagaaatgggatgttattaactggaggagggaaagacagaaaaataattctgtgggatcatgatctgaatcctgaaagagaaatagaggttcctgatcagtatggcacaatcagagctgtagcagaaggaaaggcagatcaatttttagtaggcacatcacgaaactttattttacgaggaacatttaatgatggcttccaaatagaagtacagggtcatacagatgagctttggggtcttgccacacatcccttcaaagatttgctcttgacatgtgctcaggacaggcaggtgtgcctgtggaactcaatggaacacaggctggaatggaccaggctggtagatgaaccaggacactgtgcagattttcatccaagtggcacagtggtggccataggaacgcactcaggcaggtggtttgttctggatgcagaaaccagagatctagtttctatccacacagacgggaatgaacagctctctgtgatgcgctactcaatagatggtaccttcctggctgtaggatctcatgacaactttatttacctctatgtagtctctgaaaatggaagaaaatatagcagatatggaaggtgcactggacattccagctacatcacacaccttgactggtccccagacaacaagtatataatgtctaactcgggagactatgaaatattgtactgggacattccaaatggctgcaaactaatcaggaatcgatcggattgtaaggacattgattggacgacatatacctgtgtgctaggatttcaagtatttggtgtctggccagaaggatctgatgggacagatatcaatgcactggtgcgatcccacaatagaaaggtgatagctgttgccgatgacttttgtaaagtccatctgtttcagtatccctgctccaaagcaaaggctcccagtcacaagtacagtgcccacagcagccatgtcaccaatgtcagttttactcacaatgacagtcacctgatatcaactggtggaaaagacatgagcatcattcagtggaaacttgtggaaaagttatctttgcctcagaatgagactgtagcggatactactctaaccaaagcccccgtctcttccactgaaagtgtcatccaatctaatactcccacaccgcctccttctcagcccttaaatgagacagctgaagaggaaagtagaataagcagttctcccacacttctggagaacagcctggaacaaactgtggagccaagtgaagaccacagcgaggaggagagtgaagagggcagcggagaccttggtgagcctctttatgaagagccatgcaacgagataagcaaggagcaggccaaagccacccttctggaggaccagcaagacccttcgccctcgtcctaacaccctggcttcagtgcaactcttttccttcagctgcatgtgattttgtgataaagttcaggtaacaggatgggcagtgatggagaatcactgttgattgagattttggtttccatgtgatttgttttcttcaatagtcttattttcagtctctcaaatacagccaacttaaagttttagtttggtgtttattgaaaattaaccaaacttaatactaggagaagactgaatcattaatgatgtctcacaaattactgtgtacctaagtggtgtgatgtaaatactggaaacaaaaacagcagttgcattgattttgaaaacaaacccccttgttatctgaacatgttttcttcaggaacaaccagaggtatcacaaacactgttactcatctactggctcagactgtactacttttttttttttttttcctgaaaaagaaaccagaaaaaaatgtactcttactgagataccctctcaccccaaatgtgtaatggaaaatttttaattaagaaaaacttcagttttgccaagtgcaatggtgttgccttctttaaaaaatgccgttttcttacactaccagtggatgtccagacatgctcttagtctactagagaggtgctgccttttctaagtcataatgaggaacagtcccttaatttcttgtgtgcaactctgttttatcctagaactaagagagcattggtttgttaaagagctttcaatgtatattaaaaccttcaatactcagaaatgatggattcctccaaggagtcctttactagcctaaacattctcaaatgtttgagattcaagtgaatggaaggaaaaccacatgcctttaaaactaaactgtaataattacctggctaatttcagctaagccttcatcataatttgttccctcagtaataggagaaatataaatacagtaagtttagattattgaattggtgcttgaaatttattggttttgttgtaattttatacagattatatgagggataagatactcatcaaattgcaaattcttttttttacagaagtgtgggtaacagtcacagcagttttttttaccaacagcatacttaacagacttgctgtgtagcagtttttttctggtggagttgctgtaagtcttgtaagtctaatgtggctatcctactcttttgggcaatgcatgtattatgcattggaaaggtattttttttaagttctgttggctagctatggttttcagtacatttcctactttaagagtaattactgacaaatatgtatttcctatatgtttatactttgattataaaaaagtattttgttttgattttttaacttgctgcattgttttgatactttctatttttttggtcaaatcatgtttagaaactttggatgagttaagaagtcttaagtatgcaggcgtttacgtgattgtgccattccaaagtgcatcagaactgtcattcccttctaatatcttctcaggagtaatacaaatcaggtatttcatcatcatttggtaatatgaaaactccagtgaactcccaaggacatttacaacatttatattcacacgctgtatggaagggtgtgggtgtgtgtgaaggggcgagtggagacactgtgtgtatctctagataagaagatatgcaccacgttgaaaatactcagtgtagatctctatgtgtataggtatctgtatatctttccttttgtttacaactgttaaaaaacctcaaaatagttctcttcaaaagaagagagattccaagcaacccatctttcttcagtatgtatgttctgtacatacttatcggagcgcgccagtaagtatcaggcatatatatctgtctgttagcaatgattattacatcatcagatcagcatgtgctatactccctgcaagaaatatactgacatgaacaggcagttcttggagaagaaagagcatttctttaagtacctggggaatacagctctcagtgatcagcagggagtttatttgaggacatcagtcacctttggggttgccatgtacaatgagatttataatcatgatactcttcggtggtagtttcaaaagacactactaatacgcaggaagcgttccagctatttaatgctggcaactactgtttaatggtcagttaaatctgtgataatggttggaagtgggtggggttatgaaattgtagatgtttttagaaaaacttgtgaatgaaaatgaatccaagtgtttcatgtgaagatgttgagccattgctatcatgcattcctgtctcatggcagaaaattttgaagattaaaaaataaaataatcaaaatgtttcctctttc

SEQ ID NO: 414980 - DNA, 1939 bp, Homo sapiens
  misc_feature (1084)..(1084): n is a, c, g, or t
tactatttaattatgaggagagaactcagcgacactacctgggccatacagactgtgtgaaatgccttgctatacatcctgacaaaattaggattgcaactggacagatagctggcgtggataaagatggaaggcctctacaaccccacgtcagagtgtgggattctgttactctatccacactgcagattattggacttggcacttttgagcgtggagtaggatgcctggatttttcaaaagcagattcaggtgttcatttatgtgttattgatgactccaatgagcatatgcttactgtatgggactggcagaagaaagcaaaaggagcagaaataaaggtaaatttttaaaaaaccgagtattgtgttttagagtatgttacttgttttgcaggtatttggaactatattggtattagaactatctattcgtaagtcgcaaaagcagatctactagccaaattcagcaaatttagtgatttgtcataatcgttaagatattaacactatagttatacaagataaaatagtcaagcagcttgaagcaatttcaatatttcagacattactatagtcctgaaatgccagagtagatggatgtgtgatctcataattaagactgaacacacttcttggttttcttctttaataaaacatgtaatttcattccatctttaaagctttagaaatctagaggaaaaattcagtaggaatacgactgatgtaactgaagggcttatgttaagttttttggtcttaattgtgtttgtaggattattttagaaaattcaatagcatttataattgctataattgcattataactctttacagtacaagggttgatctctgtgtagatcaagctgtacgttgtaagagaagaatgtaaaatgcattgaagctgggtttatatgagccagaaatggacttctccctctgacaggcatttaaaaagattcaaagtgatagaatggctttaaaaagtctgtgtaatatttgccatactcttaaataacatcacattactctccaactcctctcttaacagttttgttttgagtaagcttcaagcttttagcttnttgggcagaaagatgatgtgatgtttaacttaacattttgaaagaagtagatttgattgtacttaaaaggaatataagttgtcagaaaacctcaaactttaaaaaacataaatgaagatatagattgacttccagttattcagagtaatttaacattgaaacatagggaagttgcatgaaaatgaaatatatcaattttgattcttcatagtaaggtttaccagatgaagtcttgtggttttcctcctactggcgatttctcgatctcctttccaggactttaaatgttggtgttcttcagagttttattccacatgctccactgatactatatgctgctcccatggcctcattttctatctgctgagtcccgtatcagttatctccagcccagatctctaacaggtttaactcatatttctagttgcatcctagacatctttatttgaatgtcctctaccacaaatgaaaatcaccatgttcaaatctgtacataatcatctttcctagcccccaaccaccagtttcatcccttagtgattgactccgcatttcacctagctacctaagctagaaacttggacatcattcatggctctttttacctcacttctcacatccaggtagtcaggaagttctctaaacaccgtgtcccaaatatctgcattatagcactttctagtacaagcgactgcaaaacaattgaaattaacttaatctggccaggggtagtcactcacacctgtaatctcagcactttgggagaccaaagtgggtagatcattagatgtcaggagttcaagaccaccccggccaacatcgtgaagccccatctctactaaaaatacaaaaaaa

SEQ ID NO: 414981 - DNA, 928 bp, Homo sapiens
tatttttatgctttcactgtttagatgctcttgtgggatattcattgttttataaaatagggtatattagtagttcatcagtgagaaactttaaaaaatgctgatttcttactttcacttccagagatttatctagattatagcctaagcattaaaacttttacagtttcttgaggtgattttaatggttagccatataaacttataaaataaatgtgtttcttaaatttcttttctaggcataaagatgtcatcatcaaccaaggtaaattaaaaatccttttgaaaaattttattttgcccttcttagtttaatttttgctaattgaaaagaatattttcatccagtgcactttatcagttcatagtaatcaaagaaaagtgcgttactgtagtcatttaggaaaaaacccagtttttattgtaaggtaatgtcatttttgtctcaaccagcaaaaatgtcaactcgcgaaaaaaacagccaaggtaagaataagctacgcagttggttgccttctaagtgaattttttcctggatctcttatttggctttttattatttatgctgcctgactttcttccttaaaaaggaaatacagtgatttgagctagatgaatccagctacattttacttttttttttgagaccgagtctcattctgttgcccagggtggaatgcagtggtgcaatctcggcttactgcaatctccacctcctggggtcaagtgattcttgtgcctcccaggtagctggggactataggcaccaccacacccggctaatttttggtgttttttgtttgtttgttttgtatttttagtagagacggggtttcaccatgttggccgggctggctgcaaactcctgacctcaggtgatcagcccgcctcagcctcccaaagtgcagggattacacgcatgagccat

SEQ ID NO: 414982 - DNA, 701 bp, Homo sapiens
cccggcttcgctgcgtttattgcaggtgggtgcacctggtgggagggcaggtccggggcgaggtcacacgacctcgtcggtcaccgggatggggttgacctggggacctcccgggggtccccccgccgccgccgcagcctcctcctcgctgggcttcttgcgggcctcggccgggggccgcggcggggggttgctgggcggctgcttgatggtgcctccgatctgcggccgcaaacgttttttttttttttttttttttttttccattttggggctattttggttttttattagttagattttggacaggacttgatttgaatgaagaacagtgtgagccactgagaaatttgtaaaggaaatgttaacagctaagagtttgaacatagataaaagctaaacagattctaaaataaaataaacatatatagcatcacagttatatttcttcagctaatttttctgcatccctgtgtttccatatcaaaggtgtctggccagaaggatctgatgggacagatatcaatgcactggtgcgatcccacaatagaaaggtgatagctgttgccgatgacttttgtaaagtccatctgtttcagtatccctgctccaaagcaaaggtaaactcactttaatagaaactaatgttataaggccttctgtccagggatgattttgcatccatagcaagaaaatatagg

SEQ ID NO: 414983 - DNA, 235 bp, Homo sapiens
gagagcagctgacttatgctctgggcagggctcagagctcttgtggcggtcgctcctcttcacgttgaagtgggtggggttatgaaattgtagatgtttttagaaaaacttgtgaatgaaaatgaatccaagtgtttcatgtgaagatgttgagccattgctatcatgcattcctgtctcatggcagaaaattttgaagattaaaaaataaaataatcaaaatgtttcctctttc

SEQ ID NO: 414984 - DNA, 467 bp, Homo sapiens
atggctatgaaaaaatacaggtttttttgtaactacaaattataagaaacattactcagatgtaaggaaataatttttttctgttaacaaaagtgttttttaaaaaaaatcaggtaatatttgttctagtgaatcttctgagtgatacagaaaattataatacagatttgggaattgccttgtttaactccttcactcatccaggcagtctttcaactaatccttctcttttctggattagctttaaggaaatgttaattgctgcttttgtgttctgtttaaattgtcagttacatgtctttgatactcagaatttttctctaagaaattaatgttccttctagcataaaacgaccatcaccagctgaaaagtcacataattcttgggaaaattcagatgatagccgtaataaattgtcgaaaataccttcaacacccaaattaataccaaaagttaccaaaactgc

SEQ ID NO: 414985 - DNA, 3799 bp, Homo sapiens
ttagtgtttcgtagtttttttgttttaattcccacagtgtgaaaacctaagcagaaaaagatcgttgtttcctgcttaaggaatgttttaaggaatcatgattttattgagacctactgttctgatggagtacagcgttgggtgaattttccccaaaacattctttagagatagtctttctaggatacctccatagaccatatacgggtgctgtattcctcagcttctgagttgtaccatggataattcagaagtagcccaggaaaactgtattcctgatgccttatgcacaacttataaccaacacttcattctcaaaaatggagtcactctcatggggacaccagtgacgtgaaataaggccagagggtgtggtatgtgttgcaatgtcctgtaagatacaagtttaagagactgtctttcttggaagtgtctaatacaggtagtaggtgctagtttctggtatctagataggccagaaagtttctcccaggtttcaagtgctgaggatttgctgtgagcctgctcagttttagagggtgtgacactgcttcctctcctttagaaattccaacaaatgtgtattcagaaacagtattggctagctgttgaactgtttatcattcagaactctaaatgctttctaacaatttatctgttattttctagggacattccagctacatcacacaccttgactggtccccagacaacaagtatataatgtctaactcgggagactatgaaatattgtactgggacattccaaatggctgcaaactaatcaggaatcgatcggattgtaaggacattgattggacgacatatacctgtgtgctaggatttcaagtatttggtgtctggccagaaggatctgatgggacagatatcaatgcactggtgcgatcccacaatagaaaggtgatagctgttgccgatgacttttgtaaagtccatctgtttcagtatccctgctccaaagcaaaggctcccagtcacaagtacagtgcccacagcagccatgtcaccaatgtcagttttactcacaatgacagtcacctgatatcaactggtggaaaagacatgagcatcattcagtggaaacttgtggaaaagttatctttgcctcagaatgagactgtagcggatactactctaaccaaagcccccgtctcttccactgaaagtgtcatccaatctaatactcccacaccgcctccttctcagcccttaaatgagacagctgaagaggaaagtagaataagcagttctcccacacttctggagaacagcctggaacaaactgtggagccaagtgaagaccacagcgaggaggagagtgaagagggcagcggagaccttggtgagcctctttatgaagagccatgcaacgagataagcaaggagcaggccaaagccacccttctggaggaccagcaagacccttcgccctcgtcctaacaccctggcttcagtgcaactcttttccttcagctgcatgtgattttgtgataaagttcaggtaacaggatgggcagtgatggagaatcactgttgattgagattttggtttccatgtgatttgttttcttcaatagtcttattttcagtctctcaaatacagccaacttaaagttttagtttggtgtttattgaaaattaaccaaacttaatactaggagaagactgaatcattaatgatgtctcacaaattactgtgtacctaagtggtgtgatgtaaatactggaaacaaaaacagcagttgcattgattttgaaaacaaacccccttgttatctgaacatgttttcttcaggaacaaccagaggtatcacaaacactgttactcatctactggctcagactgtactacttttttttttttttttcctgaaaaagaaaccagaaaaaaatgtactcttactgagataccctctcaccccaaatgtgtaatggaaaatttttaattaagaaaaacttcagttttgccaagtgcaatggtgttgccttctttaaaaaatgccgttttcttacactaccagtggatgtccagacatgctcttagtctactagagaggtgctgccttttctaagtcataatgaggaacagtcccttaatttcttgtgtgcaactctgttttatcctagaactaagagagcattggtttgttaaagagctttcaatgtatattaaaaccttcaatactcagaaatgatggattcctccaaggagtcctttactagcctaaacattctcaaatgtttgagattcaagtgaatggaaggaaaaccacatgcctttaaaactaaactgtaataattacctggctaatttcagctaagccttcatcataatttgttccctcagtaataggagaaatataaatacagtaagtttagattattgaattggtgcttgaaatttattggttttgttgtaattttatacagattatatgagggataagatactcatcaaattgcaaattcttttttttacagaagtgtgggtaacagtcacagcagttttttttaccaacagcatacttaacagacttgctgtgtagcagtttttttctggtggagttgctgtaagtcttgtaagtctaatgtggctatcctactcttttgggcaatgcatgtattatgcattggaaaggtattttttttaagttctgttggctagctatggttttcagtacatttcctactttaagagtaattactgacaaatatgtatttcctatatgtttatactttgattataaaaaagtattttgttttgattttttaacttgctgcattgttttgatactttctatttttttggtcaaatcatgtttagaaactttggatgagttaagaagtcttaagtatgcaggcgtttacgtgattgtgccattccaaagtgcatcagaactgtcattcccttctaatatcttctcaggagtaatacaaatcaggtatttcatcatcatttggtaatatgaaaactccagtgaactcccaaggacatttacaacatttatattcacacgctgtatggaagggtgtgggtgtgtgtgaaggggcgagtggagacactgtgtgtatctctagataagaagatatgcaccacgttgaaaatactcagtgtagatctctatgtgtataggtatctgtatatctttccttttgtttacaactgttaaaaaacctcaaaatagttctcttcaaaagaagagagattccaagcaacccatctttcttcagtatgtatgttctgtacatacttatcggagcgcgccagtaagtatcaggcatatatatctgtctgttagcaatgattattacatcatcagatcagcatgtgctatactccctgcaagaaatatactgacatgaacaggcagttcttggagaagaaagagcatttctttaagtacctggggaatacagctctcagtgatcagcagggagtttatttgaggacatcagtcacctttggggttgccatgtacaatgagatttataatcatgatactcttcggtggtagtttcaaaagacactactaatacgcaggaagcgttccagctatttaatgctggcaactactgtttaatggtcagttaaatctgtgataatggttggaagtgggtggggttatgaaattgtagatgtttttagaaaaacttgtgaatgaaaatgaatccaagtgtttcatgtgaagatgttgagccattgctatcatgcattcctgtctcatggcagaaaattttgaagattaaaaaataaaataatcaaaatgtttcctctttc

SEQ ID NO: 414986 - DNA, 3432 bp, Homo sapiens
cccggcttcgctgcgtttattgcaggtgggtgcacctggtgggagggcaggtccggggcgaggtcacacgacctcgtcggtcaccgggatggggttgacctggggacctcccgggggtccccccgccgccgccgcagcctcctcctcgctgggcttcttgcgggcctcggccgggggccgcggcggggggttgctgggcggctgcttgatggtgcctccgatctgcggccgcaaacgttttttttttttttttttttttttttccattttggggctattttggttttttattagttagattttggacaggacttgatttgaatgaagaacagtgtgagccactgagaaatttgtaaaggaaatgttaacagctaagagtttgaacatagataaaagctaaacagattctaaaataaaataaacatatatagcatcacagttatatttcttcagctaatttttctgcatccctgtgtttccatatcaaaggtgtctggccagaaggatctgatgggacagatatcaatgcactggtgcgatcccacaatagaaaggtgatagctgttgccgatgacttttgtaaagtccatctgtttcagtatccctgctccaaagcaaaggctcccagtcacaagtacagtgcccacagcagccatgtcaccaatgtcagttttactcacaatgacagtcacctgatatcaactggtggaaaagacatgagcatcattcagtggaaacttgtggaaaagttatctttgcctcagaatgagactgtagcggatactactctaaccaaagcccccgtctcttccactgaaagtgtcatccaatctaatactcccacaccgcctccttctcagcccttaaatgagacagctgaagaggaaagtagaataagcagttctcccacacttctggagaacagcctggaacaaactgtggagccaagtgaagaccacagcgaggaggagagtgaagagggcagcggagaccttggtgagcctctttatgaagagccatgcaacgagataagcaaggagcaggccaaagccacccttctggaggaccagcaagacccttcgccctcgtcctaacaccctggcttcagtgcaactcttttccttcagctgcatgtgattttgtgataaagttcaggtaacaggatgggcagtgatggagaatcactgttgattgagattttggtttccatgtgatttgttttcttcaatagtcttattttcagtctctcaaatacagccaacttaaagttttagtttggtgtttattgaaaattaaccaaacttaatactaggagaagactgaatcattaatgatgtctcacaaattactgtgtacctaagtggtgtgatgtaaatactggaaacaaaaacagcagttgcattgattttgaaaacaaacccccttgttatctgaacatgttttcttcaggaacaaccagaggtatcacaaacactgttactcatctactggctcagactgtactacttttttttttttttttcctgaaaaagaaaccagaaaaaaatgtactcttactgagataccctctcaccccaaatgtgtaatggaaaatttttaattaagaaaaacttcagttttgccaagtgcaatggtgttgccttctttaaaaaatgccgttttcttacactaccagtggatgtccagacatgctcttagtctactagagaggtgctgccttttctaagtcataatgaggaacagtcccttaatttcttgtgtgcaactctgttttatcctagaactaagagagcattggtttgttaaagagctttcaatgtatattaaaaccttcaatactcagaaatgatggattcctccaaggagtcctttactagcctaaacattctcaaatgtttgagattcaagtgaatggaaggaaaaccacatgcctttaaaactaaactgtaataattacctggctaatttcagctaagccttcatcataatttgttccctcagtaataggagaaatataaatacagtaagtttagattattgaattggtgcttgaaatttattggttttgttgtaattttatacagattatatgagggataagatactcatcaaattgcaaattcttttttttacagaagtgtgggtaacagtcacagcagttttttttaccaacagcatacttaacagacttgctgtgtagcagtttttttctggtggagttgctgtaagtcttgtaagtctaatgtggctatcctactcttttgggcaatgcatgtattatgcattggaaaggtattttttttaagttctgttggctagctatggttttcagtacatttcctactttaagagtaattactgacaaatatgtatttcctatatgtttatactttgattataaaaaagtattttgttttgattttttaacttgctgcattgttttgatactttctatttttttggtcaaatcatgtttagaaactttggatgagttaagaagtcttaagtatgcaggcgtttacgtgattgtgccattccaaagtgcatcagaactgtcattcccttctaatatcttctcaggagtaatacaaatcaggtatttcatcatcatttggtaatatgaaaactccagtgaactcccaaggacatttacaacatttatattcacacgctgtatggaagggtgtgggtgtgtgtgaaggggcgagtggagacactgtgtgtatctctagataagaagatatgcaccacgttgaaaatactcagtgtagatctctatgtgtataggtatctgtatatctttccttttgtttacaactgttaaaaaacctcaaaatagttctcttcaaaagaagagagattccaagcaacccatctttcttcagtatgtatgttctgtacatacttatcggagcgcgccagtaagtatcaggcatatatatctgtctgttagcaatgattattacatcatcagatcagcatgtgctatactccctgcaagaaatatactgacatgaacaggcagttcttggagaagaaagagcatttctttaagtacctggggaatacagctctcagtgatcagcagggagtttatttgaggacatcagtcacctttggggttgccatgtacaatgagatttataatcatgatactcttcggtggtagtttcaaaagacactactaatacgcaggaagcgttccagctatttaatgctggcaactactgtttaatggtcagttaaatctgtgataatggttggaagtgggtggggttatgaaattgtagatgtttttagaaaaacttgtgaatgaaaatgaatccaagtgtttcatgtgaagatgttgagccattgctatcatgcattcctgtctcatggcagaaaattttgaagattaaaaaataaaataatcaaaatgtttcctctttc

SEQ ID NO: 414987 - DNA, 2984 bp, Homo sapiens
atcgagtcggccttgttgggtgctaggatttcaagtatttggtgtctggccagaaggatctgatgggacagatatcaatgcactggtgcgatcccacaatagaaaggtgatagctgttgccgatgacttttgtaaagtccatctgtttcagtatccctgctccaaagcaaaggctcccagtcacaagtacagtgcccacagcagccatgtcaccaatgtcagttttactcacaatgacagtcacctgatatcaactggtggaaaagacatgagcatcattcagtggaaacttgtggaaaagttatctttgcctcagaatgagactgtagcggatactactctaaccaaagcccccgtctcttccactgaaagtgtcatccaatctaatactcccacaccgcctccttctcagcccttaaatgagacagctgaagaggaaagtagaataagcagttctcccacacttctggagaacagcctggaacaaactgtggagccaagtgaagaccacagcgaggaggagagtgaagagggcagcggagaccttggtgagcctctttatgaagagccatgcaacgagataagcaaggagcaggccaaagccacccttctggaggaccagcaagacccttcgccctcgtcctaacaccctggcttcagtgcaactcttttccttcagctgcatgtgattttgtgataaagttcaggtaacaggatgggcagtgatggagaatcactgttgattgagattttggtttccatgtgatttgttttcttcaatagtcttattttcagtctctcaaatacagccaacttaaagttttagtttggtgtttattgaaaattaaccaaacttaatactaggagaagactgaatcattaatgatgtctcacaaattactgtgtacctaagtggtgtgatgtaaatactggaaacaaaaacagcagttgcattgattttgaaaacaaacccccttgttatctgaacatgttttcttcaggaacaaccagaggtatcacaaacactgttactcatctactggctcagactgtactacttttttttttttttttcctgaaaaagaaaccagaaaaaaatgtactcttactgagataccctctcaccccaaatgtgtaatggaaaatttttaattaagaaaaacttcagttttgccaagtgcaatggtgttgccttctttaaaaaatgccgttttcttacactaccagtggatgtccagacatgctcttagtctactagagaggtgctgccttttctaagtcataatgaggaacagtcccttaatttcttgtgtgcaactctgttttatcctagaactaagagagcattggtttgttaaagagctttcaatgtatattaaaaccttcaatactcagaaatgatggattcctccaaggagtcctttactagcctaaacattctcaaatgtttgagattcaagtgaatggaaggaaaaccacatgcctttaaaactaaactgtaataattacctggctaatttcagctaagccttcatcataatttgttccctcagtaataggagaaatataaatacagtaagtttagattattgaattggtgcttgaaatttattggttttgttgtaattttatacagattatatgagggataagatactcatcaaattgcaaattcttttttttacagaagtgtgggtaacagtcacagcagttttttttaccaacagcatacttaacagacttgctgtgtagcagtttttttctggtggagttgctgtaagtcttgtaagtctaatgtggctatcctactcttttgggcaatgcatgtattatgcattggaaaggtattttttttaagttctgttggctagctatggttttcagtacatttcctactttaagagtaattactgacaaatatgtatttcctatatgtttatactttgattataaaaaagtattttgttttgattttttaacttgctgcattgttttgatactttctatttttttggtcaaatcatgtttagaaactttggatgagttaagaagtcttaagtatgcaggcgtttacgtgattgtgccattccaaagtgcatcagaactgtcattcccttctaatatcttctcaggagtaatacaaatcaggtatttcatcatcatttggtaatatgaaaactccagtgaactcccaaggacatttacaacatttatattcacacgctgtatggaagggtgtgggtgtgtgtgaaggggcgagtggagacactgtgtgtatctctagataagaagatatgcaccacgttgaaaatactcagtgtagatctctatgtgtataggtatctgtatatctttccttttgtttacaactgttaaaaaacctcaaaatagttctcttcaaaagaagagagattccaagcaacccatctttcttcagtatgtatgttctgtacatacttatcggagcgcgccagtaagtatcaggcatatatatctgtctgttagcaatgattattacatcatcagatcagcatgtgctatactccctgcaagaaatatactgacatgaacaggcagttcttggagaagaaagagcatttctttaagtacctggggaatacagctctcagtgatcagcagggagtttatttgaggacatcagtcacctttggggttgccatgtacaatgagatttataatcatgatactcttcggtggtagtttcaaaagacactactaatacgcaggaagcgttccagctatttaatgctggcaactactgtttaatggtcagttaaatctgtgataatggttggaagtgggtggggttatgaaattgtagatgtttttagaaaaacttgtgaatgaaaatgaatccaagtgtttcatgtgaagatgttgagccattgctatcatgcattcctgtctcatggcagaaaattttgaagattaaaaaataaaataatcaaaatgtttcctctttc

SEQ ID NO: 414988 - DNA, 5762 bp, Homo sapiens
atgcctggagggaggccgggcaggcggctgagcggcgcggctctcaacgtgacggggaagtggttcgggcggccgcggcttactaccccagggcgaacggacggacgacggaggcgggagccggtagccgagccgggcgacctagagaacgagcgggtcaggctcagcgtcggccactctgtcggtccgctgaatgaagtgcccgcccctctgagcccggagcccggcgctttccccgcaagatggacggtttcgccggcagtctcgatgatagtatttctgctgcaagtacttctgatgttcaagatcgcctgtcagctcttgagtcacgagttcagcaacaagaagatgaaatcactgtgctaaaggcggctttggctgatgttttgaggcgtcttgcaatctctgaagatcatgtggcctcagtgaaaaaatcagtctcaagtaaaggccaaccaagccctcgagcagttattcccatgtcctgtataaccaatggaagtggtgcaaacagaaaaccaagtcataccagtgctgtctcaattgcaggaaaagaaactctttcatctgctgctaaaagtggtacagaaaaaaagaaagaaaaaccacaaggacagagagaaaaaaaagaggaatctcattctaatgatcaaagtccacaaattcgagcatcaccttctccccagccctcttcacaacctctccaaatacacagacaaactccagaaagcaagaatgctactcccaccaaaagcataaaacgaccatcaccagctgaaaagtcacataattcttgggaaaattcagatgatagccgtaataaattgtcgaaaataccttcaacacccaaattaataccaaaagttaccaaaactgcagacaagcataaagatgtcatcatcaaccaagaaggagaatatattaaaatgtttatgcgcggtcggccaattaccatgttcattccttccgatgttgacaactatgatgacatcagaacggaactgcctcctgagaagctcaaactggagtgggcatatggttatcgaggaaaggactgtagagctaatgtttaccttcttccgaccggggaaatagtttatttcattgcatcagtagtagtactatttaattatgaggagagaactcagcgacactacctgggccatacagactgtgtgaaatgccttgctatacatcctgacaaaattaggattgcaactggacagatagctggcgtggataaagatggaaggcctctacaaccccacgtcagagtgtgggattctgttactctatccacactgcagattattggacttggcacttttgagcgtggagtaggatgcctggatttttcaaaagcagattcaggtgttcatttatgtgttattgatgactccaatgagcatatgcttactgtatgggactggcagaagaaagcaaaaggagcagaaataaagacaacaaatgaagttgttttggctgtggagtttcacccaacagatgcaaataccataattacatgcggtaaatctcatattttcttctggacctggagcggcaattcactaacaagaaaacagggaatttttgggaaatatgaaaagccaaaatttgtgcagtgtttagcattcttggggaatggagatgttcttactggagactcaggtggagtcatgcttatatggagcaaaactactgtagagcccacacctgggaaaggacctaaaggtgtatatcaaatcagcaaacaaatcaaagctcatgatggcagtgtgttcacactttgtcagatgagaaatgggatgttattaactggaggagggaaagacagaaaaataattctgtgggatcatgatctgaatcctgaaagagaaatagaggttcctgatcagtatggcacaatcagagctgtagcagaaggaaaggcagatcaatttttagtaggcacatcacgaaactttattttacgaggaacatttaatgatggcttccaaatagaagtacagggtcatacagatgagctttggggtcttgccacacatcccttcaaagatttgctcttgacatgtgctcaggacaggcaggtgtgcctgtggaactcaatggaacacaggctggaatggaccaggctggtagatgaaccaggacactgtgcagattttcatccaagtggcacagtggtggccataggaacgcactcaggcaggtggtttgttctggatgcagaaaccagagatctagtttctatccacacagacgggaatgaacagctctctgtgatgcgctactcaatagatggtaccttcctggctgtaggatctcatgacaactttatttacctctatgtagtctctgaaaatggaagaaaatatagcagatatggaaggtgcactggacattccagctacatcacacaccttgactggtccccagacaacaagtatataatgtctaactcgggagactatgaaatattgtactgggacattccaaatggctgcaaactaatcaggaatcgatcggattgtaaggacattgattggacgacatatacctgtgtgctaggatttcaagtatttggtgtctggccagaaggatctgatgggacagatatcaatgcactggtgcgatcccacaatagaaaggtgatagctgttgccgatgacttttgtaaagtccatctgtttcagtatccctgctccaaagcaaaggctcccagtcacaagtacagtgcccacagcagccatgtcaccaatgtcagttttactcacaatgacagtcacctgatatcaactggtggaaaagacatgagcatcattcagtggaaacttgtggaaaagttatctttgcctcagaatgagactgtagcggatactactctaaccaaagcccccgtctcttccactgaaagtgtcatccaatctaatactcccacaccgcctccttctcagcccttaaatgagacagctgaagaggaaagtagaataagcagttctcccacacttctggagaacagcctggaacaaactgtggagccaagtgaagaccacagcgaggaggagagtgaagagggcagcggagaccttggtgagcctctttatgaagagccatgcaacgagataagcaaggagcaggccaaagccacccttctggaggaccagcaagacccttcgccctcgtcctaacaccctggcttcagtgcaactcttttccttcagctgcatgtgattttgtgataaagttcaggtaacaggatgggcagtgatggagaatcactgttgattgagattttggtttccatgtgatttgttttcttcaatagtcttattttcagtctctcaaatacagccaacttaaagttttagtttggtgtttattgaaaattaaccaaacttaatactaggagaagactgaatcattaatgatgtctcacaaattactgtgtacctaagtggtgtgatgtaaatactggaaacaaaaacagcagttgcattgattttgaaaacaaacccccttgttatctgaacatgttttcttcaggaacaaccagaggtatcacaaacactgttactcatctactggctcagactgtactacttttttttttttttttcctgaaaaagaaaccagaaaaaaatgtactcttactgagataccctctcaccccaaatgtgtaatggaaaatttttaattaagaaaaacttcagttttgccaagtgcaatggtgttgccttctttaaaaaatgccgttttcttacactaccagtggatgtccagacatgctcttagtctactagagaggtgctgccttttctaagtcataatgaggaacagtcccttaatttcttgtgtgcaactctgttttatcctagaactaagagagcattggtttgttaaagagctttcaatgtatattaaaaccttcaatactcagaaatgatggattcctccaaggagtcctttactagcctaaacattctcaaatgtttgagattcaagtgaatggaaggaaaaccacatgcctttaaaactaaactgtaataattacctggctaatttcagctaagccttcatcataatttgttccctcagtaataggagaaatataaatacagtaagtttagattattgaattggtgcttgaaatttattggttttgttgtaattttatacagattatatgagggataagatactcatcaaattgcaaattcttttttttacagaagtgtgggtaacagtcacagcagttttttttaccaacagcatacttaacagacttgctgtgtagcagtttttttctggtggagttgctgtaagtcttgtaagtctaatgtggctatcctactcttttgggcaatgcatgtattatgcattggaaaggtattttttttaagttctgttggctagctatggttttcagtacatttcctactttaagagtaattactgacaaatatgtatttcctatatgtttatactttgattataaaaaagtattttgttttgattttttaacttgctgcattgttttgatactttctatttttttggtcaaatcatgtttagaaactttggatgagttaagaagtcttaagtatgcaggcgtttacgtgattgtgccattccaaagtgcatcagaactgtcattcccttctaatatcttctcaggagtaatacaaatcaggtatttcatcatcatttggtaatatgaaaactccagtgaactcccaaggacatttacaacatttatattcacacgctgtatggaagggtgtgggtgtgtgtgaaggggcgagtggagacactgtgtgtatctctagataagaagatatgcaccacgttgaaaatactcagtgtagatctctatgtgtataggtatctgtatatctttccttttgtttacaactgttaaaaaacctcaaaatagttctcttcaaaagaagagagattccaagcaacccatctttcttcagtatgtatgttctgtacatacttatcggagcgcgccagtaagtatcaggcatatatatctgtctgttagcaatgattattacatcatcagatcagcatgtgctatactccctgcaagaaatatactgacatgaacaggcagttcttggagaagaaagagcatttctttaagtacctggggaatacagctctcagtgatcagcagggagtttatttgaggacatcagtcacctttggggttgccatgtacaatgagatttataatcatgatactcttcggtggtagtttcaaaagacactactaatacgcaggaagcgttccagctatttaatgctggcaactactgtttaatggtcagttaaatctgtgataatggttggaagtgggtggggttatgaaattgtagatgtttttagaaaaacttgtgaatgaaaatgaatccaagtgtttcatgtgaagatgttgagccattgctatcatgcattcctgtctcatggcagaaaattttgaagattaaaaaataaaataatcaaaatgtttcctctttcaaaaaaaaacaagggggcgctaagtatcctgaagggaccagtaagcgtacagttctgtccaagggccttagggagtgtaaaaacgcagaagcgcattacagcggccgcaacgctgcgaacttgggaggactacttcgggggcatgcacctcaaatagccagggaacaggttggcacccacggaagtgatcataaaagaaaacaaacagaaaaaaaagaataaacaaaacacccacg

SEQ ID NO: 414989 - DNA, 4790 bp, Homo sapiens
  misc_feature (4555)..(4555): n is a, c, g, or t
atgcctggagggaggccgggcaggcggctgagcggcgcggctctcaacgtgacggggaagtggttcgggcggccgcggcttactaccccagggcgaacggacggacgacggaggcgggagccggtagccgagccgggcgacctagagaacgagcgggtcaggctcagcgtcggccactctgtcggtccgctgaatgaagtgcccgcccctctgagcccggagcccggcgctttccccgcaagatggacggtttcgccggcagtctcgatgatagtatttctgctgcaagtacttctgatgttcaagatcgcctgtcagctcttgagtcacgagttcagcaacaagaagatgaaatcactgtgctaaaggcggctttggctgatgttttgaggcgtcttgcaatctctgaagatcatgtggcctcagtgaaaaaatcagtctcaagtaaaggccaaccaagccctcgagcagttattcccatgtcctgtataaccaatggaagtggtgcaaacagaaaaccaagtcataccagtgctgtctcaattgcaggaaaagaaactctttcatctgctgctaaaagtggtacagaaaaaaagaaagaaaaaccacaaggacagagagaaaaaaaagaggaatctcattctaatgatcaaagtccacaaattcgagcatcaccttctccccagccctcttcacaacctctccaaatacacagacaaactccagaaagcaagaatgctactcccaccaaaagcataaaacgaccatcaccagctgaaaagtcacataattcttgggaaaattcagatgatagccgtaataaattgtcgaaaataccttcaacacccaaattaataccaaaagttaccaaaactgcagacaagcataaagatgtcatcatcaaccaagaaggagaatatattaaaatgtttatgcgcggtcggccaattaccatgttcattccttccgatgttgacaactatgatgacatcagaacggaactgcctcctgagaagctcaaactggagtgggcatatggttatcgaggaaaggactgtagagctaatgtttaccttcttccgaccggggaaatagtttatttcattgcatcagtagtagtactatttaattatgaggagagaactcagcgacactacctgggccatacagactgtgtgaaatgccttgctatacatcctgacaaaattaggattgcaactggacagatagctggcgtggataaagatggaaggcctctacaaccccacgtcagagtgtgggattctgttactctatccacactgcagattattggacttggcacttttgagcgtggagtaggatgcctggatttttcaaaagcagattcaggtgttcatttatgtgttattgatgactccaatgagcatatgcttactgtatgggactggcagaagaaagcaaaaggagcagaaataaagacaacaaatgaagttgttttggctgtggagtttcacccaacagatgcaaataccataattacatgcggtaaatctcatattttcttctggacctggagcggcaattcactaacaagaaaacagggaatttttgggaaatatgaaaagccaaaatttgtgcagtgtttagcattcttggggaatggagatgttcttactggagactcaggtggagtcatgcttatatggagcaaaactactgtagagcccacacctgggaaaggacctaaaggtgtatatcaaatcagcaaacaaatcaaagctcatgatggcagtgtgttcacactttgtcagatgagaaatgggatgttattaactggaggagggaaagacagaaaaataattctgtgggatcatgatctgaatcctgaaagagaaatagaggttcctgatcagtatggcacaatcagagctgtagcagaaggaaaggcagatcaatttttagtaggcacatcacgaaactttattttacgaggaacatttaatgatggcttccaaatagaagtacagggtcatacagatgagctttggggtcttgccacacatcccttcaaagatttgctcttgacatgtgctcaggacaggcaggtgtgcctgtggaactcaatggaacacaggctggaatggaccaggctggtagatgaaccaggacactgtgcagattttcatccaagtggcacagtggtggccataggaacgcactcaggcaggtggtttgttctggatgcagaaaccagagatctagtttctatccacacagacgggaatgaacagctctctgtgatgcgctactcaatagatggtaccttcctggctgtaggatctcatgacaactttatttacctctatgtagtctctgaaaatggaagaaaatatagcagatatggaaggtgcactggacattccagctacatcacacaccttgactggtccccagacaacaagtatataatgtctaactcgggagactatgaaatattgtactgggacattccaaatggctgcaaactaatcaggaatcgatcggattgtaaggacattgattggacgacatatacctgtgtgctaggatttcaagtatttggtgtctggccagaaggatctgatgggacagatatcaatgcactggtgcgatcccacaatagaaaggtgatagctgttgccgatgacttttgtaaagtccatctgtttcagtatccctgctccaaagcaaaggctcccagtcacaagtacagtgcccacagcagccatgtcaccaatgtcagttttactcacaatgacagtcacctgatatcaactggtggaaaagacatgagcatcattcagtggaaacttgtggaaaagttatctttgcctcagaatgagactgtagcggatactactctaaccaaagcccccgtctcttccactgaaagtgtcatccaatctaatactcccacaccgcctccttctcagcccttaaatgagacagctgaagaggaaagtagaataagcagttctcccacacttctggagaacagcctggaacaaactgtggagccaagtgaagaccacagcgaggaggagagtgaagagggcagcggagaccttggtgagcctctttatgaagagccatgcaacgagataagcaaggagcaggccaaagccacccttctggaggaccagcaagacccttcgccctcgtcctaacaccctggcttcagtgcaactcttttccttcagctgcatgtgattttgtgataaagttcaggtaacaggatgggcagtgatggagaatcactgttgattgagattttggtttccatgtgatttgttttcttcaatagtcttattttcagtctctcaaatacagccaacttaaagttttagtttggtgtttattgaaaattaaccaaacttaatactaggagaagactgaatcattaatgatgtctcacaaattactgtgtacctaagtggtgtgatgtaaatactggaaacaaaaacagcagttgcattgattttgaaaacaaacccccttgttatctgaacatgttttcttcaggaacaaccagaggtatcacaaacactgttactcatctactggctcagactgtactacttttttttttttttttcctgaaaaagaaaccagaaaaaaatgtactcttactgagataccctctcaccccaaatgtgtaatggaaaatttttaattaagaaaaacttcagttttgccaagtgcaatggtgttgccttctttaaaaaatgccgttttcttacactaccagtggatgtccagacatgctcttagtctactagagaggtgctgccttttctaagtcataatgaggaacagtcccttaatttcttgtgtgcaaatggacggtttcgccggcagtctcgatgatagtatttctgctgcaagtacttctgatgttcaagatcgcctgtcagctcttgagtcacgagttcagcaacaagaagatgaaatcactgtgctaaaggcggctttggctgatgttttgaggcgtcttgcaatctctgaagatcatgtggcctcagtgaaaaaatcagtctcaagtaaaggccaaccaagccctcgagcagttattcccatgtcctgtataaccaatggaagtggtgcaaacagaaaaccaagtcataccagtgctgtctcaattgcaggaaaagaaactctttcatctgctgctaaaagtggtacagaaaaaaagaaagaaaaaccacaaggacagagagaaaaaaaagaggaatctcattctaatgatcaaagtccacaaattcgagcatcaccttctccccagccctcttcacaacctctccaaatacacagacaaactccagcctgggtgacagagtgagattccgtctcaacaagaaaaaaaaaaggaatcttctttgtctgtctgttgtttgtaacaacactatttgagaggacccgtagggtgtctgagcccagcacctgagttttagtactgtgttgtcggctcttccaggcctccggtgttgtctttgtgctgtgtggggatgccatgctgctgtattatgatcttggnccggcttcttgagcattcacctcacctgttacagactgttggttttccttttcgggccgtgtttgccaccctggtgttctggcttgtgttctgccgcgtcccctcatcctgtagtgcttgtgtccttgcgaacaaacaggggggctagttccgggccgtctcccttttaagcctagggtaaaagggggtaaggggaccggttggcccgggtggacccacccgatttttagtgtgc

SEQ ID NO: 414990 - DNA, 4494 bp, Homo sapiens
atgcctggagggaggccgggcaggcggctgagcggcgcggctctcaacgtgacggggaagtggttcgggcggccgcggcttactaccccagggcgaacggacggacgacggaggcgggagccggtagccgagccgggcgacctagagaacgagcgggtcaggctcagcgtcggccactctgtcggtccgctgaatgaagtgcccgcccctctgagcccggagcccggcgctttccccgcaagatggacggtttcgccggcagtctcgatgatagtatttctgctgcaagtacttctgatgttcaagatcgcctgtcagctcttgagtcacgagttcagcaacaagaagatgaaatcactgtgctaaaggcggctttggctgatgttttgaggcgtcttgcaatctctgaagatcatgtggcctcagtgaaaaaatcagtctcaagtaaaggccaaccaagccctcgagcagttattcccatgtcctgtataaccaatggaagtggtgcaaacagaaaaccaagtcataccagtgctgtctcaattgcaggaaaagaaactctttcatctgctgctaaaagtggtacagaaaaaaagaaagaaaaaccacaaggacagagagaaaaaaaagaggaatctcattctaatgatcaaagtccacaaattcgagcatcaccttctccccagccctcttcacaacctctccaaatacacagacaaactccagaaagcaagaatgctactcccaccaaaagcataaaacgaccatcaccagctgaaaagtcacataattcttgggaaaattcagatgatagccgtaataaattgtcgaaaataccttcaacacccaaattaataccaaaagttaccaaaactgcagacaagcataaagatgtcatcatcaaccaagaaggagaatatattaaaatgtttatgcgcggtcggccaattaccatgttcattccttccgatgttgacaactatgatgacatcagaacggaactgcctcctgagaagctcaaactggagtgggcatatggttatcgaggaaaggactgtagagctaatgtttaccttcttccgaccggggaaatagtttatttcattgcatcagtagtagtactatttaattatgaggagagaactcagcgacactacctgggccatacagactgtgtgaaatgccttgctatacatcctgacaaaattaggattgcaactggacagatagctggcgtggataaagatggaaggcctctacaaccccacgtcagagtgtgggattctgttactctatccacactgcagattattggacttggcacttttgagcgtggagtaggatgcctggatttttcaaaagcagattcaggtgttcatttatgtgttattgatgactccaatgagcatatgcttactgtatgggactggcagaagaaagcaaaaggagcagaaataaagacaacaaatgaagttgttttggctgtggagtttcacccaacagatgcaaataccataattacatgcggtaaatctcatattttcttctggacctggagcggcaattcactaacaagaaaacagggaatttttgggaaatatgaaaagccaaaatttgtgcagtgtttagcattcttggggaatggagatgttcttactggagactcaggtggagtcatgcttatatggagcaaaactactgtagagcccacacctgggaaaggacctaaaggtgtatatcaaatcagcaaacaaatcaaagctcatgatggcagtgtgttcacactttgtcagatgagaaatgggatgttattaactggaggagggaaagacagaaaaataattctgtgggatcatgatctgaatcctgaaagagaaatagaggttcctgatcagtatggcacaatcagagctgtagcagaaggaaaggcagatcaatttttagtaggcacatcacgaaactttattttacgaggaacatttaatgatggcttccaaatagaagtacagggtcatacagatgagctttggggtcttgccacacatcccttcaaagatttgctcttgacatgtgctcaggacaggcaggtgtgcctgtggaactcaatggaacacaggctggaatggaccaggctggtagatgaaccaggacactgtgcagattttcatccaagtggcacagtggtggccataggaacgcactcaggcaggtggtttgttctggatgcagaaaccagagatctagtttctatccacacagacgggaatgaacagctctctgtgatgcgctactcaatagatggtaccttcctggctgtaggatctcatgacaactttatttacctctatgtagtctctgaaaatggaagaaaatatagcagatatggaaggtgcactggacattccagctacatcacacaccttgactggtccccagacaacaagtatataatgtctaactcgggagactatgaaatattgtactgggacattccaaatggctgcaaactaatcaggaatcgatcggattgtaaggacattgattggacgacatatacctgtgtgctaggatttcaagtatttggtgtctggccagaaggatctgatgggacagatatcaatgcactggtgcgatcccacaatagaaaggtgatagctgttgccgatgacttttgtaaagtccatctgtttcagtatccctgctccaaagcaaaggctcccagtcacaagtacagtgcccacagcagccatgtcaccaatgtcagttttactcacaatgacagtcacctgatatcaactggtggaaaagacatgagcatcattcagtggaaacttgtggaaaagttatctttgcctcagaatgagactgtagcggatactactctaaccaaagcccccgtctcttccactgaaagtgtcatccaatctaatactcccacaccgcctccttctcagcccttaaatgagacagctgaagaggaaagtagaataagcagttctcccacacttctggagaacagcctggaacaaactgtggagccaagtgaagaccacagcgaggaggagagtgaagagggcagcggagaccttggtgagcctctttatgaagagccatgcaacgagataagcaaggagcaggccaaagccacccttctggaggaccagcaagacccttcgccctcgtcctaacaccctggcttcagtgcaactcttttccttcagctgcatgtgattttgtgataaagttcaggtaacaggatgggcagtgatggagaatcactgttgattgagattttggtttccatgtgatttgttttcttcaatagtcttattttcagtctctcaaatacagccaacttaaagttttagtttggtgtttattgaaaattaaccaaacttaatactaggagaagactgaatcattaatgatgtctcacaaattactgtgtacctaagtggtgtgatgtaaatactggaaacaaaaacagcagttgcattgattttgaaaacaaacccccttgttatctgaacatgttttcttcaggaacaaccagaggtatcacaaacactgttactcatctactggctcagactgtactacttttttttttttttttcctgaaaaagaaaccagaaaaaaatgtactcttactgagataccctctcaccccaaatgtgtaatggaaaatttttaattaagaaaaacttcagttttgccaagtgcaatggtgttgccttctttaaaaaatgccgttttcttacactaccagtggatgtccagacatgctcttagtctactagagaggtgctgccttttctaagtcataatgaggaacagtcccttaatttcttgtgtgcaaatggacggtttcgccggcagtctcgatgatagtatttctgctgcaagtacttctgatgttcaagatcgcctgtcagctcttgagtcacgagttcagcaacaagaagatgaaatcactgtgctaaaggcggctttggctgatgttttgaggcgtcttgcaatctctgaagatcatgtggcctcagtgaaaaaatcagtctcaagtaaaggccaaccaagccctcgagcagttattcccatgtcctgtataaccaatggaagtggtgcaaacagaaaaccaagtcataccagtgctgtctcaattgcaggaaaagaaactctttcatctgctgctaaaagtggtacagaaaaaaagaaagaaaaaccacaaggacagagagaaaaaaaagaggaatctcattctaatgatcaaagtccacaaattcgagcatcaccttctccccagccctcttcacaacctctccaaatacacagacaaactccagaaagcaagaatgctactcccaccaaaagcataaaacgaccatcaccagctgaaaagtcacataattcttgggaaaattcagatgatagccgtaataaattgtcgaaaataccttcaacacccaaattaataccaaaagttaccaaaactgc

SEQ ID NO: 414991 - DNA, 4574 bp, Homo sapiens
atgcctggagggaggccgggcaggcggctgagcggcgcggctctcaacgtgacggggaagtggttcgggcggccgcggcttactaccccagggcgaacggacggacgacggaggcgggagccggtagccgagccgggcgacctagagaacgagcgggtcaggctcagcgtcggccactctgtcggtccgctgaatgaagtgcccgcccctctgagcccggagcccggcgctttccccgcaagatggacggtttcgccggcagtctcgatgatagtatttctgctgcaagtacttctgatgttcaagatcgcctgtcagctcttgagtcacgagttcagcaacaagaagatgaaatcactgtgctaaaggcggctttggctgatgttttgaggcgtcttgcaatctctgaagatcatgtggcctcagtgaaaaaatcagtctcaagtaaaggccaaccaagccctcgagcagttattcccatgtcctgtataaccaatggaagtggtgcaaacagaaaaccaagtcataccagtgctgtctcaattgcaggaaaagaaactctttcatctgctgctaaaagtggtacagaaaaaaagaaagaaaaaccacaaggacagagagaaaaaaaagaggaatctcattctaatgatcaaagtccacaaattcgagcatcaccttctccccagccctcttcacaacctctccaaatacacagacaaactccagaaagcaagaatgctactcccaccaaaagcataaaacgaccatcaccagctgaaaagtcacataattcttgggaaaattcagatgatagccgtaataaattgtcgaaaataccttcaacacccaaattaataccaaaagttaccaaaactgcagacaagcataaagatgtcatcatcaaccaagaaggagaatatattaaaatgtttatgcgcggtcggccaattaccatgttcattccttccgatgttgacaactatgatgacatcagaacggaactgcctcctgagaagctcaaactggagtgggcatatggttatcgaggaaaggactgtagagctaatgtttaccttcttccgaccggggaaatagtttatttcattgcatcagtagtagtactatttaattatgaggagagaactcagcgacactacctgggccatacagactgtgtgaaatgccttgctatacatcctgacaaaattaggattgcaactggacagatagctggcgtggataaagatggaaggcctctacaaccccacgtcagagtgtgggattctgttactctatccacactgcagattattggacttggcacttttgagcgtggagtaggatgcctggatttttcaaaagcagattcaggtgttcatttatgtgttattgatgactccaatgagcatatgcttactgtatgggactggcagaagaaagcaaaaggagcagaaataaagacaacaaatgaagttgttttggctgtggagtttcacccaacagatgcaaataccataattacatgcggtaaatctcatattttcttctggacctggagcggcaattcactaacaagaaaacagggaatttttgggaaatatgaaaagccaaaatttgtgcagtgtttagcattcttggggaatggagatgttcttactggagactcaggtggagtcatgcttatatggagcaaaactactgtagagcccacacctgggaaaggacctaaaggtgtatatcaaatcagcaaacaaatcaaagctcatgatggcagtgtgttcacactttgtcagatgagaaatgggatgttattaactggaggagggaaagacagaaaaataattctgtgggatcatgatctgaatcctgaaagagaaatagaggttcctgatcagtatggcacaatcagagctgtagcagaaggaaaggcagatcaatttttagtaggcacatcacgaaactttattttacgaggaacatttaatgatggcttccaaatagaagtacagggtcatacagatgagctttggggtcttgccacacatcccttcaaagatttgctcttgacatgtgctcaggacaggcaggtgtgcctgtggaactcaatggaacacaggctggaatggaccaggctggtagatgaaccaggacactgtgcagattttcatccaagtggcacagtggtggccataggaacgcactcaggcaggtggtttgttctggatgcagaaaccagagatctagtttctatccacacagacgggaatgaacagctctctgtgatgcgctactcaatagatggtaccttcctggctgtaggatctcatgacaactttatttacctctatgtagtctctgaaaatggaagaaaatatagcagatatggaaggtgcactggacattccagctacatcacacaccttgactggtccccagacaacaagtatataatgtctaactcgggagactatgaaatattgtactgggacattccaaatggctgcaaactaatcaggaatcgatcggattgtaaggacattgattggacgacatatacctgtgtgctaggatttcaagtatttggtgtctggccagaaggatctgatgggacagatatcaatgcactggtgcgatcccacaatagaaaggtgatagctgttgccgatgacttttgtaaagtccatctgtttcagtatccctgctccaaagcaaaggctcccagtcacaagtacagtgcccacagcagccatgtcaccaatgtcagttttactcacaatgacagtcacctgatatcaactggtggaaaagacatgagcatcattcagtggaaacttgtggaaaagttatctttgcctcagaatgagactgtagcggatactactctaaccaaagcccccgtctcttccactgaaagtgtcatccaatctaatactcccacaccgcctccttctcagcccttaaatgagacagctgaagaggaaagtagaataagcagttctcccacacttctggagaacagcctggaacaaactgtggagccaagtgaagaccacagcgaggaggagagtgaagagggcagcggagaccttggtgagcctctttatgaagagccatgcaacgagataagcaaggagcaggccaaagccacccttctggaggaccagcaagacccttcgccctcgtcctaacaccctggcttcagtgcaactcttttccttcagctgcatgtgattttgtgataaagttcaggtaacaggatgggcagtgatggagaatcactgttgattgagattttggtttccatgtgatttgttttcttcaatagtcttattttcagtctctcaaatacagccaacttaaagttttagtttggtgtttattgaaaattaaccaaacttaatactaggagaagactgaatcattaatgatgtctcacaaattactgtgtacctaagtggtgtgatgtaaatactggaaacaaaaacagcagttgcattgattttgaaaacaaacccccttgttatctgaacatgttttcttcaggaacaaccagaggtatcacaaacactgttactcatctactggctcagactgtactacttttttttttttttttcctgaaaaagaaaccagaaaaaaatgtactcttactgagataccctctcaccccaaatgtgtaatggaaaatttttaattaagaaaaacttcagttttgccaagtgcaatggtgttgccttctttaaaaaatgccgttttcttacactaccagtggatgtccagacatgctcttagtctactagagaggtgctgccttttctaagtcataatgaggaacagtcccttaatttcttgtgtgcaaatggacggtttcgccggcagtctcgatgatagtatttctgctgcaagtacttctgatgttcaagatcgcctgtcagctcttgagtcacgagttcagcaacaagaagatgaaatcactgtgctaaaggcggctttggctgatgttttgaggcgtcttgcaatctctgaagatcatgtggcctcagtgaaaaaatcagtctcaagtaaaggccaaccaagccctcgagcagttattcccatgtcctgtataaccaatggaagtggtgcaaacagaaaaccaagtcataccagtgctgtctcaattgcaggaaaagaaactctttcatctgctgctaaaagtggtacagaaaaaaagaaagaaaaaccacaaggacagagagaaaaaaaagaggaatctcattctaatgatcaaagtccacaaattcgagcatcaccttctccccagccctcttcacaacctctccaaatacacagacaaactccagaaagcaagaatgctactcccaccaaaaggttttaactgtccccaagtacagagctagggaatggttgtaatgatacctaaattctgtgacttgggaaaaagttagctatccaaggattctgagagaaaaagctggtggctttatttttcccttcttcattgcttataatttatgctttatagcccattggggaataaagaattaaggtcacaatttctcagttaaaactgg

SEQ ID NO: 414992 - DNA, 4672 bp, Homo sapiens
atgcctggagggaggccgggcaggcggctgagcggcgcggctctcaacgtgacggggaagtggttcgggcggccgcggcttactaccccagggcgaacggacggacgacggaggcgggagccggtagccgagccgggcgacctagagaacgagcgggtcaggctcagcgtcggccactctgtcggtccgctgaatgaagtgcccgcccctctgagcccggagcccggcgctttccccgcaagatggacggtttcgccggcagtctcgatgatagtatttctgctgcaagtacttctgatgttcaagatcgcctgtcagctcttgagtcacgagttcagcaacaagaagatgaaatcactgtgctaaaggcggctttggctgatgttttgaggcgtcttgcaatctctgaagatcatgtggcctcagtgaaaaaatcagtctcaagtaaaggccaaccaagccctcgagcagttattcccatgtcctgtataaccaatggaagtggtgcaaacagaaaaccaagtcataccagtgctgtctcaattgcaggaaaagaaactctttcatctgctgctaaaagtggtacagaaaaaaagaaagaaaaaccacaaggacagagagaaaaaaaagaggaatctcattctaatgatcaaagtccacaaattcgagcatcaccttctccccagccctcttcacaacctctccaaatacacagacaaactccagaaagcaagaatgctactcccaccaaaagcataaaacgaccatcaccagctgaaaagtcacataattcttgggaaaattcagatgatagccgtaataaattgtcgaaaataccttcaacacccaaattaataccaaaagttaccaaaactgcagacaagcataaagatgtcatcatcaaccaagaaggagaatatattaaaatgtttatgcgcggtcggccaattaccatgttcattccttccgatgttgacaactatgatgacatcagaacggaactgcctcctgagaagctcaaactggagtgggcatatggttatcgaggaaaggactgtagagctaatgtttaccttcttccgaccggggaaatagtttatttcattgcatcagtagtagtactatttaattatgaggagagaactcagcgacactacctgggccatacagactgtgtgaaatgccttgctatacatcctgacaaaattaggattgcaactggacagatagctggcgtggataaagatggaaggcctctacaaccccacgtcagagtgtgggattctgttactctatccacactgcagattattggacttggcacttttgagcgtggagtaggatgcctggatttttcaaaagcagattcaggtgttcatttatgtgttattgatgactccaatgagcatatgcttactgtatgggactggcagaagaaagcaaaaggagcagaaataaagacaacaaatgaagttgttttggctgtggagtttcacccaacagatgcaaataccataattacatgcggtaaatctcatattttcttctggacctggagcggcaattcactaacaagaaaacagggaatttttgggaaatatgaaaagccaaaatttgtgcagtgtttagcattcttggggaatggagatgttcttactggagactcaggtggagtcatgcttatatggagcaaaactactgtagagcccacacctgggaaaggacctaaaggtgtatatcaaatcagcaaacaaatcaaagctcatgatggcagtgtgttcacactttgtcagatgagaaatgggatgttattaactggaggagggaaagacagaaaaataattctgtgggatcatgatctgaatcctgaaagagaaatagaggttcctgatcagtatggcacaatcagagctgtagcagaaggaaaggcagatcaatttttagtaggcacatcacgaaactttattttacgaggaacatttaatgatggcttccaaatagaagtacagggtcatacagatgagctttggggtcttgccacacatcccttcaaagatttgctcttgacatgtgctcaggacaggcaggtgtgcctgtggaactcaatggaacacaggctggaatggaccaggctggtagatgaaccaggacactgtgcagattttcatccaagtggcacagtggtggccataggaacgcactcaggcaggtggtttgttctggatgcagaaaccagagatctagtttctatccacacagacgggaatgaacagctctctgtgatgcgctactcaatagatggtaccttcctggctgtaggatctcatgacaactttatttacctctatgtagtctctgaaaatggaagaaaatatagcagatatggaaggtgcactggacattccagctacatcacacaccttgactggtccccagacaacaagtatataatgtctaactcgggagactatgaaatattgtactgggacattccaaatggctgcaaactaatcaggaatcgatcggattgtaaggacattgattggacgacatatacctgtgtgctaggatttcaagtatttggtgtctggccagaaggatctgatgggacagatatcaatgcactggtgcgatcccacaatagaaaggtgatagctgttgccgatgacttttgtaaagtccatctgtttcagtatccctgctccaaagcaaaggctcccagtcacaagtacagtgcccacagcagccatgtcaccaatgtcagttttactcacaatgacagtcacctgatatcaactggtggaaaagacatgagcatcattcagtggaaacttgtggaaaagttatctttgcctcagaatgagactgtagcggatactactctaaccaaagcccccgtctcttccactgaaagtgtcatccaatctaatactcccacaccgcctccttctcagcccttaaatgagacagctgaagaggaaagtagaataagcagttctcccacacttctggagaacagcctggaacaaactgtggagccaagtgaagaccacagcgaggaggagagtgaagagggcagcggagaccttggtgagcctctttatgaagagccatgcaacgagataagcaaggagcaggccaaagccacccttctggaggaccagcaagacccttcgccctcgtcctaacaccctggcttcagtgcaactcttttccttcagctgcatgtgattttgtgataaagttcaggtaacaggatgggcagtgatggagaatcactgttgattgagattttggtttccatgtgatttgttttcttcaatagtcttattttcagtctctcaaatacagccaacttaaagttttagtttggtgtttattgaaaattaaccaaacttaatactaggagaagactgaatcattaatgatgtctcacaaattactgtgtacctaagtggtgtgatgtaaatactggaaacaaaaacagcagttgcattgattttgaaaacaaacccccttgttatctgaacatgttttcttcaggaacaaccagaggtatcacaaacactgttactcatctactggctcagactgtactacttttttttttttttttcctgaaaaagaaaccagaaaaaaatgtactcttactgagataccctctcaccccaaatgtgtaatggaaaatttttaattaagaaaaacttcagttttgccaagtgcaatggtgttgccttctttaaaaaatgccgttttcttacactaccagtggatgtccagacatgctcttagtctactagagaggtgctgccttttctaagtcataatgaggaacagtcccttaatttcttgtgtgcaaatggacggtttcgccggcagtctcgatgatagtatttctgctgcaagtacttctgatgttcaagatcgcctgtcagctcttgagtcacgagttcagcaacaagaagatgaaatcactgtgctaaaggcggctttggctgatgttttgaggcgtcttgcaatctctgaagatcatgtggcctcagtgaaaaaatcagtctcaagtaaaggccaaccaagccctcgagcagttattcccatgtcctgtataaccaatggaagtggtgcaaacagaaaaccaagtcataccagtgctgtctcaattgcaggaaaagaaactctttcatctgctgctaaaaggctggagtgcaatggcgcaatctcggctcaccgcaacctgcacctcccgtgttcaagagattctcctgctgcagcacccggagtagctgggattacagtggtacagaaaaaaagaaagaaaaaccacaaggacagagagaaaaaaaagaggaatctcattctaatgatcaaagtccacaaattcgagcatcaccttctccccagccctcttcacaacctctccaaatacacagacaaactccagaaagcaagaatgctactcccaccaaaaggttttaactgtccccaagtacagagctagggaatggttgtaatgatacctaaattctgtgacttgggaaaaagttagctatccaaggattctgagagaaaaagctggtggctttatttttcccttcttcattgcttataatttatgctttatagcccattggggaataaagaattaaggtcacaatttctcagttaaaactgg

SEQ ID NO: 414993 - DNA, 3723 bp, Homo sapiens
atgcctggagggaggccgggcaggcggctgagcggcgcggctctcaacgtgacggggaagtggttcgggcggccgcggcttactaccccagggcgaacggacggacgacggaggcgggagccggtagccgagccgggcgacctagagaacgagcgggtcaggctcagcgtcggccactctgtcggtccgctgaatgaagtgcccgcccctctgagcccggagcccggcgctttccccgcaagatggacggtttcgccggcagtctcgatgatagtatttctgctgcaagtacttctgatgttcaagatcgcctgtcagctcttgagtcacgagttcagcaacaagaagatgaaatcactgtgctaaaggcggctttggctgatgttttgaggcgtcttgcaatctctgaagatcatgtggcctcagtgaaaaaatcagtctcaagtaaaggccaaccaagccctcgagcagttattcccatgtcctgtataaccaatggaagtggtgcaaacagaaaaccaagtcataccagtgctgtctcaattgcaggaaaagaaactctttcatctgctgctaaaagtggtacagaaaaaaagaaagaaaaaccacaaggacagagagaaaaaaaagaggaatctcattctaatgatcaaagtccacaaattcgagcatcaccttctccccagccctcttcacaacctctccaaatacacagacaaactccagaaagcaagaatgctactcccaccaaaagcataaaacgaccatcaccagctgaaaagtcacataattcttgggaaaattcagatgatagccgtaataaattgtcgaaaataccttcaacacccaaattaataccaaaagttaccaaaactgcagacaagcataaagatgtcatcatcaaccaagaaggagaatatattaaaatgtttatgcgcggtcggccaattaccatgttcattccttccgatgttgacaactatgatgacatcagaacggaactgcctcctgagaagctcaaactggagtgggcatatggttatcgaggaaaggactgtagagctaatgtttaccttcttccgaccggggaaatagtttatttcattgcatcagtagtagtactatttaattatgaggagagaactcagcgacactacctgggccatacagactgtgtgaaatgccttgctatacatcctgacaaaattaggattgcaactggacagatagctggcgtggataaagatggaaggcctctacaaccccacgtcagagtgtgggattctgttactctatccacactgcagattattggacttggcacttttgagcgtggagtaggatgcctggatttttcaaaagcagattcaggtgttcatttatgtgttattgatgactccaatgagcatatgcttactgtatgggactggcagaagaaagcaaaaggagcagaaataaagacaacaaatgaagttgttttggctgtggagtttcacccaacagatgcaaataccataattacatgcggtaaatctcatattttcttctggacctggagcggcaattcactaacaagaaaacagggaatttttgggaaatatgaaaagccaaaatttgtgcagtgtttagcattcttggggaatggagatgttcttactggagactcaggtggagtcatgcttatatggagcaaaactactgtagagcccacacctgggaaaggacctaaaggtgtatatcaaatcagcaaacaaatcaaagctcatgatggcagtgtgttcacactttgtcagatgagaaatgggatgttattaactggaggagggaaagacagaaaaataattctgtgggatcatgatctgaatcctgaaagagaaatagaggttcctgatcagtatggcacaatcagagctgtagcagaaggaaaggcagatcaatttttagtaggcacatcacgaaactttattttacgaggaacatttaatgatggcttccaaatagaagtacagggtcatacagatgagctttggggtcttgccacacatcccttcaaagatttgctcttgacatgtgctcaggacaggcaggtgtgcctgtggaactcaatggaacacaggctggaatggaccaggctggtagatgaaccaggacactgtgcagattttcatccaagtggcacagtggtggccataggaacgcactcaggcaggtggtttgttctggatgcagaaaccagagatctagtttctatccacacagacgggaatgaacagctctctgtgatgcgctactcaatagatggtaccttcctggctgtaggatctcatgacaactttatttacctctatgtagtctctgaaaatggaagaaaatatagcagatatggaaggtgcactggacattccagctacatcacacaccttgactggtccccagacaacaagtatataatgtctaactcgggagactatgaaatattgtactgggacattccaaatggctgcaaactaatcaggaatcgatcggattgtaaggacattgattggacgacatatacctgtgtgctaggatttcaagtatttggtgtctggccagaaggatctgatgggacagatatcaatgcactggtgcgatcccacaatagaaaggtgatagctgttgccgatgacttttgtaaagtccatctgtttcagtatccctgctccaaagcaaaggctcccagtcacaagtacagtgcccacagcagccatgtcaccaatgtcagttttactcacaatgacagtcacctgatatcaactggtggaaaagacatgagcatcattcagtggaaacttgtggaaaagttatctttgcctcagaatgagactgtagcggatactactctaaccaaagcccccgtctcttccactgaaagtgtcatccaatctaatactcccacaccgcctccttctcagcccttaaatgagacagctgaagaggaaagtagaataagcagttctcccacacttctggagaacagcctggaacaaactgtggagccaagtgaagaccacagcgaggaggagagtgaagagggcagcggagaccttggtgagcctctttatgaagagccatgcaacgagataagcaaggagcaggccaaagccacccttctggaggaccagcaagacccttcgccctcgtcctaacaccctggcttcagtgcaactcttttccttcagctgcatgtgattttgtgataaagttcaggtaacaggatgggcagtgatggagaatcactgttgattgagattttggtttccatgtgatttgttttcttcaatagtcttattttcagtctctcaaatacagccaacttaaagttttagtttggtgtttattgaaaattaaccaaacttaatactaggagaagactgaatcattaatgatgtctcacaaattactgtgtacctaagtggtgtgatgtaaatactggaaacaaaaacagcagttgcattgattttgaaaacaaacccccttgttatctgaacatgttttcttcaggaacaaccagaggtatcacaaacactgttactcatctactggctcagactgtactacttttttttttttttttcctgaaaaagaaaccagaaaaaaatgtactcttactgagataccctctcaccccaaatgtgtaatggaaaatttttaattaagaaaaacttcagttttgccaagtgc

SEQ ID NO: 414994 - DNA, 2248 bp, Homo sapiens
  misc_feature (2013)..(2013): n is a, c, g, or t
atcgagtcggccttgttgggtgctaggatttcaagtatttggtgtctggccagaaggatctgatgggacagatatcaatgcactggtgcgatcccacaatagaaaggtgatagctgttgccgatgacttttgtaaagtccatctgtttcagtatccctgctccaaagcaaaggctcccagtcacaagtacagtgcccacagcagccatgtcaccaatgtcagttttactcacaatgacagtcacctgatatcaactggtggaaaagacatgagcatcattcagtggaaacttgtggaaaagttatctttgcctcagaatgagactgtagcggatactactctaaccaaagcccccgtctcttccactgaaagtgtcatccaatctaatactcccacaccgcctccttctcagcccttaaatgagacagctgaagaggaaagtagaataagcagttctcccacacttctggagaacagcctggaacaaactgtggagccaagtgaagaccacagcgaggaggagagtgaagagggcagcggagaccttggtgagcctctttatgaagagccatgcaacgagataagcaaggagcaggccaaagccacccttctggaggaccagcaagacccttcgccctcgtcctaacaccctggcttcagtgcaactcttttccttcagctgcatgtgattttgtgataaagttcaggtaacaggatgggcagtgatggagaatcactgttgattgagattttggtttccatgtgatttgttttcttcaatagtcttattttcagtctctcaaatacagccaacttaaagttttagtttggtgtttattgaaaattaaccaaacttaatactaggagaagactgaatcattaatgatgtctcacaaattactgtgtacctaagtggtgtgatgtaaatactggaaacaaaaacagcagttgcattgattttgaaaacaaacccccttgttatctgaacatgttttcttcaggaacaaccagaggtatcacaaacactgttactcatctactggctcagactgtactacttttttttttttttttcctgaaaaagaaaccagaaaaaaatgtactcttactgagataccctctcaccccaaatgtgtaatggaaaatttttaattaagaaaaacttcagttttgccaagtgcaatggtgttgccttctttaaaaaatgccgttttcttacactaccagtggatgtccagacatgctcttagtctactagagaggtgctgccttttctaagtcataatgaggaacagtcccttaatttcttgtgtgcaaatggacggtttcgccggcagtctcgatgatagtatttctgctgcaagtacttctgatgttcaagatcgcctgtcagctcttgagtcacgagttcagcaacaagaagatgaaatcactgtgctaaaggcggctttggctgatgttttgaggcgtcttgcaatctctgaagatcatgtggcctcagtgaaaaaatcagtctcaagtaaaggccaaccaagccctcgagcagttattcccatgtcctgtataaccaatggaagtggtgcaaacagaaaaccaagtcataccagtgctgtctcaattgcaggaaaagaaactctttcatctgctgctaaaagtggtacagaaaaaaagaaagaaaaaccacaaggacagagagaaaaaaaagaggaatctcattctaatgatcaaagtccacaaattcgagcatcaccttctccccagccctcttcacaacctctccaaatacacagacaaactccagcctgggtgacagagtgagattccgtctcaacaagaaaaaaaaaaggaatcttctttgtctgtctgttgtttgtaacaacactatttgagaggacccgtagggtgtctgagcccagcacctgagttttagtactgtgttgtcggctcttccaggcctccggtgttgtctttgtgctgtgtggggatgccatgctgctgtattatgatcttggnccggcttcttgagcattcacctcacctgttacagactgttggttttccttttcgggccgtgtttgccaccctggtgttctggcttgtgttctgccgcgtcccctcatcctgtagtgcttgtgtccttgcgaacaaacaggggggctagttccgggccgtctcccttttaagcctagggtaaaagggggtaaggggaccggttggcccgggtggacccacccgatttttagtgtgc

SEQ ID NO: 414995 - DNA, 3551 bp, Homo sapiens
  misc_feature (3413)..(3413): n is a, c, g, or t
  misc_feature (3436)..(3436): n is a, c, g, or t
  misc_feature (3438)..(3438): n is a, c, g, or t
  misc_feature (3465)..(3465): n is a, c, g, or t
  misc_feature (3483)..(3483): n is a, c, g, or t
atgcctggagggaggccgggcaggcggctgagcggcgcggctctcaacgtgacggggaagtggttcgggcggccgcggcttactaccccagggcgaacggacggacgacggaggcgggagccggtagccgagccgggcgacctagagaacgagcgggtcaggctcagcgtcggccactctgtcggtccgctgaatgaagtgcccgcccctctgagcccggagcccggcgctttccccgcaagatggacggtttcgccggcagtctcgatgatagtatttctgctgcaagtacttctgatgttcaagatcgcctgtcagctcttgagtcacgagttcagcaacaagaagatgaaatcactgtgctaaaggcggctttggctgatgttttgaggcgtcttgcaatctctgaagatcatgtggcctcagtgaaaaaatcagtctcaagtaaaggccaaccaagccctcgagcagttattcccatgtcctgtataaccaatggaagtggtgcaaacagaaaaccaagtcataccagtgctgtctcaattgcaggaaaagaaactctttcatctgctgctaaaagtggtacagaaaaaaagaaagaaaaaccacaaggacagagagaaaaaaaagaggaatctcattctaatgatcaaagtccacaaattcgagcatcaccttctccccagccctcttcacaacctctccaaatacacagacaaactccagaaagcaagaatgctactcccaccaaaagcataaaacgaccatcaccagctgaaaagtcacataattcttgggaaaattcagatgatagccgtaataaattgtcgaaaataccttcaacacccaaattaataccaaaagttaccaaaactgcagacaagcataaagatgtcatcatcaaccaagaaggagaatatattaaaatgtttatgcgcggtcggccaattaccatgttcattccttccgatgttgacaactatgatgacatcagaacggaactgcctcctgagaagctcaaactggagtgggcatatggttatcgaggaaaggactgtagagctaatgtttaccttcttccgaccggggaaatagtttatttcattgcatcagtagtagtactatttaattatgaggagagaactcagcgacactacctgggccatacagactgtgtgaaatgccttgctatacatcctgacaaaattaggattgcaactggacagatagctggcgtggataaagatggaaggcctctacaaccccacgtcagagtgtgggattctgttactctatccacactgcagattattggacttggcacttttgagcgtggagtaggatgcctggatttttcaaaagcagattcaggtgttcatttatgtgttattgatgactccaatgagcatatgcttactgtatgggactggcagaagaaagcaaaaggagcagaaataaagacaacaaatgaagttgttttggctgtggagtttcacccaacagatgcaaataccataattacatgcggtaaatctcatattttcttctggacctggagcggcaattcactaacaagaaaacagggaatttttgggaaatatgaaaagccaaaatttgtgcagtgtttagcattcttggggaatggagatgttcttactggagactcaggtggagtcatgcttatatggagcaaaactactgtagagcccacacctgggaaaggacctaaaggtgtatatcaaatcagcaaacaaatcaaagctcatgatggcagtgtgttcacactttgtcagatgagaaatgggatgttattaactggaggagggaaagacagaaaaataattctgtgggatcatgatctgaatcctgaaagagaaatagaggttcctgatcagtatggcacaatcagagctgtagcagaaggaaaggcagatcaatttttagtaggcacatcacgaaactttattttacgaggaacatttaatgatggcttccaaatagaagtacagggtcatacagatgagctttggggtcttgccacacatcccttcaaagatttgctcttgacatgtgctcaggacaggcaggtgtgcctgtggaactcaatggaacacaggctggaatggaccaggctggtagatgaaccaggacactgtgcagattttcatccaagtggcacagtggtggccataggaacgcactcaggcaggtggtttgttctggatgcagaaaccagagatctagtttctatccacacagacgggaatgaacagctctctgtgatgcgctactcaatagatggtaccttcctggctgtaggatctcatgacaactttatttacctctatgtagtctctgaaaatggaagaaaatatagcagatatggaaggtgcactggacattccagctacatcacacaccttgactggtccccagacaacaagtatataatgtctaactcgggagactatgaaatattgtactgggacattccaaatggctgcaaactaatcaggaatcgatcggattgtaaggacattgattggacgacatatacctgtgtgctaggatttcaagtatttggtgtctggccagaaggatctgatgggacagatatcaatgcactggtgcgatcccacaatagaaaggtgatagctgttgccgatgacttttgtaaagtccatctgtttcagtatccctgctccaaagcaaaggctcccagtcacaagtacagtgcccacagcagccatgtcaccaatgtcagttttactcacaatgacagtcacctgatatcaactggtggaaaagacatgagcatcattcagtggaaacttgtggaaaagttatctttgcctcagaatgagactgtagcggatactactctaaccaaagcccccgtctcttccactgaaagtgtcatccaatctaatactcccacaccgcctccttctcagcccttaaatgagacagctgaagaggaaagtagaataagcagttctcccacacttctggagaacagcctggaacaaactgtggagccaagtgaagaccacagcgaggaggagagtgaagagggcagcggagaccttggtgagcctctttatgaagagccatgcaacgagataagcaaggagcaggccaaagccacccttctggaggaccagcaagacccttcgccctcgtcctaacaccctggcttcagtgcaactcttttccttcagctgcatgtgattttgtgataaagttcaggtaacaggatgggcagtgatggagaatcactgttgattgagattttggtttccatgtgatttgttttcttcaatagtcttattttcagtctctcaaatacagccaacttaaagttttagtttggtgtttattgaaaattaaccaaacttaaaaacccaaggggnaaggcctgggatcccttaaatgngnggccccaacaaaaattacctgggggancccaaaggggggggtagntggaaaaaacctgggggaaccaaaaaaccagggaggttcccatttgggtttttggaaaaccaaaaccc

SEQ ID NO: 414996 - DNA, 3102 bp, Homo sapiens
atgcctggagggaggccgggcaggcggctgagcggcgcggctctcaacgtgacggggaagtggttcgggcggccgcggcttactaccccagggcgaacggacggacgacggaggcgggagccggtagccgagccgggcgacctagagaacgagcgggtcaggctcagcgtcggccactctgtcggtccgctgaatgaagtgcccgcccctctgagcccggagcccggcgctttccccgcaagatggacggtttcgccggcagtctcgatgatagtatttctgctgcaagtacttctgatgttcaagatcgcctgtcagctcttgagtcacgagttcagcaacaagaagatgaaatcactgtgctaaaggcggctttggctgatgttttgaggcgtcttgcaatctctgaagatcatgtggcctcagtgaaaaaatcagtctcaagtaaaggccaaccaagccctcgagcagttattcccatgtcctgtataaccaatggaagtggtgcaaacagaaaaccaagtcataccagtgctgtctcaattgcaggaaaagaaactctttcatctgctgctaaaagtggtacagaaaaaaagaaagaaaaaccacaaggacagagagaaaaaaaagaggaatctcattctaatgatcaaagtccacaaattcgagcatcaccttctccccagccctcttcacaacctctccaaatacacagacaaactccagaaagcaagaatgctactcccaccaaaagcataaaacgaccatcaccagctgaaaagtcacataattcttgggaaaattcagatgatagccgtaataaattgtcgaaaataccttcaacacccaaattaataccaaaagttaccaaaactgcagacaagcataaagatgtcatcatcaaccaagaaggagaatatattaaaatgtttatgcgcggtcggccaattaccatgttcattccttccgatgttgacaactatgatgacatcagaacggaactgcctcctgagaagctcaaactggagtgggcatatggttatcgaggaaaggactgtagagctaatgtttaccttcttccgaccggggaaatagtttatttcattgcatcagtagtagtactatttaattatgaggagagaactcagcgacactacctgggccatacagactgtgtgaaatgccttgctatacatcctgacaaaattaggattgcaactggacagatagctggcgtggataaagatggaaggcctctacaaccccacgtcagagtgtgggattctgttactctatccacactgcagattattggacttggcacttttgagcgtggagtaggatgcctggatttttcaaaagcagattcaggtgttcatttatgtgttattgatgactccaatgagcatatgcttactgtatgggactggcagaagaaagcaaaaggagcagaaataaagacaacaaatgaagttgttttggctgtggagtttcacccaacagatgcaaataccataattacatgcggtaaatctcatattttcttctggacctggagcggcaattcactaacaagaaaacagggaatttttgggaaatatgaaaagccaaaatttgtgcagtgtttagcattcttggggaatggagatgttcttactggagactcaggtggagtcatgcttatatggagcaaaactactgtagagcccacacctgggaaaggacctaaaggtgtatatcaaatcagcaaacaaatcaaagctcatgatggcagtgtgttcacactttgtcagatgagaaatgggatgttattaactggaggagggaaagacagaaaaataattctgtgggatcatgatctgaatcctgaaagagaaatagaggttcctgatcagtatggcacaatcagagctgtagcagaaggaaaggcagatcaatttttagtaggcacatcacgaaactttattttacgaggaacatttaatgatggcttccaaatagaagtacagggtcatacagatgagctttggggtcttgccacacatcccttcaaagatttgctcttgacatgtgctcaggacaggcaggtgtgcctgtggaactcaatggaacacaggctggaatggaccaggctggtagatgaaccaggacactgtgcagattttcatccaagtggcacagtggtggccataggaacgcactcaggcaggtggtttgttctggatgcagaaaccagagatctagtttctatccacacagacgggaatgaacagctctctgtgatgcgctactcaatagatggtaccttcctggctgtaggatctcatgacaactttatttacctctatgtagtctctgaaaatggaagaaaatatagcagatatggaaggtgcactggacattccagctacatcacacaccttgactggtccccagacaacaagtatataatgtctaactcgggagactatgaaatattgtactgggacattccaaatggctgcaaactaatcaggaatcgatcggattgtaaggacattgattggacgacatatacctgtgtgctaggatttcaagtatttggtgtctggccagaaggatctgatgggacagatatcaatgcactggtgcgatcccacaatagaaaggtgatagctgttgccgatgacttttgtaaagtccatctgtttcagtatccctgctccaaagcaaaggctcccagtcacaagtacagtgcccacagcagccatgtcaccaatgtcagttttactcacaatgacagtcacctgatatcaactggtggaaaagacatgagcatcattcagtggaaacttgtggaaaagttatctttgcctcagaatgagactgtagcggatactactctaaccaaagcccccgtctcttccactgaaagtgtcatccaatccgcggatcggcgatcatttcaattagggagatagtaggtattaggagtaggattgttgtgaagtatagtacggatgctacttgtccaatgatggtaaaagggtagcttactggttgtcctccgattcaggttagaatgaggaggtctgcggctaggagtcaataaagtgattggct

SEQ ID NO: 414997 - DNA, 875 bp, Homo sapiens
atgcctggagggaggccgggcaggcggctgagcggcgcggctctcaacgtgacggggaagtggttcgggcggccgcggcttactaccccagggcgaacggacggacgacggaggcgggagccggtagccgagccgggcgacctagagaacgagcgggtcaggctcagcgtcggccactctgtcggtccgctgaatgaagtgcccgcccctctgagcccggagcccggcgctttccccgcaagatggacggtttcgccggcagtctcgatgatagtatttctgctgcaagtacttctgatgttcaagatcgcctgtcagctcttgagtcacgagttcagcaacaagaagatgaaatcactgtgctaaaggcggctttggctgatgttttgaggcgtcttgcaatctctgaagatcatgtggcctcagtgaaaaaatcagtctcaagtaaaggccaaccaagccctcgagcagttattcccatgtcctgtataaccaatggaagtggtgcaaacagaaaaccaagtcataccagtgctgtctcaattgcaggaaaagaaactctttcatctgctgctaaatggtacagaaaaaaagaaagaaaaaccacaaggacagagagaaaaaaaagaggaatctcattctaatgatcaaagtccacaaattcgagcatcaccttctccccagccctcttcacaacctctccaaatacacagacaaactccagaaagcaagaatgctactcccaccaaaagcataaaacgaccatcaccagctgaaaagtcacataattcttgggaaaattcagatgatagccgtaataaattgtcgaaaataccttcaacacccaaattaataccaaaagttaccaaaactgc

SEQ ID NO: 414998 - DNA, 2226 bp, Homo sapiens
  misc_feature (1371)..(1371): n is a, c, g, or t
ctcggcctcccaaagtgctaggattaccggtgtgggcccccgtgcctggccgactcaaccttttaatagcggtatcactttgggcaagttatttaaatctctgtattccaatttcttcatctgttaaatgataattataatagtgtacctgtagtgcataggattaaatgaattaatatgtgtaatacttagaatagtatgtgtaacatagtaaatacacaagttatttgctgctattttcttattttcacagtataagaaaatacctacttaagattcatttggaggcatgtctaaatctagtaatttattagaagcttatccatccctattacttttttaaatggcattagttctgtgtgctattggtgtttatttgcatccacctgtccagttgctctgctgtcttgtgtttttgcagcctctacaaccccacgtcagagtgtgggattctgttactctatccacactgcagattattggacttggcacttttgagcgtggagtaggatgcctggatttttcaaaagcagattcaggtgttcatttatgtgttattgatgactccaatgagcatatgcttactgtatgggactggcagaagaaagcaaaaggagcagaaataaaggtaaatttttaaaaaaccgagtattgtgttttagagtatgttacttgttttgcaggtatttggaactatattggtattagaactatctattcgtaagtcgcaaaagcagatctactagccaaattcagcaaatttagtgatttgtcataatcgttaagatattaacactatagttatacaagataaaatagtcaagcagcttgaagcaatttcaatatttcagacattactatagtcctgaaatgccagagtagatggatgtgtgatctcataattaagactgaacacacttcttggttttcttctttaataaaacatgtaatttcattccatctttaaagctttagaaatctagaggaaaaattcagtaggaatacgactgatgtaactgaagggcttatgttaagttttttggtcttaattgtgtttgtaggattattttagaaaattcaatagcatttataattgctataattgcattataactctttacagtacaagggttgatctctgtgtagatcaagctgtacgttgtaagagaagaatgtaaaatgcattgaagctgggtttatatgagccagaaatggacttctccctctgacaggcatttaaaaagattcaaagtgatagaatggctttaaaaagtctgtgtaatatttgccatactcttaaataacatcacattactctccaactcctctcttaacagttttgttttgagtaagcttcaagcttttagcttnttgggcagaaagatgatgtgatgtttaacttaacattttgaaagaagtagatttgattgtacttaaaaggaatataagttgtcagaaaacctcaaactttaaaaaacataaatgaagatatagattgacttccagttattcagagtaatttaacattgaaacatagggaagttgcatgaaaatgaaatatatcaattttgattcttcatagtaaggtttaccagatgaagtcttgtggttttcctcctactggcgatttctcgatctcctttccaggactttaaatgttggtgttcttcagagttttattccacatgctccactgatactatatgctgctcccatggcctcattttctatctgctgagtcccgtatcagttatctccagcccagatctctaacaggtttaactcatatttctagttgcatcctagacatctttatttgaatgtcctctaccacaaatgaaaatcaccatgttcaaatctgtacataatcatctttcctagcccccaaccaccagtttcatcccttagtgattgactccgcatttcacctagctacctaagctagaaacttggacatcattcatggctctttttacctcacttctcacatccaggtagtcaggaagttctctaaacaccgtgtcccaaatatctgcattatagcactttctagtacaagcgactgcaaaacaattgaaattaacttaatctggccaggggtagtcactcacacctgtaatctcagcactttgggagaccaaagtgggtagatcattagatgtcaggagttcaagaccaccccggccaacatcgtgaagccccatctctactaaaaatacaaaaaaa

SEQ ID NO: 414999 - DNA, 1637 bp, Homo sapiens
ctcggcctcccaaagtgctaggattaccggtgtgggcccccgtgcctggccgactcaaccttttaatagcggtatcactttgggcaagttatttaaatctctgtattccaatttcttcatctgttaaatgataattataatagtgtacctgtagtgcataggattaaatgaattaatatgtgtaatacttagaatagtatgtgtaacatagtaaatacacaagttatttgctgctattttcttattttcacagtataagaaaatacctacttaagattcatttggaggcatgtctaaatctagtaatttattagaagcttatccatccctattacttttttaaatggcattagttctgtgtgctattggtgtttatttgcatccacctgtccagttgctctgctgtcttgtgtttttgcagcctctacaaccccacgtcagagtgtgggattctgttactctatccacactgcagattattggacttggcacttttgagcgtggagtaggatgcctggatttttcaaaagcagattcaggtgttcatttatgtgttattgatgactccaatgagcatatgcttactgtatgggactggcagaagaaagcaaaaggagcagaaataaagacaacaaatgaagttgttttggctgtggagtttcacccaacagatgcaaataccataattacatgcggtaaatctcatattttcttctggacctggagcggcaattcactaacaagaaaacagggaatttttgggaaatatgaaaagccaaaatttgtgcagtgtttagcattcttggggaatggagatgttcttactggagactcaggtggagtcatgcttatatggagcaaaactactgtagagcccacacctgggaaaggacctaaaggtgtatatcaaatcagcaaacaaatcaaagctcatgatggcagtgtgttcacactttgtcagatgagaaatgggatgttattaactggaggagggaaagacagaaaaataattctgtgggatcatgatctgaatcctgaaagagaaatagaggttcctgatcagtatggcacaatcagagctgtagcagaaggaaaggcagatcaatttttagtaggcacatcacgaaactttattttacgaggaacatttaatgatggcttccaaatagaagtacagggtcatacagatgagctttggggtcttgccacacatcccttcaaagatttgctcttgacatgtgctcaggacaggcaggtgtgcctgtggaactcaatggaacacaggctggaatggaccaggctggtagatgaaccaggacactgtgcagattttcatccaagtggcacagtggtggccataggaacgcactcaggcaggtggtttgttctggatgcagaaaccagagatctagtttctatccacacagacgggaatgaacagctctctgtgatgcgctactcaatagatggtaccttcctggctgtaggatctcatgacaactttatttacctctatgtagtctctgaaaatggaagaaaatatagcagatatggaaggtgcactgtaagtagtgaagtagaacaagttgtaaaattattgggaaattttacttccgttaaaaacaaatttttacatc

SEQ ID NO: 415000 - DNA, 1087 bp, Homo sapiens
  misc_feature (852)..(852): n is a, c, g, or t
cccagggcgaacggacggacgacggaggcgggagccggtagccgagccgggcgacctagagaacgagcgggtcaggctcagcgtcggccactctgtcggtccgctgaatgaagtgcccgcccctctgagcccggagcccggcgctttccccgcaagatggacggtttcgccggcagtctcgatgatagtatttctgctgcaagtacttctgatgttcaagatcgcctgtcagctcttgagtcacgagttcagcaacaagaagatgaaatcactgtgctaaaggcggctttggctgatgttttgaggcgtcttgcaatctctgaagatcatgtggcctcagtgaaaaaatcagtctcaagtaaaggccaaccaagccctcgagcagttattcccatgtcctgtataaccaatggaagtggtgcaaacagaaaaccaagtcataccagtgctgtctcaattgcaggaaaagaaactctttcatctgctgctaaaagtggtacagaaaaaaagaaagaaaaaccacaaggacagagagaaaaaaaagaggaatctcattctaatgatcaaagtccacaaattcgagcatcaccttctccccagccctcttcacaacctctccaaatacacagacaaactccagcctgggtgacagagtgagattccgtctcaacaagaaaaaaaaaaggaatcttctttgtctgtctgttgtttgtaacaacactatttgagaggacccgtagggtgtctgagcccagcacctgagttttagtactgtgttgtcggctcttccaggcctccggtgttgtctttgtgctgtgtggggatgccatgctgctgtattatgatcttggnccggcttcttgagcattcacctcacctgttacagactgttggttttccttttcgggccgtgtttgccaccctggtgttctggcttgtgttctgccgcgtcccctcatcctgtagtgcttgtgtccttgcgaacaaacaggggggctagttccgggccgtctcccttttaagcctagggtaaaagggggtaaggggaccggttggcccgggtggacccacccgatttttagtgtgc

SEQ ID NO: 415001 - DNA, 1063 bp, Homo sapiens
cccagggcgaacggacggacgacggaggcgggagccggtagccgagccgggcgacctagagaacgagcgggtcaggctcagcgtcggccactctgtcggtccgctgaatgaagtgcccgcccctctgagcccggagcccggcgctttccccgcaagatggacggtttcgccggcagtctcgaaatggggttttgccatgttgcccaggctggtcttgaactctgggctcaagtgatctgcctgcttcagcttcccaaagttctgggattacagggatgatagtatttctgctgcaagtacttctgatgttcaagatcgcctgtcagctcttgagtcacgagttcagcaacaagaagatgaaatcactgtgctaaaggcggctttggctgatgttttgaggcgtcttgcaatctctgaagatcatgtggcctcagtgaaaaaatcagtctcaagtaaaggccaaccaagccctcgagcagttattcccatgtcctgtataaccaatggaagtggtgcaaacagaaaaccaagtcataccagtgctgtctcaattgcaggaaaagaaactctttcatctgctgctaaaaggctggagtgcaatggcgcaatctcggctcaccgcaacctgcacctcccgtgttcaagagattctcctgctgcagcacccggagtagctgggattacagtggtacagaaaaaaagaaagaaaaaccacaaggacagagagaaaaaaaagaggaatctcattctaatgatcaaagtccacaaattcgagcatcaccttctccccagccctcttcacaacctctccaaatacacagacaaactccagaaagcaagaatgctactcccaccaaaaggttttaactgtccccaagtacagagctagggaatggttgtaatgatacctaaattctgtgacttgggaaaaagttagctatccaaggattctgagagaaaaagctggtggctttatttttcccttcttcattgcttataatttatgctttatagcccattggggaataaagaattaaggtcacaatttctcagttaaaactgg

SEQ ID NO: 415002 - DNA, 706 bp, Homo sapiens
agtactatttaattatgaggagagaactcagcgacactacctgggccatacagactgtgtgaaatggttggtatcatttaacattggttcatttttgttctttcaggccctcattttgtattttttaaatttgggttttattgaaagtgatttcttgtggaaagctcagaatgtaaaaatattatgggtcatctgttgaatatattttaaaaagaaaaaaaggactttcggcctccaaaatggtggtgtggtatcagcagcaacaaaacacatcctccataaatcatgattggaacctcttctgctttctcatgtcgtacagtccttctcttctctggtctgtagtgtgaaacatatatgggacagactggacattttcaggtttctgaaagtgattattggttactcgatatttattgaggatttgtcctatgtagataaattttatacttgaagctttattcttttgggaagaaagaaatctagctgaataaggatcataagtatgccgtaggatgtcatactacaaatgtgagaactccttttaaatgcttttaaattattttgttactttttagttaaatgcaattatttattgtttattaatattttccaacttttattttttatttattacccttttccccacttagatccaaggactgactggatgttttccaacatttaaaagcttttatgtctgtac

SEQ ID NO: 415003 - DNA, 505 bp, Homo sapiens
cagtgcaaattgtattagctgtatgacttagggttttgaattatataataatcacttttctatcgtttgattttttttcatttgtttaaatgtgtattgttccatgttatactttattttacatggtacagaaaaaaagaaagaaaaaccacaaggacagagagaaaaaaaagaggaatctcattctaatgatcaaagtccacaaattcgagcatcaccttctccccagccctcttcacaacctctccaaatacacagacaaactccagaaagcaagaatgctactcccaccaaaaggttttaactgtccccaagtacagagctagggaatggttgtaatgatacctaaattctgtgacttgggaaaaagttagctatccaaggattctgagagaaaaagctggtggctttatttttcccttcttcattgcttataatttatgctttatagcccattggggaataaagaattaaggtcacaatttctcagttaaaactggaaaaa

SEQ ID NO: 415004 - DNA, 370 bp, Homo sapiens
ccagggcgaacggacggacgacggaggcgggagccggtagccgagccgggcgacctagagaacgagcgggtcaggctcagcgtcggccactctgtcggtccgctgaatgaagtgcccgcccctctgagcccggagcccggcgctttccccgcaagatggacggtttcgccggcagtctcggtgagtacggctggggagtcctgcgtcttctgcgaagggtaggaacttttttccttccgcacacagcccaggccctgccctcccgcctgcccctcggggtggcagcggctccactgcacatgttcccttcgaggctgccgccctccgcggactccggtggactgagggcccctcccccatgtccaactct

SEQ ID NO: 415005 - DNA, 379 bp, Homo sapiens
tttctaaaagaaataatctctctgaggttttcttggaggtgcttgcctgaaagaaaacctagactccacttcgaagacttggtgttatggctttgtttttgaaccttgtctatacaagtaactgattccctccatccagaaactttaaaaaggaagagcttattgctgaggtgtaagtcaagctgaaagtaaaataaattattagcaccacctgctggttaccattgagtaccattgagtctttaagttttccattttggggctattttggttttttattagttagattttggacaggacttgatttgaatgaagaacagtgtgagccactgagaaatttgtaaaggaaatgttaacagctaagagtttgaacatagat

SEQ ID NO: 415006 - DNA, 362 bp, Homo sapiens
agaatcactgttgattgagattttggtttccatgtgatttgttttcttcaatagtcttattttcagtctctcaaatacagccaacttaaagttttagtttggtgtttattgaaaattaaccaaacttaatactaggagaagactgaatcattaatgatgtctcacaaattactgtgtacctaagtggtgtgatgtaaatactggaaacaaaaacagcagttgcattgattttgaaaacaaacccccttgttatctgaacatgttttcttcaggaacaaccagaggtatcacaaacactgttactcatctactggctcagactgtactacttttttttttttttttcctgaaaaagaaaccag

SEQ ID NO: 415007 - DNA, 2254 bp, Homo sapiens
  misc_feature (314)..(314): n is a, c, g, or t
  misc_feature (366)..(366): n is a, c, g, or t
  misc_feature (405)..(405): n is a, c, g, or t
ccacgcgtccgggtctcgcgggccccgctcccgccctccgctcgcctggcccggaccggaagcggcgccgcacggcctgggcctggcgcggggggcgggcaccggggcccggtcggacatgggcaagaagcacaagaagcacaagtcggacaaacacctctacgaggagtatgtagagaagcccttgaagctggtcctcaaagtaggagggaacgaagtcaccgaactctccacgggcagctcggggcacgactccagcctcttcgaagacaaaaacgatcatgacaaacacaaggacagaaagcggaaaaagngaaagaaaggagagaagcagattccaggggaagaaaaggggagaaaacgganaagagttaaggaggataaaaagaagcgagatcgagaccnggtggagaatgaggcagaaaaagatctccagtgtcacgcccctgtgagattagacttgcctcctgagaagcctctcacaagctctttagccaaacaagaagaagtagaacagacaccccttcaagaagctttgaatcaactgatgagacaattgcagagaaaagatccaagtgctttcttttcatttcctgtgactgattttattgctcctggctactccatgatcattaaacacccaatggattttagtaccatgaaagaaaagatcaagaacaatgactatcagtccatagaagaactaaaggataacttcaaactaatgtgtactaatgccatgatttacaataaaccagagaccatttattataaagctgcaaagaagctgttgcactcaggaatgaaaattcttagccaggaaagaattcagagcctgaagcagagcatagacttcatggctgacttgcagaaaactcgaaagcagaaagatggaacagacacctcacagagtggggaggacggaggctgctggcagagagagagagaggactctggagatgccgaagcacacgccttcaagagtcccagcaaagaaaataaaaagaaagacaaagatatgcttgaagataagtttaaaagcaataatttagagagagagcaggagcagcttgaccgcatcgtgaaggaatctggaggaaagctgaccaggcggcttgtgaacagtcagtgcgaatttgaaagaagaaaaccagatggaacaacgacgttgggacttctccatcctgtggatcccattgtaggagagccaggctactgccctgtgagactgggaatgacaactggaagacttcagtctggagtgaatactttgcaggggttcaaagaggataaaaggaacaaagtcactccagtgttatatttgaattatgggccctacagttcttatgcaccgcattatgactccacatttgcaaatatcagcaaggatgattctgatttaatctattcaacctatggggaagactctgatcttccaagtgatttcagcatccatgagtttttggccacgtgccaagattatccgtatgtcatggcagatagtttactggatgttttaacaaaaggagggcattccaggaccctacaagagatggagatgtcattgcctgaagatgaaggccatactaggacacttgacacagcaaaagaaatggagattacagaagtagagccaccagggcgtttggactccagtactcaagacaggctcatagcgctgaaagcagtaacaaattttggcgttccagttgaagtttttgactctgaagaagctgaaatattccagaagaaacttgatgagaccaccagattgctcagggaactccaggaagcccagaatgaacgtttgagcaccagaccccctccgaacatgatctgtctcttgggtccctcatacagagaaatgcatcttgctgaacaagtgaccaataatcttaaagaacttgcacagcaagtaactccaggtgatatcgtaagcacgtatggagttcgaaaagcaatggggatttccattccttcccccgtcatggaaaacaactttgtggatttgacagaagacactgaagaacctaaaaagacggatgttgctgagtgtggacctggtggaagttgaggctgcctggtatttgattatatattatgtacatactttttcattcttaacttagaaatgcttttcagaagatattaaatatttgtaaattgtgtttttaattaaactttggaacagcgaatttggatgttccagaggttggacttgtattaggtaataaagctggacctgggactcgtg

SEQ ID NO: 415008 - DNA, 2194 bp, Homo sapiens
  misc_feature (314)..(314): n is a, c, g, or t
  misc_feature (366)..(366): n is a, c, g, or t
  misc_feature (405)..(405): n is a, c, g, or t
ccacgcgtccgggtctcgcgggccccgctcccgccctccgctcgcctggcccggaccggaagcggcgccgcacggcctgggcctggcgcggggggcgggcaccggggcccggtcggacatgggcaagaagcacaagaagcacaagtcggacaaacacctctacgaggagtatgtagagaagcccttgaagctggtcctcaaagtaggagggaacgaagtcaccgaactctccacgggcagctcggggcacgactccagcctcttcgaagacaaaaacgatcatgacaaacacaaggacagaaagcggaaaaagngaaagaaaggagagaagcagattccaggggaagaaaaggggagaaaacgganaagagttaaggaggataaaaagaagcgagatcgagaccnggtggagaatgaggcagaaaaagatctccagtgtcacgcccctgtgagattagacttgcctcctgagaagcctctcacaagctctttagccaaacaagaagaagtagaacagacaccccttcaagaagctttgaatcaactgatgagacaattgcagagaaaagatccaagtgctttcttttcatttcctgtgactgattttattgctcctggctactccatgatcattaaacacccaatggattttagtaccatgaaagaaaagatcaagaacaatgactatcagtccatagaagaactaaaggataacttcaaactaatgtgtactaatgccatgatttacaataaaccagagaccatttattataaagctgcaaagaagctgttgcactcaggaatgaaaattcttagccaggaaagaattcagagcctgaagcagagcatagacttcatggctgacttgcagaaaactcgaaagcagaaagatggaacagacacctcacagagtggggaggacggaggctgctggcagagagagagagaggactctggagatgccgaagcacacgccttcaagagtcccagcaaagaaaataaaaagaaagacaaagatatgcttgaagataagtttaaaagcaataatttagagagagagcaggagcagcttgaccgcatcgtgaaggaatctggaggaaagctgaccaggcggcttgtgaacagtcagtgcgaatttgaaagaagaaaaccagatggaacaacgacgttgggacttctccatcctgtggatcccattgtaggagagccaggctactgccctgtgagactgggaatgacaactggaagacttcagtctggagtgaatactttgcaggggttcaaagaggataaaaggaacaaagtcactccagtgttatatttgaattatgggccctacagttcttatgcaccgcattatgactccacatttgcaaatatcagcaaggatgattctgatttaatctattcaacctatggggaagactctgatcttccaagtgatttcagcatccatgagtttttggccacgtgccaagattatccgtatgtcatggcagatagtttactggatgttttaacaaaaggagggcattccaggaccctacaagagatggagatgtcattgcctgaagatgaaggccatactaggacacttgacacagcaaaagaaatggagattacagaagtagagccaccagggcgtttggactccagtactcaagacaggctcatagcgctgaaagcagtaacaaattttggcgttccagttgaagtttttgactctgaagaagctgaaatattccagaagaaacttgatgagaccaccagattgctcagggaactccaggaagcccagaatgaacgtttgagcaccagaccccctccgaacatgatctgtctcttgggtccctcatacagagaaatgcatcttgctgaacaagtgaccaataatcttaaagaacttgcacagcaagtaactccaggtgatatcgtaagcacgtatggagttcgaaaagcaatggggatttccattccttcccccgtcatggaaaacaactttgtggatttgacagaagacactgaagaacctaaaaagacggatgttgctgagtgtggacctggtggaagttgaggctgcctggtatttgattatatattatgtacatactttttcattcttaacttagaaatgcttttcagaagatattaaatatttgtaaattgtgtttttaattaaactttggaacagcga

SEQ ID NO: 415009 - DNA, 634 bp, Homo sapiens
cttgatgctgatgtcgatctaaggatccccccctcacagaatcctctcaaaatgctaataattatatttagtcattttggcctgaaaaattatattccagtagtccatatttgtattcattttctcttgccaagaaactcctgacagttttctcttttccttgatattcgccttcatgtgttttcctaaaaagctgtttttcttcatccttatagtcattgcctgaagatgaaggccatactaggacacttgacacagcaaaagaaatggaggtgattttattttacactttacaagaaatatttaaatggaaaataaggggagtaagagaagtcttgagaatgggaaggcccattgggtaagaaggaaaaaggttagtgagtagagttgtgagggcctagctgaaatggcaaaccataaatgcatatcagtgccaagttgcacaattatacagtttctcccccacaagtttttagcccatatgtaggtagagaaatcaggtggatcaatggagttagagttggagagccataccatagtataaatggaaccattagcttttgattgcttaatatctgggttgatctattcctaaaaagtaatgttgaggttatggaaacccctgagtcttaat

SEQ ID NO: 415010 - DNA, 4542 bp, Homo sapiens
  misc_feature (314)..(314): n is a, c, g, or t
  misc_feature (366)..(366): n is a, c, g, or t
  misc_feature (405)..(405): n is a, c, g, or t
ccacgcgtccgggtctcgcgggccccgctcccgccctccgctcgcctggcccggaccggaagcggcgccgcacggcctgggcctggcgcggggggcgggcaccggggcccggtcggacatgggcaagaagcacaagaagcacaagtcggacaaacacctctacgaggagtatgtagagaagcccttgaagctggtcctcaaagtaggagggaacgaagtcaccgaactctccacgggcagctcggggcacgactccagcctcttcgaagacaaaaacgatcatgacaaacacaaggacagaaagcggaaaaagngaaagaaaggagagaagcagattccaggggaagaaaaggggagaaaacgganaagagttaaggaggataaaaagaagcgagatcgagaccnggtggagaatgaggcagaaaaagatctccagtgtcacgcccctgtgagattagacttgcctcctgagaagcctctcacaagctctttagccaaacaagaagaagtagaacagacaccccttcaagaagctttgaatcaactgatgagacaattgcagagaaaagatccaagtgctttcttttcatttcctgtgactgattttattgctcctggctactccatgatcattaaacacccaatggattttagtaccatgaaagaaaagatcaagaacaatgactatcagtccatagaagaactaaaggataacttcaaactaatgtgtactaatgccatgatttacaataaaccagagaccatttattataaagctgcaaagaagctgttgcactcaggaatgaaaattcttagccaggaaagaattcagagcctgaagcagagcatagacttcatggctgacttgcagaaaactcgaaagcagaaagatggaacagacacctcacagagtggggaggacggaggctgctggcagagagagagagaggactctggagatgccgaagcacacgccttcaagagtcccagcaaagaaaataaaaagaaagacaaagatatgcttgaagataagtttaaaagcaataatttagagagagagcaggagcagcttgaccgcatcgtgaaggaatctggaggaaagctgaccaggcggcttgtgaacagtcagtgcgaatttgaaagaagaaaaccagatggaacaacgacgttgggacttctccatcctgtggatcccattgtaggagagccaggctactgccctgtgagactgggaatgacaactggaagacttcagtctggagtgaatactttgcaggggttcaaagaggataaaaggaacaaagtcactccagtgttatatttgaattatgggccctacagttcttatgcaccgcattatgactccacatttgcaaatatcagcaaggatgattctgatttaatctattcaacctatggggaagactctgatcttccaagtgatttcagcatccatgagtttttggccacgtgccaagattatccgtatgtcatggcagatagtttactggatgttttaacaaaaggagggcattccaggaccctacaagagatggagatgtcattgcctgaagatgaaggccatactaggacacttgacacagcaaaagaaatggagattacagaagtagagccaccagggcgtttggactccagtactcaagacaggctcatagcgctgaaagcagtaacaaattttggcgttccagttgaagtttttgactctgaagaagctgaaatattccagaagaaacttgatgagaccaccagattgctcagggaactccaggaagcccagaatgaacgtttgagcaccagaccccctccgaacatgatctgtctcttgggtccctcatacagagaaatgcatcttgctgaacaagtgaccaataatcttaaagaacttgcacagcaagtaactccaggtgatatcgtaagcacgtatggagttcgaaaagcaatggggatttccattccttcccccgtcatggaaaacaactttgtggatttgacagaagacactgaagaacctaaaaagacggatgttgctgagtgtggacctggtggaagttgaggctgcctggtatttgattatatattatgtacatactttttcattcttaacttagaaatgcttttcagaagatattaaatatttgtaaattgtgtttttaattaaactttggaacagcgaatttggatgttccagaggttggacttgtattaggtaataaagctggacctgggactcgtgaggaaggaatgtgcttggggctgttgccatacctgtgcagcattctttcaaaatagtgccttccaatgcttcttccttatgtcccacagacaggatcatcactaagaagcgttcttaaaacggccccatccagtgagattttccgttatacgaacatacttgaaataattttagaatttactactgtggttctgcccctgcatacccagtgggaatgatgcccttgtatgggtaattaggcacctcccacccacccctgacaaaagcacactgggagttttatagcactgtcacatggctagtgttcttttttggttttttccgttttttaaagaaagaggagttacttagtactatagcaaagtaataagccaaataagataaactaagtcatccttgaatagatcagggaattaccagattaccaaaaggtgacatttctactttacttactgtttatctgaaatacaaaggtcaagtacccaaggagttgaactctaagtaggagaccacaagattcatggcccccttttatcagcaagctgagataaatggtgattttgctgaatcggtatagaacctgttatacacaagggaaaaaaatcaggatggagatagatagatagatagccttgttcagtgaacaaattaagtttgaaggcccttatacaatccttctataaatcacccaggcaggaagccatttgatttctattattttcctgactttgaaaattaattagtatttaggaagaacaaatagggtaaaggaaaattaattccctcaaaagacttaaaatcttatgctaaaagagtcaaattttcaagttgtttgagtctacttttaatctctagtgagttcatgaggaccacgaaaataaaataccttcagatatttgagtttttcaaattgctaatttaatgtataaaaagcagctaaacactggtactttataaaaatgaaacagcattttgaaacaaatgttacagatctataaatattcattatatagaataaaccctagttacttgcatgcaccacctcaaatcatatttctttacactgacctattatatacacaaagtatacagtggttaatgatcttctcttctgtttgtttgtttgtttgtttgttaggaaatttcctcaataagccagaaaaccttaggtattattttcacaaaagttaactcaggagaaattgtaaggaagtccttgacccatggagaaggtcactgtttgtttgtttgttagatacgtgtgtctgtcataaaacaaaatgacaccagtaattacttggtaatttaaaaacaagttcataaaaagaaaatacctgcaggtaatttttatggtcagttatattctataacctgaacactgaaaactaaaaacttttacttacaaactattattatctgagcacagcacagtgctttgctttaattggaaataaaaatgcatgagtgagtggtagtcagttatttgttaaactcccaactggggtttctgttgttactgaagaaaaaaacaaatattccaagagtacaaatatgctgacctcagagaggcccagtgcactaatgtgtttctatgttatattagcaacagaaaccttcctgacttgccaggagagcccccgccgggcagccctggtcactgctagatcttgagagcacagatttcagtatagtattcatgtgaaaccagcccttcatgtaaaaagttttggtgtgtaaaaaaggcaacttaagcgaggctaattgcccttaccagcattgttgccatgaaattcctttatacagcaagttcttctattcatactgattccacttatgtgcagcacatgagagctgccactagtctacccagcacctttgtgcaaattagaatacacctgcccttcctcgggctgataaagccacacgacacagcacaggcagacaggttcaattttcgttccctccaccgccacccccgcacttagctgtactcttaatttgcagcccggggcaactcatcccaggaccccaacaagtctggtcagtcacccaatctgcaaccctgtataatcatcttgtaaaggctcctgtatgcaagactttgtgtagaactttacggggttcatggggacacctagctaagaatccctgctatgtagggaaactgagtgcattagaaatcctggcgatgctctggtgatgaggccaccggttaagtcttccggttatgaagtccattcagaaaaagtcacgggcagtttggtcatttctcaccctgttgttacagt

SEQ ID NO: 415011 - DNA, 3777 bp, Homo sapiens
  misc_feature (314)..(314): n is a, c, g, or t
  misc_feature (366)..(366): n is a, c, g, or t
  misc_feature (405)..(405): n is a, c, g, or t
ccacgcgtccgggtctcgcgggccccgctcccgccctccgctcgcctggcccggaccggaagcggcgccgcacggcctgggcctggcgcggggggcgggcaccggggcccggtcggacatgggcaagaagcacaagaagcacaagtcggacaaacacctctacgaggagtatgtagagaagcccttgaagctggtcctcaaagtaggagggaacgaagtcaccgaactctccacgggcagctcggggcacgactccagcctcttcgaagacaaaaacgatcatgacaaacacaaggacagaaagcggaaaaagngaaagaaaggagagaagcagattccaggggaagaaaaggggagaaaacgganaagagttaaggaggataaaaagaagcgagatcgagaccnggtggagaatgaggcagaaaaagatctccagtgtcacgcccctgtgagattagacttgcctcctgagaagcctctcacaagctctttagccaaacaagaagaagtagaacagacaccccttcaagaagctttgaatcaactgatgagacaattgcagagaaaagatccaagtgctttcttttcatttcctgtgactgattttattgctcctggctactccatgatcattaaacacccaatggattttagtaccatgaaagaaaagatcaagaacaatgactatcagtccatagaagaactaaaggataacttcaaactaatgtgtactaatgccatgatttacaataaaccagagaccatttattataaagctgcaaagaagctgttgcactcaggaatgaaaattcttagccaggaaagaattcagagcctgaagcagagcatagacttcatggctgacttgcagaaaactcgaaagcagaaagatggaacagacacctcacagagtggggaggacggaggctgctggcagagagagagagaggactctggagatgccgaagcacacgccttcaagagtcccagcaaagaaaataaaaagaaagacaaagatatgcttgaagataagtttaaaagcaataatttagagagagagcaggagcagcttgaccgcatcgtgaaggaatctggaggaaagctgaccaggcggcttgtgaacagtcagtgcgaatttgaaagaagaaaaccagatggaacaacgacgttgggacttctccatcctgtggatcccattgtaggagagccaggctactgccctgtgagactgggaatgacaactggaagacttcagtctggagtgaatactttgcaggggttcaaagaggataaaaggaacaaagtcactccagtgttatatttgaattatgggccctacagttcttatgcaccgcattatgactccacatttgcaaatatcagcaaggatgattctgatttaatctattcaacctatggggaagactctgatcttccaagtgatttcagcatccatgagtttttggccacgtgccaagattatccgtatgtcatggcagatagtttactggatgttttaacaaaaggagggcattccaggaccctacaagagatggagatgtcattgcctgaagatgaaggccatactaggacacttgacacagcaaaagaaatggagattacagaagtagagccaccagggcgtttggactccagtactcaagacaggctcatagcgctgaaagcagtaacaaattttggcgttccagttgaagtttttgactctgaagaagctgaaatattccagaagaaacttgatgagaccaccagattgctcagggaactccaggaagcccagaatgaacgtttgagcaccagaccccctccgaacatgatctgtctcttgggtccctcatacagagaaatgcatcttgctgaacaagtgaccaataatcttaaagaacttgcacagcaagtaactccaggtgatatcgtaagcacgtatggagttcgaaaagcaatggggatttccattccttcccccgtcatggaaaacaactttgtggatttgacagaagacactgaagaacctaaaaagacggatgttgctgagtgtggacctggtggaagttgaggctgcctggtatttgattatatattatgtacatactttttcattcttaacttagaaatgcttttcagaagatattaaatatttgtaaattgtgtttttaattaaactttggaacagcgaatttggatgttccagaggttggacttgtattaggtaataaagctggacctgggactcgtgaggaaggaatgtgcttggggctgttgccatacctgtgcagcattctttcaaaatagtgccttccaatgcttcttccttatgtcccacagacaggatcatcactaagaagcgttcttaaaacggccccatccagtgagattttccgttatacgaacatacttgaaataattttagaatttactactgtggttctgcccctgcatacccagtgggaatgatgcccttgtatgggtaattaggcacctcccacccacccctgacaaaagcacactgggagttttatagcactgtcacatggctagtgttcttttttggttttttccgttttttaaagaaagaggagttacttagtactatagcaaagtaataagccaaataagataaactaagtcatccttgaatagatcagggaattaccagattaccaaaaggtgacatttctactttacttactgtttatctgaaatacaaaggtcaagtacccaaggagttgaactctaagtaggagaccacaagattcatggcccccttttatcagcaagctgagataaatggtgattttgctgaatcggtatagaacctgttatacacaagggaaaaaaatcaggatggagatagatagatagatagccttgttcagtgaacaaattaagtttgaaggcccttatacaatccttctataaatcacccaggcaggaagccatttgatttctattattttcctgactttgaaaattaattagtatttaggaagaacaaatagggtaaaggaaaattaattccctcaaaagacttaaaatcttatgctaaaagagtcaaattttcaagttgtttgagtctacttttaatctctagtgagttcatgaggaccacgaaaataaaataccttcagatatttgagtttttcaaattgctaatttaatgtataaaaagcagctaaacactggtactttataaaaatgaaacagcattttgaaacaaatgttacagatctataaatattcattatatagaataaaccctagttacttgcatgcaccacctcaaatcatatttctttacactgacctattatatacacaaagtatacagtggttaatgatcttctcttctgtttgtttgtttgtttgtttgttaggaaatttcctcaataagccagaaaaccttaggtattattttcacaaaagttaactcaggagaaattgtaaggaagtccttgacccatggagaaggtcactgtttgtttgtttgttagatacgtgtgtctgtcataaaacaaaatgacaccagtaattacttggtaatttaaaaacaagttcataaaaagaaaatacctgcaggtaatttttatggtcagttatattctataacctgaacactgaaaactaaaaacttttacttacaaactattattatctgagcacagcacagtgctttgctttaattggaaataaaaatgcatgagtggaagataaaaagaaaaaaaaatagtagatctcgagactagttctcctcgtgccgaa

SEQ ID NO: 415012 - DNA, 4434 bp, Homo sapiens
  misc_feature (314)..(314): n is a, c, g, or t
  misc_feature (366)..(366): n is a, c, g, or t
  misc_feature (405)..(405): n is a, c, g, or t
ccacgcgtccgggtctcgcgggccccgctcccgccctccgctcgcctggcccggaccggaagcggcgccgcacggcctgggcctggcgcggggggcgggcaccggggcccggtcggacatgggcaagaagcacaagaagcacaagtcggacaaacacctctacgaggagtatgtagagaagcccttgaagctggtcctcaaagtaggagggaacgaagtcaccgaactctccacgggcagctcggggcacgactccagcctcttcgaagacaaaaacgatcatgacaaacacaaggacagaaagcggaaaaagngaaagaaaggagagaagcagattccaggggaagaaaaggggagaaaacgganaagagttaaggaggataaaaagaagcgagatcgagaccnggtggagaatgaggcagaaaaagatctccagtgtcacgcccctgtgagattagacttgcctcctgagaagcctctcacaagctctttagccaaacaagaagaagtagaacagacaccccttcaagaagctttgaatcaactgatgagacaattgcagagaaaagatccaagtgctttcttttcatttcctgtgactgattttattgctcctggctactccatgatcattaaacacccaatggattttagtaccatgaaagaaaagatcaagaacaatgactatcagtccatagaagaactaaaggataacttcaaactaatgtgtactaatgccatgatttacaataaaccagagaccatttattataaagctgcaaagaagctgttgcactcaggaatgaaaattcttagccaggaaagaattcagagcctgaagcagagcatagacttcatggctgacttgcagaaaactcgaaagcagaaagatggaacagacacctcacagagtggggaggacggaggctgctggcagagagagagagaggactctggagatgccgaagcacacgccttcaagagtcccagcaaagaaaataaaaagaaagacaaagatatgcttgaagataagtttaaaagcaataatttagagagagagcaggagcagcttgaccgcatcgtgaaggaatctggaggaaagctgaccaggcggcttgtgaacagtcagtgcgaatttgaaagaagaaaaccagatggaacaacgacgttgggacttctccatcctgtggatcccattgtaggagtgttatatttgaattatgggccctacagttcttatgcaccgcattatgactccacatttgcaaatatcagcaaggatgattctgatttaatctattcaacctatggggaagactctgatcttccaagtgatttcagcatccatgagtttttggccacgtgccaagattatccgtatgtcatggcagatagtttactggatgttttaacaaaaggagggcattccaggaccctacaagagatggagatgtcattgcctgaagatgaaggccatactaggacacttgacacagcaaaagaaatggagattacagaagtagagccaccagggcgtttggactccagtactcaagacaggctcatagcgctgaaagcagtaacaaattttggcgttccagttgaagtttttgactctgaagaagctgaaatattccagaagaaacttgatgagaccaccagattgctcagggaactccaggaagcccagaatgaacgtttgagcaccagaccccctccgaacatgatctgtctcttgggtccctcatacagagaaatgcatcttgctgaacaagtgaccaataatcttaaagaacttgcacagcaagtaactccaggtgatatcgtaagcacgtatggagttcgaaaagcaatggggatttccattccttcccccgtcatggaaaacaactttgtggatttgacagaagacactgaagaacctaaaaagacggatgttgctgagtgtggacctggtggaagttgaggctgcctggtatttgattatatattatgtacatactttttcattcttaacttagaaatgcttttcagaagatattaaatatttgtaaattgtgtttttaattaaactttggaacagcgaatttggatgttccagaggttggacttgtattaggtaataaagctggacctgggactcgtgaggaaggaatgtgcttggggctgttgccatacctgtgcagcattctttcaaaatagtgccttccaatgcttcttccttatgtcccacagacaggatcatcactaagaagcgttcttaaaacggccccatccagtgagattttccgttatacgaacatacttgaaataattttagaatttactactgtggttctgcccctgcatacccagtgggaatgatgcccttgtatgggtaattaggcacctcccacccacccctgacaaaagcacactgggagttttatagcactgtcacatggctagtgttcttttttggttttttccgttttttaaagaaagaggagttacttagtactatagcaaagtaataagccaaataagataaactaagtcatccttgaatagatcagggaattaccagattaccaaaaggtgacatttctactttacttactgtttatctgaaatacaaaggtcaagtacccaaggagttgaactctaagtaggagaccacaagattcatggcccccttttatcagcaagctgagataaatggtgattttgctgaatcggtatagaacctgttatacacaagggaaaaaaatcaggatggagatagatagatagatagccttgttcagtgaacaaattaagtttgaaggcccttatacaatccttctataaatcacccaggcaggaagccatttgatttctattattttcctgactttgaaaattaattagtatttaggaagaacaaatagggtaaaggaaaattaattccctcaaaagacttaaaatcttatgctaaaagagtcaaattttcaagttgtttgagtctacttttaatctctagtgagttcatgaggaccacgaaaataaaataccttcagatatttgagtttttcaaattgctaatttaatgtataaaaagcagctaaacactggtactttataaaaatgaaacagcattttgaaacaaatgttacagatctataaatattcattatatagaataaaccctagttacttgcatgcaccacctcaaatcatatttctttacactgacctattatatacacaaagtatacagtggttaatgatcttctcttctgtttgtttgtttgtttgtttgttaggaaatttcctcaataagccagaaaaccttaggtattattttcacaaaagttaactcaggagaaattgtaaggaagtccttgacccatggagaaggtcactgtttgtttgtttgttagatacgtgtgtctgtcataaaacaaaatgacaccagtaattacttggtaatttaaaaacaagttcataaaaagaaaatacctgcaggtaatttttatggtcagttatattctataacctgaacactgaaaactaaaaacttttacttacaaactattattatctgagcacagcacagtgctttgctttaattggaaataaaaatgcatgagtgagtggtagtcagttatttgttaaactcccaactggggtttctgttgttactgaagaaaaaaacaaatattccaagagtacaaatatgctgacctcagagaggcccagtgcactaatgtgtttctatgttatattagcaacagaaaccttcctgacttgccaggagagcccccgccgggcagccctggtcactgctagatcttgagagcacagatttcagtatagtattcatgtgaaaccagcccttcatgtaaaaagttttggtgtgtaaaaaaggcaacttaagcgaggctaattgcccttaccagcattgttgccatgaaattcctttatacagcaagttcttctattcatactgattccacttatgtgcagcacatgagagctgccactagtctacccagcacctttgtgcaaattagaatacacctgcccttcctcgggctgataaagccacacgacacagcacaggcagacaggttcaattttcgttccctccaccgccacccccgcacttagctgtactcttaatttgcagcccggggcaactcatcccaggaccccaacaagtctggtcagtcacccaatctgcaaccctgtataatcatcttgtaaaggctcctgtatgcaagactttgtgtagaactttacggggttcatggggacacctagctaagaatccctgctatgtagggaaactgagtgcattagaaatcctggcgatgctctggtgatgaggccaccggttaagtcttccggttatgaagtccattcagaaaaagtcacgggcagtttggtcatttctcaccctgttgttacagt

SEQ ID NO: 415013 - DNA, 4380 bp, Homo sapiens
  misc_feature (314)..(314): n is a, c, g, or t
  misc_feature (366)..(366): n is a, c, g, or t
  misc_feature (405)..(405): n is a, c, g, or t
ccacgcgtccgggtctcgcgggccccgctcccgccctccgctcgcctggcccggaccggaagcggcgccgcacggcctgggcctggcgcggggggcgggcaccggggcccggtcggacatgggcaagaagcacaagaagcacaagtcggacaaacacctctacgaggagtatgtagagaagcccttgaagctggtcctcaaagtaggagggaacgaagtcaccgaactctccacgggcagctcggggcacgactccagcctcttcgaagacaaaaacgatcatgacaaacacaaggacagaaagcggaaaaagngaaagaaaggagagaagcagattccaggggaagaaaaggggagaaaacgganaagagttaaggaggataaaaagaagcgagatcgagaccnggtggagaatgaggcagaaaaagatctccagtgtcacgcccctgtgagattagacttgcctcctgagaagcctctcacaagctctttagccaaacaagaagaagtagaacagacaccccttcaagaagctttgaatcaactgatgagacaattgcagagaaaagatccaagtgctttcttttcatttcctgtgactgattttattgctcctggctactccatgatcattaaacacccaatggattttagtaccatgaaagaaaagatcaagaacaatgactatcagtccatagaagaactaaaggataacttcaaactaatgtgtactaatgccatgatttacaataaaccagagaccatttattataaagctgcaaagaagctgttgcactcaggaatgaaaattcttagccaggaaagaattcagagcctgaagcagagcatagacttcatggctgacttgcagaaaactcgaaagcagaaagatggaacagacacctcacagagtggggaggacggaggctgctggcagagagagagagaggactctggagatgccgaagcacacgccttcaagagtcccagcaaagaaaataaaaagaaagacaaagatatgcttgaagataagtttaaaagcaataatttagagagagagcaggagcagcttgaccgcatcgtgaaggaatctggaggaaagctgaccaggcggcttgtgaacagtcagtgcgaatttgaaagaagaaaagtgttatatttgaattatgggccctacagttcttatgcaccgcattatgactccacatttgcaaatatcagcaaggatgattctgatttaatctattcaacctatggggaagactctgatcttccaagtgatttcagcatccatgagtttttggccacgtgccaagattatccgtatgtcatggcagatagtttactggatgttttaacaaaaggagggcattccaggaccctacaagagatggagatgtcattgcctgaagatgaaggccatactaggacacttgacacagcaaaagaaatggagattacagaagtagagccaccagggcgtttggactccagtactcaagacaggctcatagcgctgaaagcagtaacaaattttggcgttccagttgaagtttttgactctgaagaagctgaaatattccagaagaaacttgatgagaccaccagattgctcagggaactccaggaagcccagaatgaacgtttgagcaccagaccccctccgaacatgatctgtctcttgggtccctcatacagagaaatgcatcttgctgaacaagtgaccaataatcttaaagaacttgcacagcaagtaactccaggtgatatcgtaagcacgtatggagttcgaaaagcaatggggatttccattccttcccccgtcatggaaaacaactttgtggatttgacagaagacactgaagaacctaaaaagacggatgttgctgagtgtggacctggtggaagttgaggctgcctggtatttgattatatattatgtacatactttttcattcttaacttagaaatgcttttcagaagatattaaatatttgtaaattgtgtttttaattaaactttggaacagcgaatttggatgttccagaggttggacttgtattaggtaataaagctggacctgggactcgtgaggaaggaatgtgcttggggctgttgccatacctgtgcagcattctttcaaaatagtgccttccaatgcttcttccttatgtcccacagacaggatcatcactaagaagcgttcttaaaacggccccatccagtgagattttccgttatacgaacatacttgaaataattttagaatttactactgtggttctgcccctgcatacccagtgggaatgatgcccttgtatgggtaattaggcacctcccacccacccctgacaaaagcacactgggagttttatagcactgtcacatggctagtgttcttttttggttttttccgttttttaaagaaagaggagttacttagtactatagcaaagtaataagccaaataagataaactaagtcatccttgaatagatcagggaattaccagattaccaaaaggtgacatttctactttacttactgtttatctgaaatacaaaggtcaagtacccaaggagttgaactctaagtaggagaccacaagattcatggcccccttttatcagcaagctgagataaatggtgattttgctgaatcggtatagaacctgttatacacaagggaaaaaaatcaggatggagatagatagatagatagccttgttcagtgaacaaattaagtttgaaggcccttatacaatccttctataaatcacccaggcaggaagccatttgatttctattattttcctgactttgaaaattaattagtatttaggaagaacaaatagggtaaaggaaaattaattccctcaaaagacttaaaatcttatgctaaaagagtcaaattttcaagttgtttgagtctacttttaatctctagtgagttcatgaggaccacgaaaataaaataccttcagatatttgagtttttcaaattgctaatttaatgtataaaaagcagctaaacactggtactttataaaaatgaaacagcattttgaaacaaatgttacagatctataaatattcattatatagaataaaccctagttacttgcatgcaccacctcaaatcatatttctttacactgacctattatatacacaaagtatacagtggttaatgatcttctcttctgtttgtttgtttgtttgtttgttaggaaatttcctcaataagccagaaaaccttaggtattattttcacaaaagttaactcaggagaaattgtaaggaagtccttgacccatggagaaggtcactgtttgtttgtttgttagatacgtgtgtctgtcataaaacaaaatgacaccagtaattacttggtaatttaaaaacaagttcataaaaagaaaatacctgcaggtaatttttatggtcagttatattctataacctgaacactgaaaactaaaaacttttacttacaaactattattatctgagcacagcacagtgctttgctttaattggaaataaaaatgcatgagtgagtggtagtcagttatttgttaaactcccaactggggtttctgttgttactgaagaaaaaaacaaatattccaagagtacaaatatgctgacctcagagaggcccagtgcactaatgtgtttctatgttatattagcaacagaaaccttcctgacttgccaggagagcccccgccgggcagccctggtcactgctagatcttgagagcacagatttcagtatagtattcatgtgaaaccagcccttcatgtaaaaagttttggtgtgtaaaaaaggcaacttaagcgaggctaattgcccttaccagcattgttgccatgaaattcctttatacagcaagttcttctattcatactgattccacttatgtgcagcacatgagagctgccactagtctacccagcacctttgtgcaaattagaatacacctgcccttcctcgggctgataaagccacacgacacagcacaggcagacaggttcaattttcgttccctccaccgccacccccgcacttagctgtactcttaatttgcagcccggggcaactcatcccaggaccccaacaagtctggtcagtcacccaatctgcaaccctgtataatcatcttgtaaaggctcctgtatgcaagactttgtgtagaactttacggggttcatggggacacctagctaagaatccctgctatgtagggaaactgagtgcattagaaatcctggcgatgctctggtgatgaggccaccggttaagtcttccggttatgaagtccattcagaaaaagtcacgggcagtttggtcatttctcaccctgttgttacagt

SEQ ID NO: 415014 - DNA, 4430 bp, Homo sapiens
  misc_feature (314)..(314): n is a, c, g, or t
  misc_feature (366)..(366): n is a, c, g, or t
  misc_feature (405)..(405): n is a, c, g, or t
ccacgcgtccgggtctcgcgggccccgctcccgccctccgctcgcctggcccggaccggaagcggcgccgcacggcctgggcctggcgcggggggcgggcaccggggcccggtcggacatgggcaagaagcacaagaagcacaagtcggacaaacacctctacgaggagtatgtagagaagcccttgaagctggtcctcaaagtaggagggaacgaagtcaccgaactctccacgggcagctcggggcacgactccagcctcttcgaagacaaaaacgatcatgacaaacacaaggacagaaagcggaaaaagngaaagaaaggagagaagcagattccaggggaagaaaaggggagaaaacgganaagagttaaggaggataaaaagaagcgagatcgagaccnggtggagaatgaggcagaaaaagatctccagtgtcacgcccctgtgagattagacttgcctcctgagaagcctctcacaagctctttagccaaacaagaagaagtagaacagacaccccttcaagaagctttgaatcaactgatgagacaattgcagagaaaagatccaagtgctttcttttcatttcctgtgactgattttattgctcctggctactccatgatcattaaacacccaatggattttagtaccatgaaagaaaagatcaagaacaatgactatcagtccatagaagaactaaaggataacttcaaactaatgtgtactaatgccatgatttacaataaaccagagaccatttattataaagctgcaaagaagctgttgcactcaggaatgaaaattcttagccaggaaagaattcagagcctgaagcagagcatagacttcatggctgacttgcagaaaactcgaaagcagaaagatggaacagacacctcacagagtggggaggacggaggctgctggcagagagagagagaggactctggagatgccgaagcacacgccttcaagagtcccagcaaagaaaataaaaagaaagacaaagatatgcttgaagataagtttaaaagcaataatttagagagagagcaggagcagcttgaccgcatcgtgaaggaatctggaggaaagctgaccaggcggcttgtgaacagtcagtgcgaatttgaaagaagaaaaccagatggaacaacgacgttgggacttctccatcctgtggatcccattgtaggagagccaggctactgccctgtgagactgggaatgacaactggaagacttcagtctggagtgaatactttgcaggggttcaaagaggataaaaggaacaaagtcactccagtgttatatttgaattatgggccctacagttcttatgcaccgcattatgactccacatttgcaaatatcagcaaggatgattctgatttaatctattcaacctatggggaagactctgatcttccaagtgatttcagtcattgcctgaagatgaaggccatactaggacacttgacacagcaaaagaaatggagattacagaagtagagccaccagggcgtttggactccagtactcaagacaggctcatagcgctgaaagcagtaacaaattttggcgttccagttgaagtttttgactctgaagaagctgaaatattccagaagaaacttgatgagaccaccagattgctcagggaactccaggaagcccagaatgaacgtttgagcaccagaccccctccgaacatgatctgtctcttgggtccctcatacagagaaatgcatcttgctgaacaagtgaccaataatcttaaagaacttgcacagcaagtaactccaggtgatatcgtaagcacgtatggagttcgaaaagcaatggggatttccattccttcccccgtcatggaaaacaactttgtggatttgacagaagacactgaagaacctaaaaagacggatgttgctgagtgtggacctggtggaagttgaggctgcctggtatttgattatatattatgtacatactttttcattcttaacttagaaatgcttttcagaagatattaaatatttgtaaattgtgtttttaattaaactttggaacagcgaatttggatgttccagaggttggacttgtattaggtaataaagctggacctgggactcgtgaggaaggaatgtgcttggggctgttgccatacctgtgcagcattctttcaaaatagtgccttccaatgcttcttccttatgtcccacagacaggatcatcactaagaagcgttcttaaaacggccccatccagtgagattttccgttatacgaacatacttgaaataattttagaatttactactgtggttctgcccctgcatacccagtgggaatgatgcccttgtatgggtaattaggcacctcccacccacccctgacaaaagcacactgggagttttatagcactgtcacatggctagtgttcttttttggttttttccgttttttaaagaaagaggagttacttagtactatagcaaagtaataagccaaataagataaactaagtcatccttgaatagatcagggaattaccagattaccaaaaggtgacatttctactttacttactgtttatctgaaatacaaaggtcaagtacccaaggagttgaactctaagtaggagaccacaagattcatggcccccttttatcagcaagctgagataaatggtgattttgctgaatcggtatagaacctgttatacacaagggaaaaaaatcaggatggagatagatagatagatagccttgttcagtgaacaaattaagtttgaaggcccttatacaatccttctataaatcacccaggcaggaagccatttgatttctattattttcctgactttgaaaattaattagtatttaggaagaacaaatagggtaaaggaaaattaattccctcaaaagacttaaaatcttatgctaaaagagtcaaattttcaagttgtttgagtctacttttaatctctagtgagttcatgaggaccacgaaaataaaataccttcagatatttgagtttttcaaattgctaatttaatgtataaaaagcagctaaacactggtactttataaaaatgaaacagcattttgaaacaaatgttacagatctataaatattcattatatagaataaaccctagttacttgcatgcaccacctcaaatcatatttctttacactgacctattatatacacaaagtatacagtggttaatgatcttctcttctgtttgtttgtttgtttgtttgttaggaaatttcctcaataagccagaaaaccttaggtattattttcacaaaagttaactcaggagaaattgtaaggaagtccttgacccatggagaaggtcactgtttgtttgtttgttagatacgtgtgtctgtcataaaacaaaatgacaccagtaattacttggtaatttaaaaacaagttcataaaaagaaaatacctgcaggtaatttttatggtcagttatattctataacctgaacactgaaaactaaaaacttttacttacaaactattattatctgagcacagcacagtgctttgctttaattggaaataaaaatgcatgagtgagtggtagtcagttatttgttaaactcccaactggggtttctgttgttactgaagaaaaaaacaaatattccaagagtacaaatatgctgacctcagagaggcccagtgcactaatgtgtttctatgttatattagcaacagaaaccttcctgacttgccaggagagcccccgccgggcagccctggtcactgctagatcttgagagcacagatttcagtatagtattcatgtgaaaccagcccttcatgtaaaaagttttggtgtgtaaaaaaggcaacttaagcgaggctaattgcccttaccagcattgttgccatgaaattcctttatacagcaagttcttctattcatactgattccacttatgtgcagcacatgagagctgccactagtctacccagcacctttgtgcaaattagaatacacctgcccttcctcgggctgataaagccacacgacacagcacaggcagacaggttcaattttcgttccctccaccgccacccccgcacttagctgtactcttaatttgcagcccggggcaactcatcccaggaccccaacaagtctggtcagtcacccaatctgcaaccctgtataatcatcttgtaaaggctcctgtatgcaagactttgtgtagaactttacggggttcatggggacacctagctaagaatccctgctatgtagggaaactgagtgcattagaaatcctggcgatgctctggtgatgaggccaccggttaagtcttccggttatgaagtccattcagaaaaagtcacgggcagtttggtcatttctcaccctgttgttacagt

SEQ ID NO: 415015 - DNA, 2975 bp, Homo sapiens
cgctgttccaaagtttaattaaaaacacaatttacaaatatttaatatcttctgaaaagcatttctaagttaagaatgaaaaagtatgtacataatatataatcaaataccaggcagcctcaacttccaccaggtccacactcagcaacatccgtctttttaggttcttcagtgtcttctgtcaaatccacaaagttgttttccatgacgagggaactccaggaagcccagaatgaacgtttgagcaccagaccccctccgaacatgatctgtctcttgggtccctcatacagagaaatgcatcttgctgaacaagtgaccaataatcttaaagaacttgcacagcaagtaactccaggtgatatcgtaagcacgtatggagttcgaaaagcaatggggatttccattccttcccccgtcatggaaaacaactttgtggatttgacagaagacactgaagaacctaaaaagacggatgttgctgagtgtggacctggtggaagttgaggctgcctggtatttgattatatattatgtacatactttttcattcttaacttagaaatgcttttcagaagatattaaatatttgtaaattgtgtttttaattaaactttggaacagcgaatttggatgttccagaggttggacttgtattaggtaataaagctggacctgggactcgtgaggaaggaatgtgcttggggctgttgccatacctgtgcagcattctttcaaaatagtgccttccaatgcttcttccttatgtcccacagacaggatcatcactaagaagcgttcttaaaacggccccatccagtgagattttccgttatacgaacatacttgaaataattttagaatttactactgtggttctgcccctgcatacccagtgggaatgatgcccttgtatgggtaattaggcacctcccacccacccctgacaaaagcacactgggagttttatagcactgtcacatggctagtgttcttttttggttttttccgttttttaaagaaagaggagttacttagtactatagcaaagtaataagccaaataagataaactaagtcatccttgaatagatcagggaattaccagattaccaaaaggtgacatttctactttacttactgtttatctgaaatacaaaggtcaagtacccaaggagttgaactctaagtaggagaccacaagattcatggcccccttttatcagcaagctgagataaatggtgattttgctgaatcggtatagaacctgttatacacaagggaaaaaaatcaggatggagatagatagatagatagccttgttcagtgaacaaattaagtttgaaggcccttatacaatccttctataaatcacccaggcaggaagccatttgatttctattattttcctgactttgaaaattaattagtatttaggaagaacaaatagggtaaaggaaaattaattccctcaaaagacttaaaatcttatgctaaaagagtcaaattttcaagttgtttgagtctacttttaatctctagtgagttcatgaggaccacgaaaataaaataccttcagatatttgagtttttcaaattgctaatttaatgtataaaaagcagctaaacactggtactttataaaaatgaaacagcattttgaaacaaatgttacagatctataaatattcattatatagaataaaccctagttacttgcatgcaccacctcaaatcatatttctttacactgacctattatatacacaaagtatacagtggttaatgatcttctcttctgtttgtttgtttgtttgtttgttaggaaatttcctcaataagccagaaaaccttaggtattattttcacaaaagttaactcaggagaaattgtaaggaagtccttgacccatggagaaggtcactgtttgtttgtttgttagatacgtgtgtctgtcataaaacaaaatgacaccagtaattacttggtaatttaaaaacaagttcataaaaagaaaatacctgcaggtaatttttatggtcagttatattctataacctgaacactgaaaactaaaaacttttacttacaaactattattatctgagcacagcacagtgctttgctttaattggaaataaaaatgcatgagtgagtggtagtcagttatttgttaaactcccaactggggtttctgttgttactgaagaaaaaaacaaatattccaagagtacaaatatgctgacctcagagaggcccagtgcactaatgtgtttctatgttatattagcaacagaaaccttcctgacttgccaggagagcccccgccgggcagccctggtcactgctagatcttgagagcacagatttcagtatagtattcatgtgaaaccagcccttcatgtaaaaagttttggtgtgtaaaaaaggcaacttaagcgaggctaattgcccttaccagcattgttgccatgaaattcctttatacagcaagttcttctattcatactgattccacttatgtgcagcacatgagagctgccactagtctacccagcacctttgtgcaaattagaatacacctgcccttcctcgggctgataaagccacacgacacagcacaggcagacaggttcaattttcgttccctccaccgccacccccgcacttagctgtactcttaatttgcagcccggggcaactcatcccaggaccccaacaagtctggtcagtcacccaatctgcaaccctgtataatcatcttgtaaaggctcctgtatgcaagactttgtgtagaactttacggggttcatggggacacctagctaagaatccctgctatgtagggaaactgagtgcattagaaatcctggcgatgctctggtgatgaggccaccggttaagtcttccggttatgaagtccattcagaaaaagtcacgggcagtttggtcatttctcaccctgttgttacagt

SEQ ID NO: 415016 - DNA, 3345 bp, Homo sapiens
  misc_feature (314)..(314): n is a, c, g, or t
  misc_feature (366)..(366): n is a, c, g, or t
  misc_feature (405)..(405): n is a, c, g, or t
ccacgcgtccgggtctcgcgggccccgctcccgccctccgctcgcctggcccggaccggaagcggcgccgcacggcctgggcctggcgcggggggcgggcaccggggcccggtcggacatgggcaagaagcacaagaagcacaagtcggacaaacacctctacgaggagtatgtagagaagcccttgaagctggtcctcaaagtaggagggaacgaagtcaccgaactctccacgggcagctcggggcacgactccagcctcttcgaagacaaaaacgatcatgacaaacacaaggacagaaagcggaaaaagngaaagaaaggagagaagcagattccaggggaagaaaaggggagaaaacgganaagagttaaggaggataaaaagaagcgagatcgagaccnggtggagaatgaggcagaaaaagatctccagtgtcacgcccctgtgagattagacttgcctcctgagaagcctctcacaagctctttagccaaacaagaagaagtagaacagacaccccttcaagaagctttgaatcaactgatgagacaattgcagagaaaagatccaagtgctttcttttcatttcctgtgactgattttattgctcctggctactccatgatcattaaacacccaatggattttagtaccatgaaagaaaagatcaagaacaatgactatcagtccatagaagaactaaaggataacttcaaactaatgtgtactaatgccatgatttacaataaaccagagaccatttattataaagctgcaaagaagctgttgcactcaggaatgaaaattcttagccaggaaagaattcagagcctgaagcagagcatagacttcatggctgacttgcagaaaactcgaaagcagaaagatggaacagacacctcacagagtggggaggacggaggctgctggcagagagagagagaggactctggagatgccgaagcacacgccttcaagagtcccagcaaagaaaataaaaagaaagacaaagatatgcttgaagataagtttaaaagcaataatttagagagagagcaggagcagcttgaccgcatcgtgaaggaatctggaggaaagctgaccaggcggcttgtgaacagtcagtgcgaatttgaaagaagaaaaccagatggaacaacgacgttgggacttctccatcctgtggatcccattgtaggagagccaggctactgccctgtgagactgggaatgacaactggaagacttcagtctggagtgaatactttgcaggggttcaaagaggataaaaggaacaaagtcactccagtgttatatttgaattatgggccctacagttcttatgcaccgcattatgactccacatttgcaaatatcagcaaggatgattctgatttaatctattcaacctatggggaagactctgatcttccaagtgatttcagcatccatgagtttttggccacgtgccaagattatccgtatgtcatggcagatagtttactggatgttttaacaaaaggagggcattccaggaccctacaagagatggagatgtcattgcctgaagatgaaggccatactaggacacttgacacagcaaaagaaatggagattacagaagtagagccaccagggcgtttggactccagtactcaagacaggctcatagcgctgaaagcagtaacaaattttggcgttccagttgaagtttttgactctgaagaagctgaaatattccagaagaaacttgatgagaccaccagattgctcagggaactccaggaagcccagaatgaacgtttgagcaccagaccccctccgaacatgatctgtctcttgggtccctcatacagagaaatgcatcttgctgaacaagtgaccaataatcttaaagaacttgcacagcaagtaactccaggtgatatcgtaagcacgtatggagttcgaaaagcaatggggatttccattccttcccccgtcatggaaaacaactttgtggatttgacagaagacactgaagaacctaaaaagacggatgttgctgagtgtggacctggtggaagttgaggctgcctggtatttgattatatattatgtacatactttttcattcttaacttagaaatgcttttcagaagatattaaatatttgtaaattgtgtttttaattaaactttggaacagcgaatttggatgttccagaggttggacttgtattaggtaataaagctggacctgggactcgtgaggaaggaatgtgcttggggctgttgccatacctgtgcagcattctttcaaaatagtgccttccaatgcttcttccttatgtcccacagacaggatcatcactaagaagcgttcttaaaacggccccatccagtgagattttccgttatacgaacatacttgaaataattttagaatttactactgtggttctgcccctgcatacccagtgggaatgatgcccttgtatgggtaattaggcacctcccacccacccctgacaaaagcacactgggagttttatagcactgtcacatggctagtgttcttttttggttttttccgttttttaaagaaagaggagttacttagtactatagcaaagtaataagccaaataagataaactaagtcatccttgaatagatcagggaattaccagattaccaaaaggtgacatttctactttacttactgtttatctgaaatacaaaggtcaagtacccaaggagttgaactctaagtaggagaccacaagattcatggcccccttttatcagcaagctgagataaatggtgattttgctgaatcggtatagaacctgttatacacaagggaaaaaaatcaggatggagatagatagatagatagccttgttcagtgaacaaattaagtttgaaggcccttatacaatccttctataaatcacccaggcaggaagccatttgatttctattattttcctgactttgaaaattaattagtatttaggaagaacaaatagggtaaaggaaaattaattccctcaaaagacttaaaatcttatgctaaaagagtcaaattttcaagttgtttgagtctacttttaatctctagtgagttcatgaggaccacgaaaataaaataccttcagatatttgagtttttcaaattgctaatttaatgtataaaaagcagctaaacactggtactttataaaaatgaaacagcattttgaaacaaatgttacagatctataaatattcattatatagaataaaccctagttacttgcatgtccccgtacatcgttagaagcttgaattcgagcagtagtagtagtaggcggccgc

SEQ ID NO: 415017 - DNA, 1441 bp, Homo sapiens
gcggccgcctactactactaaattcgcggccgcgtcgacttttttatatttgagtttttcaaattgctaatttaatgtataaaaagcagctaaacactggtactttataaaaatgaaacagcattttgaaacaaatgttacagatctataaatattcattatatagaataaaccctagttacttgcatgcaccacctcaaatcatatttctttacactgacctattatatacacaaagtatacagtggttaatgatcttctcttctgtttgtttgtttgtttgtttgttaggaaatttcctcaataagccagaaaaccttaggtattattttcacaaaagttaactcaggagaaattgtaaggaagtccttgacccatggagaaggtcactgtttgtttgtttgttagatacgtgtgtctgtcataaaacaaaatgacaccagtaattacttggtaatttaaaaacaagttcataaaaagaaaatacctgcaggtaatttttatggtcagttatattctataacctgaacactgaaaactaaaaacttttacttacaaactattattatctgagcacagcacagtgctttgctttaattggaaataaaaatgcatgagtgagtggtagtcagttatttgttaaactcccaactggggtttctgttgttactgaagaaaaaaacaaatattccaagagtacaaatatgctgacctcagagaggcccagtgcactaatgtgtttctatgttatattagcaacagaaaccttcctgacttgccaggagagcccccgccgggcagccctggtcactgctagatcttgagagcacagatttcagtatagtattcatgtgaaaccagcccttcatgtaaaaagttttggtgtgtaaaaaaggcaacttaagcgaggctaattgcccttaccagcattgttgccatgaaattcctttatacagcaagttcttctattcatactgattccacttatgtgcagcacatgagagctgccactagtctacccagcacctttgtgcaaattagaatacacctgcccttcctcgggctgataaagccacacgacacagcacaggcagacaggttcaattttcgttccctccaccgccacccccgcacttagctgtactcttaatttgcagcccggggcaactcatcccaggaccccaacaagtctggtcagtcacccaatctgcaaccctgtataatcatcttgtaaaggctcctgtatgcaagactttgtgtagaactttacggggttcatggggacacctagctaagaatccctgctatgtagggaaactgagtgcattagaaatcctggcgatgctctggtgatgaggccaccggttaagtcttccggttatgaagtccattcagaaaaagtcacgggcagtttggtcatttctcaccctgttgttacagt

SEQ ID NO: 415018 - DNA, 1980 bp, Homo sapiens
  misc_feature (314)..(314): n is a, c, g, or t
  misc_feature (366)..(366): n is a, c, g, or t
  misc_feature (405)..(405): n is a, c, g, or t
ccacgcgtccgggtctcgcgggccccgctcccgccctccgctcgcctggcccggaccggaagcggcgccgcacggcctgggcctggcgcggggggcgggcaccggggcccggtcggacatgggcaagaagcacaagaagcacaagtcggacaaacacctctacgaggagtatgtagagaagcccttgaagctggtcctcaaagtaggagggaacgaagtcaccgaactctccacgggcagctcggggcacgactccagcctcttcgaagacaaaaacgatcatgacaaacacaaggacagaaagcggaaaaagngaaagaaaggagagaagcagattccaggggaagaaaaggggagaaaacgganaagagttaaggaggataaaaagaagcgagatcgagaccnggtggagaatgaggcagaaaaagatctccagtgtcacgcccctgtgagattagacttgcctcctgagaagcctctcacaagctctttagccaaacaagaagaagtagaacagacaccccttcaagaagctttgaatcaactgatgagacaattgcagagaaaagatccaagtgctttcttttcatttcctgtgactgattttattgctcctggctactccatgatcattaaacacccaatggattttagtaccatgaaagaaaagatcaagaacaatgactatcagtccatagaagaactaaaggataacttcaaactaatgtgtactaatgccatgatttacaataaaccagagaccatttattataaagctgcaaagaagctgttgcactcaggaatgaaaattcttagccaggaaagaattcagagcctgaagcagagcatagacttcatggctgacttgcagaaaactcgaaagcagaaagatggaacagacacctcacagagtggggaggacggaggctgctggcagagagagagagaggactctggagatgccgaagcacacgccttcaagagtcccagcaaagaaaataaaaagaaagacaaagatatgcttgaagataagtttaaaagcaataatttagagagagagcaggagcagcttgaccgcatcgtgaaggaatctggaggaaagctgaccaggcggcttgtgaacagtcagtgcgaatttgaaagaagaaaaccagatggaacaacgacgttgggacttctccatcctgtggatcccattgtaggagagccaggctactgccctgtgagactgggaatgacaactggaagacttcagtctggagtgaatactttgcaggggttcaaagaggataaaaggaacaaagtcactccagtgttatatttgaattatgggccctacagttcttatgcaccgcattatgactccacatttgcaaatatcagcaaggatgattctgatttaatctattcaacctatggggaagactctgatcttccaagtgatttcagcatccatgagtttttggccacgtgccaagattatccgtatgtcatggcagatagtttactggatgttttaacaaaaggagggcattccaggaccctacaagagatggagatgtcattgcctgaagatgaaggccatactaggacacttgacacagcaaaagaaatggaggtgattttattttacactttacaagaaatatttaaatggaaaataaggggagtaagagaagtcttgagaatgggaaggcccattgggtaagaaggaaaaaggttagtgagtagagttgtgagggcctagctgaaatggcaaaccataaatgcatatcagtgccaagttgcacaattatacagtttctcccccacaagtttttagcccatatgtaggtagagaaatcaggtggatcaatggagttagagttggagagccataccatagtataaatggaaccattagcttttgattgcttaatatctgggttgatctattcctaaaaagtaatgttgaggttatggaaacccctgagtcttaat

SEQ ID NO: 415019 - DNA, 420 bp, Homo sapiens
atctgtttttaatgtataaactactcttagttttctttttatcttgtctaaagaattaataaagatttcctgtgtgcagaagagccacaatgatcacctgataatgcgcgtagtcttcagccttggatgtggtgaagaagggctctcagcagttatgcttctggatggcagcttgactttcatgtcccctttttaattaaaaggtaaaaacaatgttgaattaagtgatgtctttttctttcagacactgaagaacctaaaaagacggatgttgctgagtgtggacctggtggaagttgaggctgcctggtatttgattatatattatgtacatactttttcattcttaacttagaaatgcttttcagaagatattaaatatttgtaaattgtgtttttaattaaactttggaacagcga

SEQ ID NO: 415020 - DNA, 635 bp, Homo sapiens
gatcagattctaatttgacaggcaaccagtcaatgaaacagacacacctgcacagttggaaatggaggatgaagatacaattgatgtgtttcagcaacagacaagaagtgtctactgaaaaaggaacctgcttctttactctagaactttgttcttatagaccaagattacattctcaattagaaaactgcaatttggttccaccacatcatgactattactatagtatagttttctctattcttttatttttcccttacccattcccttattgtacataaaataatgggtgtatgttcacaagcattttgctgttttaaatattaaatggccaatgacatccacttgatgtcaatcaaaacatatctgtggggaaaaataccgattcttgaaaattacctccctttctccatcagtggcatgctcattcaactcttatcttacattgcaatgttattttgttctcactattttaacaaaaaaaaaaaatccttgcataccttattcaattggagaattttaatgtttttcatttatcattgtaaaaccaaggacaattttataacttttcgtgtatatagctcttacatgtagggcaatctgtctttaactagagataaattactcttaaaaaa

SEQ ID NO: 415021 - DNA, 1870 bp, Homo sapiens
cttgcgttgcacccgggctgagtgcggccgcgacggggcgggcggactctcgggcgctcagagctggcctcgggtcctcggagcctggcgctcgaacctcccttccgacctccacccggaccccgaccccgacccggcctggcccggcccccgcccccgccccccgggccgatggactactcctacctcaattcgtacgactcgtgcgtggcggccatggaggcgtccgcctacggcgactttggcgcctgcagccagcccggcggcttccaatacagccccctgcggcccgctttccccgcggcagggccgccctgccccgcgctcggctcctccaactgcgcacttggcgccctacgcgaccaccagcccgcgccctactcggcagtgccatacaatttcttcccagagccatccggcctgcacgagaagcgcaagcagcggcgcatccgcaccacgttcaccagcgcgcagctcaaggagctggagcgcgttttcgctgagacccactaccccgacatttacacgcgtgaggagctggcgctcaagatcgacctcactgaggctcgcgtgcaggtctggttccagaaccgccgggccaagttccgcaaacaggagcgcgcggccagcgccaagggcgcggcgggcgcggcgggcgccaaaaagggcgaggcgcgctgctcctccgaggacgacgattccaaggagtccacgtgcagccccacgcccgatagcaccgcctcgctgccgccgccgcctgcgcccggcctggccagcccgcgcctgagccccagcccgctgcccgtcgcactgggctccgggccgggacctgggccggggccacagccgctcaagggcgcactgtgggccggtgtggcgggcggtgggggcggcgggcctggcgcgggagcggccgaactacttaaggcttggcagccggcggagtccggccccgggcccttctccggggttctgtcctcctttcaccggaagcccggccccgccctgaagaccaatctcttctagctgccggcctctggaggctccgagcctgcccccagagacgtccctgcccctccaggacctgacagcccctcccatcctggccacccgcctggaagtccccatccgtctccactccctactgtctcacccctcggtgtgtcctccccaactttggagaccaagtcagggccactctcgtcctcacccaccctctaccagcagagcggagttctttataccgggacctcctccaggagaaccccggagctccttctagcttggccttctttggatgcggtatcacatgaggcctgtccctaacagtgccctcaaagtgaaggtcctcaaggaggatcggcacagcccccttccctggctctgcagcggctgggtcaccccttacgctggtgatcaggaaagcccgctgccccacccctcgggcccacccgtacagaggctggtggtcgccgggataattaatgaccaccgccaattcatccctcacgtgtctcctctcttccctagcccgtctggcacagagggtggacctgttagaggagtggaggggctgcctggggaatgggacagagggattctctttccctaatttttttggttgtcctttttctttgaaaaacttgtaatttattgaagttttactcaatccaaataaaacttaatttattgaagacatcacgccgcaacccttacgactgcccaggaggctgcttgcaagaccctgtcccgggctgagacctgcgaggaacctccctcccccaccctgccgccgtgcatccccagagcagggcagcacagaccaggagacagtgagaactaagcaaactggcactttatggctgagatc

SEQ ID NO: 415022 - DNA, 1494 bp, Homo sapiens
ctcggagcgcaggctcagctccgcgctgcgagcgctacgggcgcaggggcggggagccggcccggagcgcagtttccagtggggccggggtttcacccgggccctctctgtttgaaccgaacccgacaaatgggcgcatgacgatggagagcagggaaatggactgctatctccgtcgcctcaaacaggagctgatgtccatgaaggaggtgggtgatggcttacaggatcagatgaactgcatgatgggtgcactgcaagaactgaagctcctccaggtgcagacagcactggaacagctggagatctctggagggggtcctgtgccaggcagccctgaaggtcccaggacccagtgcgagcacccttgttgggagggtggcagaggtcctgccaggcccacagtctgttccccctccagtcaaccttctcttggcagcagcaccaagtttccatcccataggagtgtctgtggaagggatttagcccccttgcccaggacacagccacatcaaagctgtgctcagcaggggccagagcgagtggaaccggatgactggacctccacgttgatgtcccggggccggaatcgacagcctctggtgttaggggacaacgtttttgcagacctggtgggcaattggctagacttgccagaactggagaagggtggggagaagggtgagactgggggggcacgtgaacccaaaggagagaaaggccagccccaggagctgggccgcaggtttgccctgacagcaaacatctttaagaagttcttgcgtagtgtgcggcctgaccgtgaccggctgctgaaggagaagccaggctgggtgacacccatggtccctgagtcccgaaccggccgctcacagaaggtcaagaagcggagcctttccaagggctctggacatttccccttcccaggcaccggggagcacaggcgaggggagaatccccccacaagctgccccaaggccctggagcactcaccctcaggatttgatattaacacagctgtttgggtctgaatcctagagacagaaagttgactgagcctgaaagggccaggtcccagtgctgggcccctggggaggagggagggtgggcggtatggctctcgaaagcccaactccaagttcctttcccccagaaagcggggagaagccagagttcttggctcaggactgaagggaaggtggttgggagaggctgtcttgggggctagctggtggaggaggtaagagtagctggagagtgagctgtgcgtgtgtgtgtgtgtgtgtgcatgtgtgtgtctgtctggcatgcatgcactcactttggggctggaggtgacagtaggtgagggcagaggaggagatcagaaaatccctctgacatctccactgcccccaaagacctccgttgaacattctgtatggaaaagagccctggagcatcaggttccccagataggcccccaaataaagacctgtctatggctctcccaac

SEQ ID NO: 415023 - DNA, 1397 bp, Homo sapiens
agggacgggagtcggaggctgagagactgcccagacacacaaaaaatgtggcctgaggaaagccccaagagggaggagaggaaagatgaggcaactgatgtccatgaaggaggtgggtgatggcttacaggatcagatgaactgcatgatgggtgcactgcaagaactgaagctcctccaggtgcagacagcactggaacagctggagatctctggagggggtcctgtgccaggcagccctgaaggtcccaggacccagtgcgagcacccttgttgggagggtggcagaggtcctgccaggcccacagtctgttccccctccagtcaaccttctcttggcagcagcaccaagtttccatcccataggagtgtctgtggaagggatttagcccccttgcccaggacacagccacatcaaagctgtgctcagcaggggccagagcgagtggaaccggatgactggacctccacgttgatgtcccggggccggaatcgacagcctctggtgttaggggacaacgtttttgcagacctggtgggcaattggctagacttgccagaactggagaagggtggggagaagggtgagactgggggggcacgtgaacccaaaggagagaaaggccagccccaggagctgggccgcaggtttgccctgacagcaaacatctttaagaagttcttgcgtagtgtgcggcctgaccgtgaccggctgctgaaggagaagccaggctgggtgacacccatggtccctgagtcccgaaccggccgctcacagaaggtcaagaagcggagcctttccaagggctctggacatttccccttcccaggcaccggggagcacaggcgaggggagaatccccccacaagctgccccaaggccctggagcactcaccctcaggatttgatattaacacagctgtttgggtctgaatcctagagacagaaagttgactgagcctgaaagggccaggtcccagtgctgggcccctggggaggagggagggtgggcggtatggctctcgaaagcccaactccaagttcctttcccccagaaagcggggagaagccagagttcttggctcaggactgaagggaaggtggttgggagaggctgtcttgggggctagctggtggaggaggtaagagtagctggagagtgagctgtgcgtgtgtgtgtgtgtgtgtgcatgtgtgtgtctgtctggcatgcatgcactcactttggggctggaggtgacagtaggtgagggcagaggaggagatcagaaaatccctctgacatctccactgcccccaaagacctccgttgaacattctgtatggaaaagagccctggagcatcaggttccccagataggcccccaaataaagacctgtctatggctctcccaac

SEQ ID NO: 415024 - DNA, 778 bp, Homo sapiens
ccgccatttgagctggtcttcatagtcctggctgagcactacaaggtggtggtaaatggaaatcccttctatgagtacgggcaccggcttcccctacagatggtcacccacctgcaagtggatggggatctgcaacttcaatcaatcaacttcatcggaggccagcccctccggccccagggacccccgatgatgccaccttaccctggtcccggacattgccatcaacagctgaacagcctgcccaccatggaaggacccccaaccttcaacccgcctgtgccatatttcgggaggctgcaaggagggctcacagctcgaagaaccatcatcatcaagggctatgtgcctcccacaggcaagagctttgctatcaacttcaaggtgggctcctcaggggacatagctctgcacattaatccccgcatgggcaacggtaccgtggtccggaacagccttctgaatggctcgtggggatccgaggagaagaagatcacccacaacccatttggtcccggacagttctttgatctgtccattcgctgtggcttggatcgcttcaaggtttacgccaatggccagcacctctttgactttgcccatcgcctctcggccttccagagggtggacacattggaaatccagggtgatgtcaccttgtcctatgtccagatctaatctattcctggggccataactcatgggaaaacagaattatcccctaggactcctttctaagcccctaataaaatgtctgagggtgtctcatgaaaaaaaa

SEQ ID NO: 415025 - DNA, 760 bp, Homo sapiens
gaggagaggaagaggagcatgcccttcatggtggtaaatggaaatcccttctatgagtacgggcaccggcttcccctacagatggtcacccacctgcaagtggatggggatctgcaacttcaatcaatcaacttcatcggaggccagcccctccggccccagggacccccgatgatgccaccttaccctggtcccggacattgccatcaacagctgaacagcctgcccaccatggaaggacccccaaccttcaacccgcctgtgccatatttcgggaggctgcaaggagggctcacagctcgaagaaccatcatcatcaagggctatgtgcctcccacaggcaagagctttgctatcaacttcaaggtgggctcctcaggggacatagctctgcacattaatccccgcatgggcaacggtaccgtggtccggaacagccttctgaatggctcgtggggatccgaggagaagaagatcacccacaacccatttggtcccggacagttctttgatctgtccattcgctgtggcttggatcgcttcaaggtttacgccaatggccagcacctctttgactttgcccatcgcctctcggccttccagagggtggacacattggaaatccagggtgatgtcaccttgtcctatgtccagatctaatctattcctggggccataactcatgggaaaacagaattatcccctaggactcctttctaagcccctaataaaatgtctgagggtgtctcatgaaaaaaaa

SEQ ID NO: 415026 - DNA, 811 bp, Homo sapiens
gaggagaggaagaggagcatgcccttcatggtggtaaatggaaatcccttctatgagtacgggcaccggcttcccctacagatggtcacccacctgcaagtggatggggatctgcaacttcaatcaatcaacttcatcggaggccagcccctccggccccaggggttgcagcccaaggtgtactaacccagcacctagagaaacgccggagtctaatgggtgtgtcatagatatctgtcgactcttggagaataatatcgcttcttcctcacttcacagaccatggaaggacccccaaccttcaacccgcctgtgccatatttcgggaggctgcaaggagggctcacagctcgaagaaccatcatcatcaagggctatgtgcctcccacaggcaagagctttgctatcaacttcaaggtgggctcctcaggggacatagctctgcacattaatccccgcatgggcaacggtaccgtggtccggaacagccttctgaatggctcgtggggatccgaggagaagaagatcacccacaacccatttggtcccggacagttctttgatctgtccattcgctgtggcttggatcgcttcaaggtttacgccaatggccagcacctctttgactttgcccatcgcctctcggccttccagagggtggacacattggaaatccagggtgatgtcaccttgtcctatgtccagatctaatctattcctggggccataactcatgggaaaacagaattatcccctaggactcctttctaagcccctaataaaatgtctgagggtgtctcatgaaaaaaaa

SEQ ID NO: 415027 - DNA, 516 bp, Homo sapiens
ccccgattatgaatggcggaggcgtgaatggcgtacgcgttgaaggccggaggcgtagaatggccatcatcatcaagggctatgtgcctcccacaggcaagagctttgctatcaacttcaaggtgggctcctcaggggacatagctctgcacattaatccccgcatgggcaacggtaccgtggtccggaacagccttctgaatggctcgtggggatccgaggagaagaagatcacccacaacccatttggtcccggacagttctttgatctgtccattcgctgtggcttggatcgcttcaaggtttacgccaatggccagcacctctttgactttgcccatcgcctctcggccttccagagggtggacacattggaaatccagggtgatgtcaccttgtcctatgtccagatctaatctattcctggggccataactcatgggaaaacagaattatcccctaggactcctttctaagcccctaataaaatgtctgagggtgtctcatgaaaaaaaa

SEQ ID NO: 415028 - DNA, 575 bp, Homo sapiens
ccgccatttgagctggtcttcatagtcctggctgagcactacaaggtggtggtaaatggaaatcccttctatgagtacgggcaccggcttcccctacagatggtcacccacctgcaagtggatggggatctgcaacttcaatcaatcaacttcatcggaggccagcccctccggccccagggacccccgatgatgccaccttaccctggtcccggacattgccatcaacagctgaacagcctgcccaccatggaaggacccccaaccttcaacccgcctgtgccatatttcgggaggctgcaaggagggctcacagctcgaagaaccatcatcatcaagggctatgtgcctcccacaggcaagagctttgctatcaacttcaaggtgggctcctcaggggacatagctctgcacattaatccccgcatgggcaacggtaccgtggtccggaacagccttctgaatggctcgtggggatccgaggagaagaagatcacccacaacccatttggtcccggacagttctttgatctgtccattcgctgtggtggcagaattgggatcctctagatcac

SEQ ID NO: 415029 - DNA, 353 bp, Homo sapiens
  misc_feature (5)..(5): n is a, c, g, or t
cagcnactaggctgagtaggggattccccacgcacctgtcaactgtctaatgaccttcattcctgcgcgtgtcttcagcacccccggggcacttggtgtttgttctctgtccattcgctgtggcttggatcgcttcaaggtttacgccaatggccagcacctctttgactttgcccatcgcctctcggccttccagagggtggacacattggaaatccagggtgatgtcaccttgtcctatgtccagatctaatctattcctggggccataactcatgggaaaacagaattatcccctaggactcctttctaagcccctaataaaatgtctgagggtgtctcatgaaaaaaaa

SEQ ID NO: 415030 - DNA, 2350 bp, Homo sapiens
gaaacttaaaggtgtttaccttgtcatcagcatgtaagctaattatctcgggcaagatgtaggcttctattgtcttgttgctttagcgcttacgccccgcctctggtggctgcctaaaacctggcgccgggctaaaacaaacgcgaggcagcccccgagcctccactcaagccaattaaggaggactcggtccactccgttacgtgtacatccaacaagatcggcgttaaggtaacaccagaatatttggcaaagggagaaaaaaaaagcagcgaggcttcgccttccccctctcccttttttttcctcctcttccttcctcctccagccgccgccgaatcatgtcgatgagtccaaagcacacgactccgttctcagtgtctgacatcttgagtcccctggaggaaagctacaagaaagtgggcatggagggcggcggcctcggggctccgctggcggcgtacaggcagggccaggcggcaccgccaacagcggccatgcagcagcacgccgtggggcaccacggcgccgtcaccgccgcctaccacatgacggcggcgggggtgccccagctctcgcactccgccgtggggggctactgcaacggcaacctgggcaacatgagcgagctgccgccgtaccaggacaccatgaggaacagcgcctctggccccggatggtacggcgccaacccagacccgcgcttccccgccatctcccgcttcatgggcccggcgagcggcatgaacatgagcggcatgggcggcctgggctcgctgggggacgtgagcaagaacatggccccgctgccaagcgcgccgcgcaggaagcgccgggtgctcttctcgcaggcgcaggtgtacgagctggagcgacgcttcaagcaacagaagtacctgtcggcgccggagcgcgagcacctggccagcatgatccacctgacgcccacgcaggtcaagatctggttccagaaccaccgctacaaaatgaagcgccaggccaaggacaaggcggcgcagcagcaactgcagcaggacagcggcggcggcgggggcggcgggggcaccgggtgcccgcagcagcaacaggctcagcagcagtcgccgcgacgcgtggcggtgccggtcctggtgaaagacggcaaaccgtgccaggcgggtgcccccgcgccgggcgccgccagcctacaaggccacgcgcagcagcaggcgcagcaccaggcgcaggccgcgcaggcggcggcagcggccatctccgtgggcagcggtggcgccggccttggcgcacacccgggccaccagccaggcagcgcaggccagtctccggacctggcgcaccacgccgccagccccgcggcgctgcagggccaggtatccagcctgtcccacctgaactcctcgggctcggactacggcaccatgtcctgctccaccttgctatacggtcggacctggtgagaggacgccgggccggccctagcccagcgctctgcctcaccgcttccctcctgcccgccacacagaccaccatccaccgctgctccacgcgcttcgacttttcttaacaacctggccgcgtttagaccaaggaacaaaaaaaccacaaaggccaaactgctggacgtctttctttttttccccccctaaaatttgtgggttttttttttaaaaaaaagaaaatgaaaaacaaccaagcgcatccaatctcaaggaatctttaagcagagaagggcataaaacagctttgggggtgtctttttttggtgattcaaatgggttttccacgctagggcggggcacagattggagagggctctgtgctgacatggctctggactctaaagaccaaacttcactctgggcacactctgccagcaaagaggactcgcttgtaaataccaggattttttttttttttttgaagggaggacgggagctggggagaggaaagagtcttcaacataacccacttgtcactgacacaaaggaagtgccccctccccggcaccctctggccgcctaggctcagcggcgaccgccctccgcgaaaatagtttgtttaatgtgaacttgtagctgtaaaacgctgtcaaaagttggactaaatgcctagtttttagtaatctgtacattttgttgtaaaaagaaaaaccactcccagtccccagcccttcacattttttatgggcattgacaaatctgtgtatattatttggcagtttggtatttgcggcgtcagtctttttctgttgtaacttatgtagatatttggcttaaatatagttcctaagaagcttctaataaattatacaaattaaaaagattctttttctgattaaaaccctcctttt

SEQ ID NO: 415031 - DNA, 762 bp, Homo sapiens
ggaagcacgcgtcctctccgtccacgccgcgtgcgtccctagggggtcccgcactgcagagccccactgcagtgacagaaataagcccaccgacgacaggagcccaacccgaacccagcacgacaactaactcgctggaccatccgctcgactatgcggcaaagggggccttctcctacggccccgccgaagaccgtcgaggctctggtcgatacgctgctctgtgtggtcgccgccgtgccggtccgccagtgtgtgtggggggctgtcctgtgggccctctccttggtggggtgcggagcccctcggtgccccgctagcgttctggctgcgcggtgtagctctccctcgcgctctgctctcttctctctctctctctctctgctctctctctctctctctctctctctctctctctctctctctctctctctctctctctcggcacgagagacacgtagaccaacagtgcggccccagggttcgtccccagactcgctcgctcatttgttggcgactggggctcagcgcagcgaagcccgatgtggtccggaggcagtgggaaggcgcggggctgggaggccgcggcgggagggaggagcagccccggcaggctcaggtgaaacccccaccctgtccctcagccccctcctcctaaagacctgtccgtgcccggggaaccccgaccgaattggaaagtggttccactttgtaactccgcaagttggttgcaaagcagcattcaccttccttcctctcaac

SEQ ID NO: 415032 - DNA, 2641 bp, Homo sapiens
ggaagcacgcgtcctctccgtccacgccgcgtgcgtccctagggggtcccgcactgcagagccccactgcagtgacagaaataagcccaccgacgacaggagcccaacccgaacccagcacgacaactaactcgctggaccatccgctcgactatgcggcaaagggggccttctcctacggccccgccgaagaccgtcgaggctctggtcgatacgctgctctgtgtggtcgccgccgtgccggtccgccagtgtgtgtggggggctgtcctgtgggccctctccttggtggggtgcggagcccctcggtgccccgctagcgttctggctgcgcggtgtagctctccctcgcgctctgctctcttctctctctctctctctctgctctctctctctctctctctctctctctctctctctctctctctctctctctctctctcggcacgagagacacgtagaccaacagtgcggccccagggttcgtccccagactcgctcgctcatttgttggcgactggggctcagcgcagcgaagcccgatgtggtccggaggcagtgggaaggcgcggggctgggaggccgcggcgggagggaggagcagccccggcaggctcagccgccgccgaatcatgtcgatgagtccaaagcacacgactccgttctcagtgtctgacatcttgagtcccctggaggaaagctacaagaaagtgggcatggagggcggcggcctcggggctccgctggcggcgtacaggcagggccaggcggcaccgccaacagcggccatgcagcagcacgccgtggggcaccacggcgccgtcaccgccgcctaccacatgacggcggcgggggtgccccagctctcgcactccgccgtggggggctactgcaacggcaacctgggcaacatgagcgagctgccgccgtaccaggacaccatgaggaacagcgcctctggccccggatggtacggcgccaacccagacccgcgcttccccgccatctcccgcttcatgggcccggcgagcggcatgaacatgagcggcatgggcggcctgggctcgctgggggacgtgagcaagaacatggccccgctgccaagcgcgccgcgcaggaagcgccgggtgctcttctcgcaggcgcaggtgtacgagctggagcgacgcttcaagcaacagaagtacctgtcggcgccggagcgcgagcacctggccagcatgatccacctgacgcccacgcaggtcaagatctggttccagaaccaccgctacaaaatgaagcgccaggccaaggacaaggcggcgcagcagcaactgcagcaggacagcggcggcggcgggggcggcgggggcaccgggtgcccgcagcagcaacaggctcagcagcagtcgccgcgacgcgtggcggtgccggtcctggtgaaagacggcaaaccgtgccaggcgggtgcccccgcgccgggcgccgccagcctacaaggccacgcgcagcagcaggcgcagcaccaggcgcaggccgcgcaggcggcggcagcggccatctccgtgggcagcggtggcgccggccttggcgcacacccgggccaccagccaggcagcgcaggccagtctccggacctggcgcaccacgccgccagccccgcggcgctgcagggccaggtatccagcctgtcccacctgaactcctcgggctcggactacggcaccatgtcctgctccaccttgctatacggtcggacctggtgagaggacgccgggccggccctagcccagcgctctgcctcaccgcttccctcctgcccgccacacagaccaccatccaccgctgctccacgcgcttcgacttttcttaacaacctggccgcgtttagaccaaggaacaaaaaaaccacaaaggccaaactgctggacgtctttctttttttccccccctaaaatttgtgggttttttttttaaaaaaaagaaaatgaaaaacaaccaagcgcatccaatctcaaggaatctttaagcagagaagggcataaaacagctttgggggtgtctttttttggtgattcaaatgggttttccacgctagggcggggcacagattggagagggctctgtgctgacatggctctggactctaaagaccaaacttcactctgggcacactctgccagcaaagaggactcgcttgtaaataccaggattttttttttttttttgaagggaggacgggagctggggagaggaaagagtcttcaacataacccacttgtcactgacacaaaggaagtgccccctccccggcaccctctggccgcctaggctcagcggcgaccgccctccgcgaaaatagtttgtttaatgtgaacttgtagctgtaaaacgctgtcaaaagttggactaaatgcctagtttttagtaatctgtacattttgttgtaaaaagaaaaaccactcccagtccccagcccttcacattttttatgggcattgacaaatctgtgtatattatttggcagtttggtatttgcggcgtcagtctttttctgttgtaacttatgtagatatttggcttaaatatagttcctaagaagcttctaataaattatacaaattaaaaagattctttttctgattaaaaccctcctttt

SEQ ID NO: 415033 - DNA, 2786 bp, Homo sapiens
ggaagcacgcgtcctctccgtccacgccgcgtgcgtccctagggggtcccgcactgcagagccccactgcagtgacagaaataagcccaccgacgacaggagcccaacccgaacccagcacgacaactaactcgctggaccatccgctcgactatgcggcaaagggggccttctcctacggccccgccgaagaccgtcgaggctctggtcgatacgctgctctgtgtggtcgccgccgtgccggtccgccagtgtgtgtggggggctgtcctgtgggccctctccttggtggggtgcggagcccctcggtgccccgctagcgttctggctgcgcggtgtagctctccctcgcgctctgctctcttctctctctctctctctctgctctctctctctctctctctctctctctctctctctctctctctctctctctctctctcggcacgagagacacgtagaccaacagtgcggccccagggttcgtccccagactcgctcgctcatttgttggcgactggggctcagcgcagcgaagcccgatgtggtccggaggcagtgggaaggcgcggggctgggaggccgcggcgggagggaggagcagccccggcaggctcagcgcttacgccccgcctctggtggctgcctaaaacctggcgccgggctaaaacaaacgcgaggcagcccccgagcctccactcaagccaattaaggaggactcggtccactccgttacgtgtacatccaacaagatcggcgttaagccgccgccgaatcatgtcgatgagtccaaagcacacgactccgttctcagtgtctgacatcttgagtcccctggaggaaagctacaagaaagtgggcatggagggcggcggcctcggggctccgctggcggcgtacaggcagggccaggcggcaccgccaacagcggccatgcagcagcacgccgtggggcaccacggcgccgtcaccgccgcctaccacatgacggcggcgggggtgccccagctctcgcactccgccgtggggggctactgcaacggcaacctgggcaacatgagcgagctgccgccgtaccaggacaccatgaggaacagcgcctctggccccggatggtacggcgccaacccagacccgcgcttccccgccatctcccgcttcatgggcccggcgagcggcatgaacatgagcggcatgggcggcctgggctcgctgggggacgtgagcaagaacatggccccgctgccaagcgcgccgcgcaggaagcgccgggtgctcttctcgcaggcgcaggtgtacgagctggagcgacgcttcaagcaacagaagtacctgtcggcgccggagcgcgagcacctggccagcatgatccacctgacgcccacgcaggtcaagatctggttccagaaccaccgctacaaaatgaagcgccaggccaaggacaaggcggcgcagcagcaactgcagcaggacagcggcggcggcgggggcggcgggggcaccgggtgcccgcagcagcaacaggctcagcagcagtcgccgcgacgcgtggcggtgccggtcctggtgaaagacggcaaaccgtgccaggcgggtgcccccgcgccgggcgccgccagcctacaaggccacgcgcagcagcaggcgcagcaccaggcgcaggccgcgcaggcggcggcagcggccatctccgtgggcagcggtggcgccggccttggcgcacacccgggccaccagccaggcagcgcaggccagtctccggacctggcgcaccacgccgccagccccgcggcgctgcagggccaggtatccagcctgtcccacctgaactcctcgggctcggactacggcaccatgtcctgctccaccttgctatacggtcggacctggtgagaggacgccgggccggccctagcccagcgctctgcctcaccgcttccctcctgcccgccacacagaccaccatccaccgctgctccacgcgcttcgacttttcttaacaacctggccgcgtttagaccaaggaacaaaaaaaccacaaaggccaaactgctggacgtctttctttttttccccccctaaaatttgtgggttttttttttaaaaaaaagaaaatgaaaaacaaccaagcgcatccaatctcaaggaatctttaagcagagaagggcataaaacagctttgggggtgtctttttttggtgattcaaatgggttttccacgctagggcggggcacagattggagagggctctgtgctgacatggctctggactctaaagaccaaacttcactctgggcacactctgccagcaaagaggactcgcttgtaaataccaggattttttttttttttttgaagggaggacgggagctggggagaggaaagagtcttcaacataacccacttgtcactgacacaaaggaagtgccccctccccggcaccctctggccgcctaggctcagcggcgaccgccctccgcgaaaatagtttgtttaatgtgaacttgtagctgtaaaacgctgtcaaaagttggactaaatgcctagtttttagtaatctgtacattttgttgtaaaaagaaaaaccactcccagtccccagcccttcacattttttatgggcattgacaaatctgtgtatattatttggcagtttggtatttgcggcgtcagtctttttctgttgtaacttatgtagatatttggcttaaatatagttcctaagaagcttctaataaattatacaaattaaaaagattctttttctgattaaaaccctcctttt

SEQ ID NO: 415034 - DNA, 3832 bp, Homo sapiens
  misc_feature (1492)..(1492): n is a, c, g, or t
  misc_feature (1496)..(1496): n is a, c, g, or t
  misc_feature (2174)..(2175): n is a, c, g, or t
ggaagcacgcgtcctctccgtccacgccgcgtgcgtccctagggggtcccgcactgcagagccccactgcagtgacagaaataagcccaccgacgacaggagcccaacccgaacccagcacgacaactaactcgctggaccatccgctcgactatgcggcaaagggggccttctcctacggccccgccgaagaccgtcgaggctctggtcgatacgctgctctgtgtggtcgccgccgtgccggtccgccagtgtgtgtggggggctgtcctgtgggccctctccttggtggggtgcggagcccctcggtgccccgctagcgttctggctgcgcggtgtagctctccctcgcgctctgctctcttctctctctctctctctctgctctctctctctctctctctctctctctctctctctctctctctctctctctctctctcggcacgagagacacgtagaccaacagtgcggccccagggttcgtccccagactcgctcgctcatttgttggcgactggggctcagcgcagcgaagcccgatgtggtccggaggcagtgggaaggcgcggggctgggaggccgcggcgggagggaggagcagccccggcaggctcagcgcttacgccccgcctctggtggctgcctaaaacctggcgccgggctaaaacaaacgcgaggcagcccccgagcctccactcaagccaattaaggaggactcggtccactccgttacgtgtacatccaacaagatcggcgttaaggtaacaccagaatatttggcaaagggagaaaaaaaaagcagcgaggcttcgccttccccctctcccttttttttcctcctcttccttcctcctccagccgccgccgaatcatgtcgatgagtccaaagcacacgactccgttctcagtgtctgacatcttgagtcccctggaggaaagctacaagaaagtgggcatggagggcggcggcctcggggctccgctggcggcgtacaggcagggccaggcggcaccgccaacagcggccatgcagcagcacgccgtggggcaccacggcgccgtcaccgccgcctaccacatgacggcggcgggggtgccccagctctcgcactccgccgtggggggctactgcaacggcaacctgggcaacatgagcgagctgccgccgtaccaggacaccatgaggaacagcgcctctggccccggatggtacggcgccaacccagacccgcgcttccccgccagtaagtgaggccgccccactgcggggccgcgggctgagctcaggaggtgcggcgagagctccagaaggcgcggcgccggcaggctgcgcgtgggcatcagggagggcggcccggcagcggcgccagggacttgggtgcgggagctggggatgcttcccctgctcggctggggtccaagaacaggcacttggtagcgctggggtcctgcggtcagatgcgggtactcggcgtctcctaggcgcggnggantggcagctctctcggcgcagaagacctcggggagccaagggaagcgaccccgagctcaaggagcaggggcgagcagagcgcggagaggctagaccgggccaggagggaggctgccctgttgggaggcactcgagcgcccggcccggccctctctccagcggagtctggcaggtgggaggactcgcagttccagagggactctaagggtccgagcaggtgccctcactggggcctgacaggagagaagccaagaggcaaagcgtctgggggctccagcttttggaagtcaacaccccctctcctaacctctccaaactggggtctaccgtagaccccagctcccggcctgagcccagttcgccgcctgtggcagctaatcctaatgctctgacccgggctgggcacgaaaggagcagaagcgcctttcccccactgcgtcttttggttcgaaagaggaactgagactgagggagggcagccagggttggggctgtgagcgctccagtacagccccctcgacggtacggcctggggcaggcgctggcagttccccgcggatggcctcttgggccccagcgctaggctgcctgggtcaggagggcgccgtcggttggggcgggccgggcggccaatggcgcggaaaacagggtggcctggctcggcctggccccggccgannctgtgcgtttgtcgcttacagtctcccgcttcatgggcccggcgagcggcatgaacatgagcggcatgggcggcctgggctcgctgggggacgtgagcaagaacatggccccgctgccaagcgcgccgcgcaggaagcgccgggtgctcttctcgcaggcgcaggtgtacgagctggagcgacgcttcaagcaacagaagtacctgtcggcgccggagcgcgagcacctggccagcatgatccacctgacgcccacgcaggtcaagatctggttccagaaccaccgctacaaaatgaagcgccaggccaaggacaaggcggcgcagcagcaactgcagcaggacagcggcggcggcgggggcggcgggggcaccgggtgcccgcagcagcaacaggctcagcagcagtcgccgcgacgcgtggcggtgccggtcctggtgaaagacggcaaaccgtgccaggcgggtgcccccgcgccgggcgccgccagcctacaaggccacgcgcagcagcaggcgcagcaccaggcgcaggccgcgcaggcggcggcagcggccatctccgtgggcagcggtggcgccggccttggcgcacacccgggccaccagccaggcagcgcaggccagtctccggacctggcgcaccacgccgccagccccgcggcgctgcagggccaggtatccagcctgtcccacctgaactcctcgggctcggactacggcaccatgtcctgctccaccttgctatacggtcggacctggtgagaggacgccgggccggccctagcccagcgctctgcctcaccgcttccctcctgcccgccacacagaccaccatccaccgctgctccacgcgcttcgacttttcttaacaacctggccgcgtttagaccaaggaacaaaaaaaccacaaaggccaaactgctggacgtctttctttttttccccccctaaaatttgtgggttttttttttaaaaaaaagaaaatgaaaaacaaccaagcgcatccaatctcaaggaatctttaagcagagaagggcataaaacagctttgggggtgtctttttttggtgattcaaatgggttttccacgctagggcggggcacagattggagagggctctgtgctgacatggctctggactctaaagaccaaacttcactctgggcacactctgccagcaaagaggactcgcttgtaaataccaggattttttttttttttttgaagggaggacgggagctggggagaggaaagagtcttcaacataacccacttgtcactgacacaaaggaagtgccccctccccggcaccctctggccgcctaggctcagcggcgaccgccctccgcgaaaatagtttgtttaatgtgaacttgtagctgtaaaacgctgtcaaaagttggactaaatgcctagtttttagtaatctgtacattttgttgtaaaaagaaaaaccactcccagtccccagcccttcacattttttatgggcattgacaaatctgtgtatattatttggcagtttggtatttgcggcgtcagtctttttctgttgtaacttatgtagatatttggcttaaatatagttcctaagaagcttctaataaattatacaaattaaaaagattctttttctgattaaaaccctcctttt

SEQ ID NO: 415035 - DNA, 2550 bp, Homo sapiens
ggaagcacgcgtcctctccgtccacgccgcgtgcgtccctagggggtcccgcactgcagagccccactgcagtgacagaaataagcccaccgacgacaggagcccaacccgaacccagcacgacaactaactcgctggaccatccgctcgactatgcggcaaagggggccttctcctacggccccgccgaagaccgtcgaggctctggtcgatacgctgctctgtgtggtcgccgccgtgccggtccgccagtgtgtgtggggggctgtcctgtgggccctctccttggtggggtgcggagcccctcggtgccccgctagcgttctggctgcgcggtgtagctctccctcgcgctctgctctcttctctctctctctctctctgctctctctctctctctctctctctctctctctctctctctctctctctctctctctctcggcacgagagacacgtagaccaacagtgcggccccagggttcgtccccagactcgctcgctcatttgttggcgactggggctcagccgccgccgaatcatgtcgatgagtccaaagcacacgactccgttctcagtgtctgacatcttgagtcccctggaggaaagctacaagaaagtgggcatggagggcggcggcctcggggctccgctggcggcgtacaggcagggccaggcggcaccgccaacagcggccatgcagcagcacgccgtggggcaccacggcgccgtcaccgccgcctaccacatgacggcggcgggggtgccccagctctcgcactccgccgtggggggctactgcaacggcaacctgggcaacatgagcgagctgccgccgtaccaggacaccatgaggaacagcgcctctggccccggatggtacggcgccaacccagacccgcgcttccccgccatctcccgcttcatgggcccggcgagcggcatgaacatgagcggcatgggcggcctgggctcgctgggggacgtgagcaagaacatggccccgctgccaagcgcgccgcgcaggaagcgccgggtgctcttctcgcaggcgcaggtgtacgagctggagcgacgcttcaagcaacagaagtacctgtcggcgccggagcgcgagcacctggccagcatgatccacctgacgcccacgcaggtcaagatctggttccagaaccaccgctacaaaatgaagcgccaggccaaggacaaggcggcgcagcagcaactgcagcaggacagcggcggcggcgggggcggcgggggcaccgggtgcccgcagcagcaacaggctcagcagcagtcgccgcgacgcgtggcggtgccggtcctggtgaaagacggcaaaccgtgccaggcgggtgcccccgcgccgggcgccgccagcctacaaggccacgcgcagcagcaggcgcagcaccaggcgcaggccgcgcaggcggcggcagcggccatctccgtgggcagcggtggcgccggccttggcgcacacccgggccaccagccaggcagcgcaggccagtctccggacctggcgcaccacgccgccagccccgcggcgctgcagggccaggtatccagcctgtcccacctgaactcctcgggctcggactacggcaccatgtcctgctccaccttgctatacggtcggacctggtgagaggacgccgggccggccctagcccagcgctctgcctcaccgcttccctcctgcccgccacacagaccaccatccaccgctgctccacgcgcttcgacttttcttaacaacctggccgcgtttagaccaaggaacaaaaaaaccacaaaggccaaactgctggacgtctttctttttttccccccctaaaatttgtgggttttttttttaaaaaaaagaaaatgaaaaacaaccaagcgcatccaatctcaaggaatctttaagcagagaagggcataaaacagctttgggggtgtctttttttggtgattcaaatgggttttccacgctagggcggggcacagattggagagggctctgtgctgacatggctctggactctaaagaccaaacttcactctgggcacactctgccagcaaagaggactcgcttgtaaataccaggattttttttttttttttgaagggaggacgggagctggggagaggaaagagtcttcaacataacccacttgtcactgacacaaaggaagtgccccctccccggcaccctctggccgcctaggctcagcggcgaccgccctccgcgaaaatagtttgtttaatgtgaacttgtagctgtaaaacgctgtcaaaagttggactaaatgcctagtttttagtaatctgtacattttgttgtaaaaagaaaaaccactcccagtccccagcccttcacattttttatgggcattgacaaatctgtgtatattatttggcagtttggtatttgcggcgtcagtctttttctgttgtaacttatgtagatatttggcttaaatatagttcctaagaagcttctaataaattatacaaattaaaaagattctttttctgattaaaaccctcctttt

SEQ ID NO: 415036 - DNA, 1015 bp, Homo sapiens
agctgtgggtgtatggtgagttgatgttgtccctgacttagggaatatttataaacaagggcagaggtatcccctggacatgttagggacagcgctttaatggacagagggtgaaagatcaggaaaggcagggggttctttccccccagacatatcagtgattggctggctttgctttatcctgggtaaatttagactgctttgcaaatgagtaaaattattgacatttcctaaaaggctcacggtacattagtagactatattatttttataaaaagctctttcctctgcctccccaagggaaaagtgaaccagctcttcagaggaggagagcatcttaaacagacgagatggatgagctggctcttggcttgcaggctaatcttgctgatctctctcttaggaaaaacagacgacgcaaaggtgtctgagaaaggaaggctttctcctaaagcctcccaggtgaagcgctccccatcagatgcaggccggagcagtggtgacgaatccaaaaagcccctccccagcagctctaggacacctactgccaatgccaacagctttgggttcaagaagcagagtggttccgccgccggcctggccatgatcacagccagcggggtgactgtcaccagcaggtcagccacactgggcaaaatcccaaagtcatctgcactcgtcagtcggtctgctggtcggaagtcaagtatggatggggctcagaatcaggatgacgggtatctagccctaagctcccggacaaaccttcagtaccggagtttgccgaggcccagtaagtccaacagccggaacggggctgggaacaggtctagcaccagcagcatagattccaacattagcagcaagtccgcaggcctgccagtgcccaaactgagggagccttccaaaacagccctaggcagctctctaccaggtctggtcaaccaaacagacaaggagaaaggcatctcatcagacaacgagagtgtggcttcctgtaactcggtgaaagtga

SEQ ID NO: 415037 - DNA, 718 bp, Homo sapiens
tcccagacaggctcatggcggcgaggcatgacagctcaggtgggcatcaccatgccaaggacgaagccttcagccccggcaggcgcactgaagaccccaggaactggaaaaacagacgacgcaaaggtgtctgagaaaggaaggctttctcctaaagcctcccaggtgaagcgctccccatcagatgcaggccggagcagtggtgacgaatccaaaaagcccctccccagcagctctaggacacctactgccaatgccaacagctttgggttcaagaagcagagtggttccgccgccggcctggccatgatcacagccagcggggtgactgtcaccagcaggtcagccacactgggcaaaatcccaaagtcatctgcactcgtcagtcggtctgctggtcggaagtcaagtatggatggggctcagaatcaggatgacgggtatctagccctaagctcccggacaaaccttcagtaccggagtttgccgaggcccagtaagtccaacagccggaacggggctgggaacaggtctagcaccagcagcatagattccaacattagcagcaagtccgcaggcctgccagtgcccaaactgagggagccttccaaaacagccctaggcagctctctaccaggtctggtcaaccaaacagacaaggagaaaggcatctcatcagacaacgagagtgtggcttcctgtaactcggtgaaagtga

SEQ ID NO: 415038 - DNA, 6169 bp, Homo sapiens
gtgctcgcttcggcagcacatatactaaaattggaacgatacagagaagattagcatggcccctgcgcaaggatgacacgcaaattcgtgaagcgttccatattttttccccaaccaggatttgaacagagacgtgaatgtctaaccttttgattctattccttttattccagcgagtcccaccactgtcacccagatgagcttgtccaacccgaccatgctgaggactcacagcctctccaatgctgatgggcagtatgatccatacactgacagccgcttccggaatagctccatgtccctggatgagaagagcagaaccatgagccgttcaggctcattccgggatgggtttgaagaagttcatggatcctcactctccttggtttccagcacatcgtcagtttattctacaccagaagaaaaatgccagtcagagattcgcaagctgcggcgggaactggatgcctcccaggagaaagtttcagctttgaccacccagctgacagcaaatgctcaccttgtggcagcctttgaacagagtcttggtaacatgacaatcaggctccagagtctgaccatgacagctgagcagaaggactcagaactgaatgagttaagaaaaaccattgagctgctaaagaaacagaacgcagctgcccaggctgccattaatggagtaattaacacacctgagctcaactgcaaaggaaacggcactgcccagtctgcagacctccgcatccgcaggcagcactcctcagacagcgtctccagcatcaacagtgccaccagccactccagcgtgggcagcaacatagagagtgactcaaagaagaagaagcggaagaactggttacgcagctccttcaagcaagctttcgggaagaagaagtccccaaaatctgcgtcctctcattcagatattgaggagatgacggattcttctttgccttcctcaccaaagttaccgcacaatgggtccacaggttccaccccactgctgaggaattctcactccaactctctaatttcagaatgcatggatagtgaagctgagaccgtcatgcagctccgaaatgagttaagagacaaggagatgaagctgacggatatccgcttagaagctctcagttctgcccaccagctggaccagctccgggaggccatgaacaggatgcagagtgaaatagagaagctgaaagctgagaatgatcggctgaagtcagagtctcaaggcagtggctgcagccgggctccttcccaagtgtccatctctgcctccccgaggcagtccatgggcctctcccagcacagcttgaacctcactgagtcaaccagcctggacatgttgctggatgacactggtgaatgctcggctcggaaggaaggaggcaggcatgttaagatagttgtcagctttcaggaggaaatgaagtggaaggaggattccagaccacatctctttcttattggctgcattggagttagtggcaagacgaagtgggatgtgctcgatggggtggttagacggctgttcaaagaatacatcattcatgtcgacccagtgagtcagctagggctgaattcagacagcgttcttggctacagcattggagaaatcaagcgcagcaacacttccgaaacaccggagctgcttccttgtggctatctggttggagagaacacgaccatctcagtgactgtgaaagggctcgcagaaaacagcctggactcactggtgtttgagtccttgattcccaagcccatcctgcagcgctacgtctccctcctgatagagcaccgtcggatcattctctctggccccagcggcactgggaaaacctacctggccaaccggctgtctgagtatatagtgcttcgagagggacgggagttgacagacggggttatcgccacctttaacgtggaccataagtccagcaaggaattgcgccagtacctgtccaaccttgctgaccagtgcaacagtgagaacaatgctgtggacatgcccctcgtcatcatcctggacaacctacaccacgtgagctctctgggcgagatcttcaatgggctgctcaactgcaagtaccacaaatgcccttacataattggcacaatgaaccaggctacctcttcgactcccaacctgcagcttcaccataacttcagatgggtgctttgtgccaaccacacggagcctgtgaagggtttccttggccgattcctgaggaggaagctcatggaaacagagatcagtgggcgggtgcgcaatatggagctggtaaaaatcattgactggattcccaaggtctggcatcacctcaaccgcttcctggaggctcacagttcctcggacgtcaccatcggcccccggctcttcctgtcatgccccatcgatgtggacggctcgagagtgtggttcaccgacttgtggaactattccattatcccctatctcctggaagccgtcagagaaggactccagctctatggaaggcgcgccccctgggaggatcctgccaagtgggtgatggacacatatccatgggcagccagcccacaacagcacgagtggcctcccctgctgcagttacggcctgaggatgtcggcttcgacggctactccatgcctcgggagggatcgacaagcaagcagatgccccccagtgatgctgaaggtgacccgctgatgaacatgctgatgaggctgcaggaggcagccaactactccagcccccagagctatgacagcgactccaacagcaacagccatcacgatgacatcttggactcctctttggagtccactctgtgacaggggcccggagcccagcgccctcctcttctcctcaccgcattccacctgcatcccccacatcaccctgaagatgacttcctgagccagcccccagccacagccttagagctgcgggaacaccgagaccccccgtccttcagcctcgacctgggtgcaggcatcccgggccagctgcctgcggaccgcttccttccacagcgagaactgcactaccttctgttgtactttaattattgttttgccttgttgctgtgacctccctaagacactgaagatacttctcgggaaaggatcatcgccgttgaaatgaaaagagagacagagagagaaaaaaaaaagagaacccacatgaagctctgaaaccaaacagcatcctgccatgagcttcccagagacagaagagactggagcaaagtcggaaacacagagaagcacggcttcccctcagcacagaccctccagactgggtctcagagccgtgccacccaccctcccacacagccggccacagggagaactggtgctaaccagggtgcttgctttggtcacgttcaacgcactacagagctacgacacaggggaaccttaggagcaaataaaccgtgctttcatgttttttaaatggtgctttccttacccgagaggtattttgcctgttccaatcgaaccaccccattcaggtccatcagcctctgattaatatccgtgagagtgagtgacggagtgagagtgtgagcgagtggatgtggctgtcagtgcagaacagcatgtgtctctttccttctgatatatgaatgaatcaggtttttttttttttttctgcaaacactgtgtatagtgagacttgttctactttggagaacaggttaccttttgaaaatgaggttgagtttcttcctttctgatgcattgatttttgaagatttttttttcccccttcccctcttggtcagaatcaatcctttggtgaaagtaagaaccgcaggagttgagttttggtttggtcctgctcagttttggtttttagttgtccatcctcacagtcctacacactcgcctcctcctgctagggctgggggtatctgtgtcctttaaaatggatgaggacctggtcctcgacatgtgggtgagccatggaccttgccttcccttctcgtccttgagggtttagaacacacaccaacacctccagcgtccccgccccagcttccggtggggtgatgcggtcaccctgcaaaagacttgcactttcctcagaaccaacatgacgcagctcaataagggtgagggtcactccctcccagaagccccgtctggacgagccttgcctgacctcttcggtgctgaccttcccaaagtgatgccttactggttttgtactaactgtgttcattttacataagtgtcgtgcctgcctggggtttgttttttttgtcattgttttccccattgaaacaaacagggctaaaaagtcatctgttcattaggagaactcaagttgctgtgacttttctcatccaaaagactcatttgtgtggatgcgtgaccatgggaaaaagaaaaaaaaaaagatccattttttaggttcttttcggtctccagctggcaacccaactggacaatgatctgtctggtgcaggagaaggcaaaagtttctacaagtctacatgaccttgctgatacttgttctaatagaaacccagtctgctgtgtcttcaacatactggtattttcattacaaagtatggtaaatttttgagttgtttgtttctgttttgtaaagagaatccttattggacaccagtgaaggtgtctctgttttaatgatcagggtttttattccatcttttgcatttcttctatttctgaaggtttgtctcttggcatctttttttagtttcttaccataagagtttgacccgaaactgctcacttcacattggatgacaccatgttcttcctctttgaaaagaaaaggggaatgtgtcccactagtgaaaggaaaacttttcaacactatccctgctttagtctcagcaaactcagactattctgcttagccttcattagtcatctgggtgtgagtgtgtcttgttctgtttttctttttaataaaacttttaaaccatatatttagcctgtgaccaggggggccaaaccctaagatttctggtaaacctgaagggtggccctcctcagacaatttatctcccagcaatgaccctactacactcgcgtactgtgaatttgggaggaggtaaagttgacttctcctcgtgggcagttttccaatcaccttgtgagtagacacctgccaatattgtttgaaacctttttttaatatgacatcctctcttgtcattctcttctcccctttcccacagacttccctcctgggtccaggttcagaaccaagacttctgtacctagtgctgcctgattggtgaacattgacttcaagtagcatagcccttgtgtgactcacaactccgtgtccttcctaaagtttcgggaagcagggttgtctaatatgcacatttcttattttggtcatatttttactttagtgtcactcaccttttacaaagtgactttgtactcatttagggctctatcggaaatgcttccattttgccttttctacagttaggccaattttgaaatatataaattctatgcaacatttatgttgagttaccaatggaagccaaaagttctcttcccaaactgccaagaatgatacaggccataattgaaatgggaataccttttaagtttcattaggggtggggtgggagtgggacaggaacaagacttgcctagatctttgttgtatcttggggacttttactttgttgtttgatgcttaaacttcaaaattctctgtattcaaatttgattgtggcgaatctacttcaaaaaggaaaaataatccaactttgtggatattaaatggaaggtttgctgttttgatctagttgtttccagtggagcagttttatgaaatatgttctataagatgtacattttttcattgtaacatagaaattgtaaataattgattaaagtgctgcattttgatgaattttttctagccatttttaaagagaaaactaggaattgagtattttgtgtacggtatgtttccatcctccctccccttcctcctcccctcctctctctctcttcctacctatttaattttcatttgtcatgaggtttttggatttgccaatgatctgctggacatcatgccccatgtcatagagaataaagctgatgattgtaccagtcttaaattattcatgattcaataaaattgatgcttatttattcagaaaaatg

SEQ ID NO: 415039 - DNA, 3511 bp, Homo sapiens
acagaaagcagctcatgcttctccactcttcccctagatgaacatgctgatgaggctgcaggaggcagccaactactccagcccccagagctatgacagcgactccaacagcaacagccatcacgatgacatcttggactcctctttggagtccactctgtgacaggggcccggagcccagcgccctcctcttctcctcaccgcattccacctgcatcccccacatcaccctgaagatgacttcctgagccagcccccagccacagccttagagctgcgggaacaccgagaccccccgtccttcagcctcgacctgggtgcaggcatcccgggccagctgcctgcggaccgcttccttccacagcgagaactgcactaccttctgttgtactttaattattgttttgccttgttgctgtgacctccctaagacactgaagatacttctcgggaaaggatcatcgccgttgaaatgaaaagagagacagagagagaaaaaaaaaagagaacccacatgaagctctgaaaccaaacagcatcctgccatgagcttcccagagacagaagagactggagcaaagtcggaaacacagagaagcacggcttcccctcagcacagaccctccagactgggtctcagagccgtgccacccaccctcccacacagccggccacagggagaactggtgctaaccagggtgcttgctttggtcacgttcaacgcactacagagctacgacacaggggaaccttaggagcaaataaaccgtgctttcatgttttttaaatggtgctttccttacccgagaggtattttgcctgttccaatcgaaccaccccattcaggtccatcagcctctgattaatatccgtgagagtgagtgacggagtgagagtgtgagcgagtggatgtggctgtcagtgcagaacagcatgtgtctctttccttctgatatatgaatgaatcaggtttttttttttttttctgcaaacactgtgtatagtgagacttgttctactttggagaacaggttaccttttgaaaatgaggttgagtttcttcctttctgatgcattgatttttgaagatttttttttcccccttcccctcttggtcagaatcaatcctttggtgaaagtaagaaccgcaggagttgagttttggtttggtcctgctcagttttggtttttagttgtccatcctcacagtcctacacactcgcctcctcctgctagggctgggggtatctgtgtcctttaaaatggatgaggacctggtcctcgacatgtgggtgagccatggaccttgccttcccttctcgtccttgagggtttagaacacacaccaacacctccagcgtccccgccccagcttccggtggggtgatgcggtcaccctgcaaaagacttgcactttcctcagaaccaacatgacgcagctcaataagggtgagggtcactccctcccagaagccccgtctggacgagccttgcctgacctcttcggtgctgaccttcccaaagtgatgccttactggttttgtactaactgtgttcattttacataagtgtcgtgcctgcctggggtttgttttttttgtcattgttttccccattgaaacaaacagggctaaaaagtcatctgttcattaggagaactcaagttgctgtgacttttctcatccaaaagactcatttgtgtggatgcgtgaccatgggaaaaagaaaaaaaaaaagatccattttttaggttcttttcggtctccagctggcaacccaactggacaatgatctgtctggtgcaggagaaggcaaaagtttctacaagtctacatgaccttgctgatacttgttctaatagaaacccagtctgctgtgtcttcaacatactggtattttcattacaaagtatggtaaatttttgagttgtttgtttctgttttgtaaagagaatccttattggacaccagtgaaggtgtctctgttttaatgatcagggtttttattccatcttttgcatttcttctatttctgaaggtttgtctcttggcatctttttttagtttcttaccataagagtttgacccgaaactgctcacttcacattggatgacaccatgttcttcctctttgaaaagaaaaggggaatgtgtcccactagtgaaaggaaaacttttcaacactatccctgctttagtctcagcaaactcagactattctgcttagccttcattagtcatctgggtgtgagtgtgtcttgttctgtttttctttttaataaaacttttaaaccatatatttagcctgtgaccaggggggccaaaccctaagatttctggtaaacctgaagggtggccctcctcagacaatttatctcccagcaatgaccctactacactcgcgtactgtgaatttgggaggaggtaaagttgacttctcctcgtgggcagttttccaatcaccttgtgagtagacacctgccaatattgtttgaaacctttttttaatatgacatcctctcttgtcattctcttctcccctttcccacagacttccctcctgggtccaggttcagaaccaagacttctgtacctagtgctgcctgattggtgaacattgacttcaagtagcatagcccttgtgtgactcacaactccgtgtccttcctaaagtttcgggaagcagggttgtctaatatgcacatttcttattttggtcatatttttactttagtgtcactcaccttttacaaagtgactttgtactcatttagggctctatcggaaatgcttccattttgccttttctacagttaggccaattttgaaatatataaattctatgcaacatttatgttgagttaccaatggaagccaaaagttctcttcccaaactgccaagaatgatacaggccataattgaaatgggaataccttttaagtttcattaggggtggggtgggagtgggacaggaacaagacttgcctagatctttgttgtatcttggggacttttactttgttgtttgatgcttaaacttcaaaattctctgtattcaaatttgattgtggcgaatctacttcaaaaaggaaaaataatccaactttgtggatattaaatggaaggtttgctgttttgatctagttgtttccagtggagcagttttatgaaatatgttctataagatgtacattttttcattgtaacatagaaattgtaaataattgattaaagtgctgcattttgatgaattttttctagccatttttaaagagaaaactaggaattgagtattttgtgtacggtatgtttccatcctccctccccttcctcctcccctcctctctctctcttcctacctatttaattttcatttgtcatgaggtttttggatttgccaatgatctgctggacatcatgccccatgtcatagagaataaagctgatgattgtaccagtcttaaattattcatgattcaataaaattgatgcttatttattcagaaaaatg

SEQ ID NO: 415040 - DNA, 3232 bp, Homo sapiens
tactttcgggccctgactgatctaccttggagaacctgatccttagactccagcaggatgtcttatcgaccgcatcagtgcaaacagccctgccagccaccttctgttgtactttaattattgttttgccttgttgctgtgacctccctaagacactgaagatacttctcgggaaaggatcatcgccgttgaaatgaaaagagagacagagagagaaaaaaaaaagagaacccacatgaagctctgaaaccaaacagcatcctgccatgagcttcccagagacagaagagactggagcaaagtcggaaacacagagaagcacggcttcccctcagcacagaccctccagactgggtctcagagccgtgccacccaccctcccacacagccggccacagggagaactggtgctaaccagggtgcttgctttggtcacgttcaacgcactacagagctacgacacaggggaaccttaggagcaaataaaccgtgctttcatgttttttaaatggtgctttccttacccgagaggtattttgcctgttccaatcgaaccaccccattcaggtccatcagcctctgattaatatccgtgagagtgagtgacggagtgagagtgtgagcgagtggatgtggctgtcagtgcagaacagcatgtgtctctttccttctgatatatgaatgaatcaggtttttttttttttttctgcaaacactgtgtatagtgagacttgttctactttggagaacaggttaccttttgaaaatgaggttgagtttcttcctttctgatgcattgatttttgaagatttttttttcccccttcccctcttggtcagaatcaatcctttggtgaaagtaagaaccgcaggagttgagttttggtttggtcctgctcagttttggtttttagttgtccatcctcacagtcctacacactcgcctcctcctgctagggctgggggtatctgtgtcctttaaaatggatgaggacctggtcctcgacatgtgggtgagccatggaccttgccttcccttctcgtccttgagggtttagaacacacaccaacacctccagcgtccccgccccagcttccggtggggtgatgcggtcaccctgcaaaagacttgcactttcctcagaaccaacatgacgcagctcaataagggtgagggtcactccctcccagaagccccgtctggacgagccttgcctgacctcttcggtgctgaccttcccaaagtgatgccttactggttttgtactaactgtgttcattttacataagtgtcgtgcctgcctggggtttgttttttttgtcattgttttccccattgaaacaaacagggctaaaaagtcatctgttcattaggagaactcaagttgctgtgacttttctcatccaaaagactcatttgtgtggatgcgtgaccatgggaaaaagaaaaaaaaaaagatccattttttaggttcttttcggtctccagctggcaacccaactggacaatgatctgtctggtgcaggagaaggcaaaagtttctacaagtctacatgaccttgctgatacttgttctaatagaaacccagtctgctgtgtcttcaacatactggtattttcattacaaagtatggtaaatttttgagttgtttgtttctgttttgtaaagagaatccttattggacaccagtgaaggtgtctctgttttaatgatcagggtttttattccatcttttgcatttcttctatttctgaaggtttgtctcttggcatctttttttagtttcttaccataagagtttgacccgaaactgctcacttcacattggatgacaccatgttcttcctctttgaaaagaaaaggggaatgtgtcccactagtgaaaggaaaacttttcaacactatccctgctttagtctcagcaaactcagactattctgcttagccttcattagtcatctgggtgtgagtgtgtcttgttctgtttttctttttaataaaacttttaaaccatatatttagcctgtgaccaggggggccaaaccctaagatttctggtaaacctgaagggtggccctcctcagacaatttatctcccagcaatgaccctactacactcgcgtactgtgaatttgggaggaggtaaagttgacttctcctcgtgggcagttttccaatcaccttgtgagtagacacctgccaatattgtttgaaacctttttttaatatgacatcctctcttgtcattctcttctcccctttcccacagacttccctcctgggtccaggttcagaaccaagacttctgtacctagtgctgcctgattggtgaacattgacttcaagtagcatagcccttgtgtgactcacaactccgtgtccttcctaaagtttcgggaagcagggttgtctaatatgcacatttcttattttggtcatatttttactttagtgtcactcaccttttacaaagtgactttgtactcatttagggctctatcggaaatgcttccattttgccttttctacagttaggccaattttgaaatatataaattctatgcaacatttatgttgagttaccaatggaagccaaaagttctcttcccaaactgccaagaatgatacaggccataattgaaatgggaataccttttaagtttcattaggggtggggtgggagtgggacaggaacaagacttgcctagatctttgttgtatcttggggacttttactttgttgtttgatgcttaaacttcaaaattctctgtattcaaatttgattgtggcgaatctacttcaaaaaggaaaaataatccaactttgtggatattaaatggaaggtttgctgttttgatctagttgtttccagtggagcagttttatgaaatatgttctataagatgtacattttttcattgtaacatagaaattgtaaataattgattaaagtgctgcattttgatgaattttttctagccatttttaaagagaaaactaggaattgagtattttgtgtacggtatgtttccatcctccctccccttcctcctcccctcctctctctctcttcctacctatttaattttcatttgtcatgaggtttttggatttgccaatgatctgctggacatcatgccccatgtcatagagaataaagctgatgattgtaccagtcttaaattattcatgattcaataaaattgatgcttatttattcagaaaaatg

SEQ ID NO: 415041 - DNA, 2561 bp, Homo sapiens
tcccagacaggctcatggcggcgaggcatgacagctcaggtgggcatcaccatgccaaggacgaagccttcagccccggcaggcgcactgaagaccccaggaactggtaagaggccggggctgtcttggccctggggcaccaacgccagcagctcctccgcagttagcaaggatggcctgggctttcagtctgtcagcagcctccacaccagctgtgagtccatcgacatctccctcagcagtggaggggtccccagccacaattcttccactggcctcatcgcctcctccaaggacgactccttgactccctttgtcagaactaacagtgtgaagaccacactgtcagaaagaccttgccttcccttctcgtccttgagggtttagaacacacaccaacacctccagcgtccccgccccagcttccggtggggtgatgcggtcaccctgcaaaagacttgcactttcctcagaaccaacatgacgcagctcaataagggtgagggtcactccctcccagaagccccgtctggacgagccttgcctgacctcttcggtgctgaccttcccaaagtgatgccttactggttttgtactaactgtgttcattttacataagtgtcgtgcctgcctggggtttgttttttttgtcattgttttccccattgaaacaaacagggctaaaaagtcatctgttcattaggagaactcaagttgctgtgacttttctcatccaaaagactcatttgtgtggatgcgtgaccatgggaaaaagaaaaaaaaaaagatccattttttaggttcttttcggtctccagctggcaacccaactggacaatgatctgtctggtgcaggagaaggcaaaagtttctacaagtctacatgaccttgctgatacttgttctaatagaaacccagtctgctgtgtcttcaacatactggtattttcattacaaagtatggtaaatttttgagttgtttgtttctgttttgtaaagagaatccttattggacaccagtgaaggtgtctctgttttaatgatcagggtttttattccatcttttgcatttcttctatttctgaaggtttgtctcttggcatctttttttagtttcttaccataagagtttgacccgaaactgctcacttcacattggatgacaccatgttcttcctctttgaaaagaaaaggggaatgtgtcccactagtgaaaggaaaacttttcaacactatccctgctttagtctcagcaaactcagactattctgcttagccttcattagtcatctgggtgtgagtgtgtcttgttctgtttttctttttaataaaacttttaaaccatatatttagcctgtgaccaggggggccaaaccctaagatttctggtaaacctgaagggtggccctcctcagacaatttatctcccagcaatgaccctactacactcgcgtactgtgaatttgggaggaggtaaagttgacttctcctcgtgggcagttttccaatcaccttgtgagtagacacctgccaatattgtttgaaacctttttttaatatgacatcctctcttgtcattctcttctcccctttcccacagacttccctcctgggtccaggttcagaaccaagacttctgtacctagtgctgcctgattggtgaacattgacttcaagtagcatagcccttgtgtgactcacaactccgtgtccttcctaaagtttcgggaagcagggttgtctaatatgcacatttcttattttggtcatatttttactttagtgtcactcaccttttacaaagtgactttgtactcatttagggctctatcggaaatgcttccattttgccttttctacagttaggccaattttgaaatatataaattctatgcaacatttatgttgagttaccaatggaagccaaaagttctcttcccaaactgccaagaatgatacaggccataattgaaatgggaataccttttaagtttcattaggggtggggtgggagtgggacaggaacaagacttgcctagatctttgttgtatcttggggacttttactttgttgtttgatgcttaaacttcaaaattctctgtattcaaatttgattgtggcgaatctacttcaaaaaggaaaaataatccaactttgtggatattaaatggaaggtttgctgttttgatctagttgtttccagtggagcagttttatgaaatatgttctataagatgtacattttttcattgtaacatagaaattgtaaataattgattaaagtgctgcattttgatgaattttttctagccatttttaaagagaaaactaggaattgagtattttgtgtacggtatgtttccatcctccctccccttcctcctcccctcctctctctctcttcctacctatttaattttcatttgtcatgaggtttttggatttgccaatgatctgctggacatcatgccccatgtcatagagaataaagctgatgattgtaccagtcttaaattattcatgattcaataaaattgatgcttatttattcagaaaaatg

SEQ ID NO: 415042 - DNA, 1604 bp, Homo sapiens
gtgctcgcttcggcagcacatatactaaaattggaacgatacagagaagattagcatggcccctgcgcaaggatgacacgcaaattcgtgaagcgttccatattttttccccaaccaggatttgaacagagacgtgaatgtctaaccttttgattctattccttttattccagcgagtcccaccactgtcacccagatgagcttgtccaacccgaccatgctgaggactcacagcctctccaatgctgatgggcagtatgatccatacactgacagccgcttccggaatagctccatgtccctggatgagaagagcagaaccatgagccgttcaggctcattccgggatgggtttgaagaagttcatggatcctcactctccttggtttccagcacatcgtcagtttattctacaccagaagaaaaatgccagtcagagattcgcaagctgcggcgggaactggatgcctcccaggagaaagtttcagctttgaccacccagctgacagcaaatgctcaccttgtggcagcctttgaacagagtcttggtaacatgacaatcaggctccagagtctgaccatgacagctgagcagaaggactcagaactgaatgagttaagaaaaaccattgagctgctaaagaaacagaacgcagctgcccaggctgccattaatggagtaattaacacacctgagctcaactgcaaaggaaacggcactgcccagtctgcagacctccgcatccgcaggcagcactcctcagacagcgtctccagcatcaacagtgccaccagccactccagcgtgggcagcaacatagagagtgactcaaagaagaagaagcggaagaactggttacgcagctccttcaagcaagctttcgggaagaagaagtccccaaaatctgcgtcctctcattcagatattgaggagatgacggattcttctttgccttcctcaccaaagttaccgcacaatgggtccacaggttccaccccactgctgaggaattctcactccaactctctgtaagtctgtctgtctagtcagataacatctttggcccctgagaaccttctccagtaggaatggctaggagtcctgttatgacacatctgctccttgggatcctttatgctttgctttaataggactgtgcatgttctttcaatgctttaggactgggaaagttgaaagagaaaagaaacttaggttttcgttctgatggtgtcaatatccataactaactggttggccttaagcgggttacttaaattctctttgtttccatacctctatatatcaatttgggataatggtttttgtgtacgtatcctagccctaagaattggacgagataaatggatatacaggagcttgcttcctgcagcagtaagaaaggctggccctgctcagtagggctgaatttcttttgaaaccatggtgttccaggtctagaattaaagaactggagcacaggtagtctgcaaggaaagttgtcagagagatgagacagtgcatgggagaagagggaagtcatggccagggtcaggacagccactgagatagggttagagaaagaagtttggttgtataaacttca

SEQ ID NO: 415043 - DNA, 1080 bp, Homo sapiens
tcccagacaggctcatggcggcgaggcatgacagctcaggtgggcatcaccatgccaaggacgaagccttcagccccggcaggcgcactgaagaccccaggaactggtaagaggccggggctgtcttggccctggggcaccaacgccagcagctcctccgcagttagcaaggatggcctgggctttcagtctgtcagcagcctccacaccagctgtgagtccatcgacatctccctcagcagtggaggggtccccagccacaattcttccactggcctcatcgcctcctccaaggacgactccttgactccctttgtcagaactaacagtgtgaagaccacactgtcagaaagccctctctcttcccctgctgctagccctaagttctgcagaagtactctgcccaggaaacaggacaggtaatgacattgcaggccggggaccaaccgagcctctaggttcttctgcccattcgttgtcaagccagatgtcttgtgcgaggctgttggcctaagccacctgcttgtgtttgtggctctagtgtactctgtgacacatggacatgccagtgagagtctgttcctctgtctgctaaagcccagggagaggtggagttgggctggcctcttcattcccattttgggaaggcgaccttaaaccctgccacttgatctggggcagcggaagctctcgcttgcatctcttgtggcctcctgtggcatgttcctgcttttcagcttccttcccattccttttgccacccccaaccccaagcccagaaatgacctgccacccactgtgtagcttggccctcacctttgtctacccctccccatgcagctgcctcttctccctttcaaaatcctttgctgaagtttggctcattatgtcttgcagactgttgtgttctgtgtgcccatttcctgcgatgataatgaaaaagaatgtgtagagtattaagactttacaaatgtacacgcttgtgtttgcccccagctgtaggtgggcctcagagatggatactgtccttaattttgtgggggagtgatgacctggccaaacataacaaacagatgttgt

SEQ ID NO: 415044 - DNA, 621 bp, Homo sapiens
tcccagacaggctcatggcggcgaggcatgacagctcaggtgggcatcaccatgccaaggacgaagccttcagccccggcaggcgcactgaagaccccaggaactggtaagaggccggggctgtcttggccctggggcaccaacgccagcagctcctccgcagttagcaaggatggcctgggctttcagtctgtcagcagcctccacaccagctgtgagtccatcgacatctccctcagcagtggaggggtccccagccacaattcttccactggcctcatcgcctcctccaaggacgactccttgactccctttgtcagaactaacagtgtgaagaccacactgtcagaaagccctctctcttcccctgctgctagccctaagttctgcagaagtactctgcccaggaaacaggacagtgacccgcaccttgataggaacactttgcctaagaaaggactcaggtatactcccacctcccagcttcgcacgcaagaagatgcaaaagaatggttacggtcccattctgcaggaggccttcaggacaccgctgccaattcccccttttcctctggctccagcgtgacttctccctccggaacaagattcaacttttcccag

SEQ ID NO: 415045 - DNA, 510 bp, Homo sapiens
tcccagacaggctcatggcggcgaggcatgacagctcaggtgggcatcaccatgccaaggacgaagccttcagccccggcaggcgcactgaagaccccaggaactggtaagaggccggggctgtcttggccctggggcaccaacgccagcagctcctccgcagttagcaaggatggcctgggctttcagtctgtcagcagcctccacaccagctgtgagtccatcgacatctccctcagcagtggaggggtccccagccacaattcttccactggcctcatcgcctcctccaaggacgactccttgactccctttgtcagaactaacagtgtgaagaccacactgtcagaaaggtatactcccacctcccagcttcgcacgcaagaagatgcaaaagaatggttacggtcccattctgcaggaggccttcaggacaccgctgccaattcccccttttcctctggctccagcgtgacttctccctccggaacaagattcaacttttcccag

SEQ ID NO: 415046 - DNA, 244 bp, Homo sapiens
ctggagtgtcctgtattgctgatgttctcctcccctgtcccctttttggttccataacagccatctatcaattcaccttttttttttcttttaatagttcatggatcctcactctccttggtttccagcacatcgtcagtttattctacagtgagtataaatcaatgctgtgtggctgtgatcatgagaactggggttcctttatcaaatgtgtcaagaataaaatatatgcatttatcctagg

SEQ ID NO: 415047 - DNA, 394 bp, Homo sapiens
tgaccttttaggagtccagggtgggccgccaactagacagaaagcagctcatgcttctccactcttcccctagatgaacatgctgatgaggctgcaggaggcagccaactactccagcccccagagctatgacagcgactccaacagcaacagccatcacgatgacatcttggactcctctttggagtccactctgtgacaggggcccggagcccagcgccctcctcttctcctcaccgcattccacctgcatcccccacatcaccctgaagatgacttcctgagccagcccccagccacagccttagagctgcgggaacaccgagaccccccgtccttcagcctcgacctgggtgcaggcatcccgggccagctgcctgcggaccgcttcctt

SEQ ID NO: 415048 - DNA, 301 bp, Homo sapiens
gcagttagcaaggatggcctgggctttcagtctgtcagcagcctccacaccagctgtgagtccatcgacatctccctcagcagtggaggggtccccagccacaattcttccactggcctcatcgcctcctccaaggacgactccttgactccctttgtcagaactaacagtgtgaagaccacactgtcagaaaggttggtgctgtgcctctggctgcctttctcagaaagacacccttccaaaaataaaaagattagcttaggaatcccaaatgtcgaatagcctttgcctgtaagatttc

SEQ ID NO: 415049 - DNA, 392 bp, Homo sapiens
gacagcgactccaacagcaacagccatcacgatgacatcttggactcctctttggagtccactctgtgacaggggcccggagcccagcgccctcctcttctcctcaccgcattccacctgcatcccccacatcaccctgaagatgacttcctgagccagcccccagccacagccttagagctgcgggaacaccgagaccccccgtccttcagcctcgacctgggtgcaggcatcccgggccagctgcctgcggaccgcttccttccacagcgagaactgcactaccttctgttgtactttaattattgttttgccttgttgctgtgacctccctaagacactgaagatacttctcgggaaaggatcatcgccgttgaaatgaaaagagagac

SEQ ID NO: 415050 - DNA, 1403 bp, Homo sapiens
gagacggagtctcgctctgtcgcccaggctggagtgcagtggcgggatctcggctcactgcaagctccgcctcccgggttcacgccattctcctgcctcagcctcccaagtagctgggactacaggcgcccgccactacgcccggctaattttttgtatttttagtagagacggggtttcaccgttttagccgggatggtctcgatctcctgacctcgtgatccgcccgcctcggcctcccaaagtgctgggattacaggcgtgagccaccgcgcccggccgggagtatttttataaagcctttttgtacagattaatcggccatgtccaggttattggttttgatattttataggacatttgagtggtgtggcgatgtgtagagaatgtgccagagctgcagagacagtccattctgggctgctggctttttgcccttcctgcatgatttccagctactgtgacctggatgctgggaacccaggcatcggctccaaaaattagaaggcgagtgctgagaagacttgtcacaggtttctcaaatcagaatatactcagtcatagtggttccctgggaagccccagaccctttgacttgtgacattactggtttgcagacataataactacactcagaggaccatggaggcagagggatcatggtttcagggcactgaaaactctacgagccaagaggactagtgcatggactgaaagtcaggcatgccctcaaataggctgtattttctttccaggaatgtaacctttcccctttttcttctgacctgagccaagattggaaatcagaaagtctcctgtacatggagctgaagaggggctgctgttttccgaatgttttccatttcacaggcgccacctgcttgcccggggttggtcttgagaagacacccaaatgttcatgcctcagaaaggcagcagaatgccttttaggaaatttttttaaagtaatttgaagttatatagaagtttggtaagaagaagcagttgtttctctcttttctccctcatttcatggaggtgttaatgatcatggctggccgtgatgtacacatgggctgattttcattttttcagtttcatagctgagaaattcagctttgttttagttgaatcatcatattggaaagcagacattgaaagttttcttttctatctttgttatgaatgtgctatggccccttttggagacttctattgggtaatattctatgtgagagaaggaaacttggtattaaatgttgtggaaaataataatgatgataataataaagtatatgctgcaatggtgtactgccaatcagattgcttgggagaagaaaatttattcaaatccaacgataaaaaattaatttcttattgaataaacagtatgttcccatata

SEQ ID NO: 415051 - DNA, 1506 bp, Homo sapiens
caaccaggcacttagccatttatgtattgtctatgagtgcttttgcactacagtggcagagttgagtagttgtgaaaagccacgtggcctgcaaagcctggaatatttactatttggttctttacagaaaaactttgtcaacccctgttctgaggttcttaactcagggttggttttcatctctctttttttaaactttttaaaaaaatttaggggtacatgtgcaggtttgttacataggcaaacctgtgtcatgggagtttgttgtacagattatttcgtcacccaggtattaagcctagtacccattggttattcttcctgatcctctccctcggcctcccaaagtgctgggattacaggcgtgagccaccgcgcccggccgggagtatttttataaagcctttttgtacagattaatcggccatgtccaggttattggttttgatattttataggacatttgagtggtgtggcgatgtgtagagaatgtgccagagctgcagagacagtccattctgggctgctggctttttgcccttcctgcatgatttccagctactgtgacctggatgctgggaacccaggcatcggctccaaaaattagaaggcgagtgctgagaagacttgtcacaggtttctcaaatcagaatatactcagtcatagtggttccctgggaagccccagaccctttgacttgtgacattactggtttgcagacataataactacactcagaggaccatggaggcagagggatcatggtttcagggcactgaaaactctacgagccaagaggactagtgcatggactgaaagtcaggcatgccctcaaataggctgtattttctttccaggaatgtaacctttcccctttttcttctgacctgagccaagattggaaatcagaaagtctcctgtacatggagctgaagaggggctgctgttttccgaatgttttccatttcacaggcgccacctgcttgcccggggttggtcttgagaagacacccaaatgttcatgcctcagaaaggcagcagaatgccttttaggaaatttttttaaagtaatttgaagttatatagaagtttggtaagaagaagcagttgtttctctcttttctccctcatttcatggaggtgttaatgatcatggctggccgtgatgtacacatgggctgattttcattttttcagtttcatagctgagaaattcagctttgttttagttgaatcatcatattggaaagcagacattgaaagttttcttttctatctttgttatgaatgtgctatggccccttttggagacttctattgggtaatattctatgtgagagaaggaaacttggtattaaatgttgtggaaaataataatgatgataataataaagtatatgctgcaatggtgtactgccaatcagattgcttgggagaagaaaatttattcaaatccaacgataaaaaattaatttcttattgaataaacagtatgttcccatata

SEQ ID NO: 415052 - DNA, 3309 bp, Homo sapiens
ctttgcccgaagcccggggacgaaccgacggaccgaccgcctggcgcacggacgcgggcgctcgctttgtgttcggggctagcgtcggcgaggcttgagcttgcagcgcgcggcttccctgctttctcgcggccaccccggctccggcggcctcggcgcgcgaggggctggaggtgcgggagccgctctccgccggtcggtccccgcgcggctgagcccaggccgccagcgccgcggccccgtgcggtgtccctgagctcctgctccccgccgggctgctccgagcaacggtgcttcggagctccaaactcgggctgccggggcaagtgtcttcatgaacccagaggatgtccgggaagcactacaagggtcctgaagtcagttgttgcatcaaatacttcatatttggcttcaatgtcatattttggtttttgggaataacatttcttggaattggactgtgggcatggaatgaaaaaggagttctgtccaacatctcttccatcaccgatctcggcggctttgacccagtttggctcttccttgtggtgggaggagtgatgttcattttgggatttgcagggtgcattggagcgctacgggaaaacactttccttctcaagtttttttctgtgttcctgggaattattttcttcctggagctcactgccggagttctagcatttgttttcaaagactggatcaaagaccagctgtatttctttataaacaacaacatcagagcatatcgggatgacattgatttgcaaaacctcatagacttcacccaggaatattggcagtgctgtggggcttttggagctgatgattggaacctaaatatttacttcaattgcacagattccaatgcaagtcgagagcgatgtggcgttccattctcctgctgcactaaagatcccgcagaagatgtcatcaacactcagtgtggctatgatgccaggcaaaaaccagaagttgaccagcagattgtaatctacacgaaaggctgtgtgccccagtttgagaagtggttgcaggacaatttaaccatcgttgctggtattttcataggcattgcattgctgcagatatttgggatatgcctggcccagaatttggttagcgatatcgaagctgtcagggcgagctggtagaccccctgcaaccgctgctgcaagacactggacagacccagctttcgggaccctcccgcgtgccgaactgatcttcgagctgcatggacctaatcacagatgcagcctgcagtctcgcctaatggagctgccattaggggagtgtaaaactgggaaatgctgctcactgacagaattaaaaaaaaaaataaccagtatgaaagtcgttgcgccgtgaatctctactgtagccatgaatttatggacagttagatgcttaccaaaaaagaaaaaaagggagggtaggggacccagatgtacttgaatgtgcagaaaatacattcttgtcctcatcttccgtaattggagggctgggagaggcagctttgctcttcaccacaccttggacggaccaccttctttctgttccatggcctgaaggagtgcatctcctcaaagactcagcccctcacctgggagggcagtggtttgtgggcatccctccatgtacattttaggaaacacttgcaactctcatctgaagaagaaaacaactcatctttgggttcagattttgtgatggtattcagcaagtcacttgggcgagcacacttggtctatcctggaaagtctccttataagagaagttgtgtatttcatgtgcaccgagcaagggcattggaagacgtcatgaggctgtattttagcaggactgatcgtttttctaagtagacctgagctttgtttatcagtgaaattcaaggagaaaatgaggttaatgaagaggtatcagttaaatatccccttcttctcaccctgccaaaattagcagttggatttttggaaactctggaatattctgggtcattttgttttgtatgtttgttgtttttcgtcttccaaaggtgaaagctatgatacagttccacttaaattttagtgttttcttactcagctcaagcattaatttttgattaagtcttaatctgcatgacctgtgaatctgaatccatcatctccctttcctgccagcttttctacaaacattgaaatatgttatttggtcagcacttatttcctaggttcacagccttgggaggttgtggcatgtcctcccagtctggctgggaagagaccagctgtaccatccaaatgcttccctggtcttgatgatctcttccagagtcgatctgagtggccttttctgcaccctccccttctttctctttgaatggaattaaacccaatttggaaacaacattgacccagtcaaaagcttctaatggtttctttttcttcctccagttttagtttgcttttattaaaaaaagaaaatagtgcatggccatagctccttcagttctcttattgcagactaaccatcaggatggtatcaaagcacaaatactttggaggggaatgcgttgaactggggcaagtactctgtaacacaaagtgggaaaccacttcctggtgctgccgctcctgcccccactttaggtgggagggacgagttttgccctctagattttaatccagctggtgtccaccggatgttgccctcctggggagcagatatcagtctgtggaactctgggaaaaccacaggcacatttttcggtgcggacagatttgccagcacataactgggcagccagctagaatactttgtggaaattaagcgaggttttccatttcagccccatggtgcatggtggtggccgatgaatgtgtcagtctgctcagagaaaggacaaaaaggaaattattttcaaaactgtgttcactgtttgggtgtgtgtatggctctgcatgtgtgtgtttttgtctctgtataggtagaggtattcacatcttactccgactgtaaggttgtcttacttcatctctgcccccaccacagttgccattttgtaatgtccttccaacatggagaagacacgagctctctccagttggcatcatttgtcttttttgttgattgcctcattctccagtgaactccatctggccaattgattcagaatcaggcaagatccctgccctttggcacatccactgaaaggccaaacagcaagtccgagtgagttttaaatattaattaatcaccctttattttttacacttgagagtgattgtaataaaggctgtcattaataaacttggttctacctta

SEQ ID NO: 415053 - DNA, 3365 bp, Homo sapiens
ctttgcccgaagcccggggacgaaccgacggaccgaccgcctggcgcacggacgcgggcgctcgctttgtgttcggggctagcgtcggcgaggcttgagcttgcagcgcgcggcttccctgctttctcgcggccaccccggctccggcggcctcggcgcgcgaggggctggaggtgcgggagccgctctccgccggtcggtccccgcgcggctgagcccaggccgccagcgccgcggccccgtgcggtgtccctgagctcctgctccccgccgggctgctccgagcaacggtgcttcggagctccaaactcgggctgccggggcaagtgtcttcatgaacccagaggatgtccgggaagcactacaagggtcctgaagtcagttgttgcatcaaatacttcatatttggcttcaatgtcatattttggttgctgttaacattttgggtccactgtatctagacatgtccttcaaaagttgcattttttgggaataacatttcttggaattggactgtgggcatggaatgaaaaaggaagttctgtccaacatctcttccatcaccgatctcggcggctttgacccagtttggctcttccttgtggtgggaggagtgatgttcattttgggatttgcagggtgcattggagcgctacgggaaaacactttccttctcaagtttttttctgtgttcctgggaattattttcttcctggagctcactgccggagttctagcatttgttttcaaagactggatcaaagaccagctgtatttctttataaacaacaacatcagagcatatcgggatgacattgatttgcaaaacctcatagacttcacccaggaatattggcagtgctgtggggcttttggagctgatgattggaacctaaatatttacttcaattgcacagattccaatgcaagtcgagagcgatgtggcgttccattctcctgctgcactaaagatcccgcagaagatgtcatcaacactcagtgtggctatgatgccaggcaaaaaccagaagttgaccagcagattgtaatctacacgaaaggctgtgtgccccagtttgagaagtggttgcaggacaatttaaccatcgttgctggtattttcataggcattgcattgctgcagatatttgggatatgcctggcccagaatttggttagcgatatcgaagctgtcagggcgagctggtagaccccctgcaaccgctgctgcaagacactggacagacccagctttcgggaccctcccgcgtgccgaactgatcttcgagctgcatggacctaatcacagatgcagcctgcagtctcgcctaatggagctgccattaggggagtgtaaaactgggaaatgctgctcactgacagaattaaaaaaaaaaataaccagtatgaaagtcgttgcgccgtgaatctctactgtagccatgaatttatggacagttagatgcttaccaaaaaagaaaaaaagggagggtaggggacccagatgtacttgaatgtgcagaaaatacattcttgtcctcatcttccgtaattggagggctgggagaggcagctttgctcttcaccacaccttggacggaccaccttctttctgttccatggcctgaaggagtgcatctcctcaaagactcagcccctcacctgggagggcagtggtttgtgggcatccctccatgtacattttaggaaacacttgcaactctcatctgaagaagaaaacaactcatctttgggttcagattttgtgatggtattcagcaagtcacttgggcgagcacacttggtctatcctggaaagtctccttataagagaagttgtgtatttcatgtgcaccgagcaagggcattggaagacgtcatgaggctgtattttagcaggactgatcgtttttctaagtagacctgagctttgtttatcagtgaaattcaaggagaaaatgaggttaatgaagaggtatcagttaaatatccccttcttctcaccctgccaaaattagcagttggatttttggaaactctggaatattctgggtcattttgttttgtatgtttgttgtttttcgtcttccaaaggtgaaagctatgatacagttccacttaaattttagtgttttcttactcagctcaagcattaatttttgattaagtcttaatctgcatgacctgtgaatctgaatccatcatctccctttcctgccagcttttctacaaacattgaaatatgttatttggtcagcacttatttcctaggttcacagccttgggaggttgtggcatgtcctcccagtctggctgggaagagaccagctgtaccatccaaatgcttccctggtcttgatgatctcttccagagtcgatctgagtggccttttctgcaccctccccttctttctctttgaatggaattaaacccaatttggaaacaacattgacccagtcaaaagcttctaatggtttctttttcttcctccagttttagtttgcttttattaaaaaaagaaaatagtgcatggccatagctccttcagttctcttattgcagactaaccatcaggatggtatcaaagcacaaatactttggaggggaatgcgttgaactggggcaagtactctgtaacacaaagtgggaaaccacttcctggtgctgccgctcctgcccccactttaggtgggagggacgagttttgccctctagattttaatccagctggtgtccaccggatgttgccctcctggggagcagatatcagtctgtggaactctgggaaaaccacaggcacatttttcggtgcggacagatttgccagcacataactgggcagccagctagaatactttgtggaaattaagcgaggttttccatttcagccccatggtgcatggtggtggccgatgaatgtgtcagtctgctcagagaaaggacaaaaaggaaattattttcaaaactgtgttcactgtttgggtgtgtgtatggctctgcatgtgtgtgtttttgtctctgtataggtagaggtattcacatcttactccgactgtaaggttgtcttacttcatctctgcccccaccacagttgccattttgtaatgtccttccaacatggagaagacacgagctctctccagttggcatcatttgtcttttttgttgattgcctcattctccagtgaactccatctggccaattgattcagaatcaggcaagatccctgccctttggcacatccactgaaaggccaaacagcaagtccgagtgagttttaaatattaattaatcaccctttattttttacacttgagagtgattgtaataaaggctgtcattaataaacttggttctacctta

SEQ ID NO: 415054 - DNA, 3301 bp, Homo sapiens
ctttgcccgaagcccggggacgaaccgacggaccgaccgcctggcgcacggacgcgggcgctcgctttgtgttcggggctagcgtcggcgaggcttgagcttgcagcgcgcggcttccctgctttctcgcggccaccccggctccggcggcctcggcgcgcgaggggctggaggtgcgggagccgctctccgccggtcggtccccgcgcggctgagcccaggccgccagcgccgcggccccgtgcggtgtccctgagctcctgctccccgccgggctgctccgagcaacggtgcttcggagctccaaactcgggctgccggggcaagtgtcttcatgaacccagaggatgtccgggaagcactacaagggtcctgaagtcagttgttgcatcaaatacttcatatttggcttcaatgtcatattttggttgctgttaacattttgggtccactgtatctagacatgtccttcaaaagttgcattttttgggaataacatttcttggaattggactgtgggcatggaatgaaaaaggaagttctgtccaacatctcttccatcaccgatctcggcggctttgacccagtttggctcttccttgtggtgggaggagtgatgttcattttgggatttgcagggtgcattggagcgctacgggaaaacactttccttctcaagtttttttctgtgttcctgggaattattttcttcctggagctcactgccggagttctagcatttgttttcaaagactggatcaaagaccagctgtatttctttataaacaacaacatcagagcatatcgggatgacattgatttgcaaaacctcatagacttcacccaggaatatattccaatgcaagtcgagagcgatgtggcgttccattctcctgctgcactaaagatcccgcagaagatgtcatcaacactcagtgtggctatgatgccaggcaaaaaccagaagttgaccagcagattgtaatctacacgaaaggctgtgtgccccagtttgagaagtggttgcaggacaatttaaccatcgttgctggtattttcataggcattgcattgctgcagatatttgggatatgcctggcccagaatttggttagcgatatcgaagctgtcagggcgagctggtagaccccctgcaaccgctgctgcaagacactggacagacccagctttcgggaccctcccgcgtgccgaactgatcttcgagctgcatggacctaatcacagatgcagcctgcagtctcgcctaatggagctgccattaggggagtgtaaaactgggaaatgctgctcactgacagaattaaaaaaaaaaataaccagtatgaaagtcgttgcgccgtgaatctctactgtagccatgaatttatggacagttagatgcttaccaaaaaagaaaaaaagggagggtaggggacccagatgtacttgaatgtgcagaaaatacattcttgtcctcatcttccgtaattggagggctgggagaggcagctttgctcttcaccacaccttggacggaccaccttctttctgttccatggcctgaaggagtgcatctcctcaaagactcagcccctcacctgggagggcagtggtttgtgggcatccctccatgtacattttaggaaacacttgcaactctcatctgaagaagaaaacaactcatctttgggttcagattttgtgatggtattcagcaagtcacttgggcgagcacacttggtctatcctggaaagtctccttataagagaagttgtgtatttcatgtgcaccgagcaagggcattggaagacgtcatgaggctgtattttagcaggactgatcgtttttctaagtagacctgagctttgtttatcagtgaaattcaaggagaaaatgaggttaatgaagaggtatcagttaaatatccccttcttctcaccctgccaaaattagcagttggatttttggaaactctggaatattctgggtcattttgttttgtatgtttgttgtttttcgtcttccaaaggtgaaagctatgatacagttccacttaaattttagtgttttcttactcagctcaagcattaatttttgattaagtcttaatctgcatgacctgtgaatctgaatccatcatctccctttcctgccagcttttctacaaacattgaaatatgttatttggtcagcacttatttcctaggttcacagccttgggaggttgtggcatgtcctcccagtctggctgggaagagaccagctgtaccatccaaatgcttccctggtcttgatgatctcttccagagtcgatctgagtggccttttctgcaccctccccttctttctctttgaatggaattaaacccaatttggaaacaacattgacccagtcaaaagcttctaatggtttctttttcttcctccagttttagtttgcttttattaaaaaaagaaaatagtgcatggccatagctccttcagttctcttattgcagactaaccatcaggatggtatcaaagcacaaatactttggaggggaatgcgttgaactggggcaagtactctgtaacacaaagtgggaaaccacttcctggtgctgccgctcctgcccccactttaggtgggagggacgagttttgccctctagattttaatccagctggtgtccaccggatgttgccctcctggggagcagatatcagtctgtggaactctgggaaaaccacaggcacatttttcggtgcggacagatttgccagcacataactgggcagccagctagaatactttgtggaaattaagcgaggttttccatttcagccccatggtgcatggtggtggccgatgaatgtgtcagtctgctcagagaaaggacaaaaaggaaattattttcaaaactgtgttcactgtttgggtgtgtgtatggctctgcatgtgtgtgtttttgtctctgtataggtagaggtattcacatcttactccgactgtaaggttgtcttacttcatctctgcccccaccacagttgccattttgtaatgtccttccaacatggagaagacacgagctctctccagttggcatcatttgtcttttttgttgattgcctcattctccagtgaactccatctggccaattgattcagaatcaggcaagatccctgccctttggcacatccactgaaaggccaaacagcaagtccgagtgagttttaaatattaattaatcaccctttattttttacacttgagagtgattgtaataaaggctgtcattaataaacttggttctacctta

SEQ ID NO: 415055 - DNA, 404 bp, Homo sapiens
tagccaggtgaatgtgtctgtgggtatgtttggtgtgttgatgtgtgtgtttttgtctctgtataggtagaggtattcacatcttactccgactgtaaggttgtcttacttcatctctgcccccaccacagttgccattttgtaatgtccttccaacatggagaagacacgagctctctccagttggcatcatttgtcttttttgttgattgcctcattctccagtgaactccatctggccaattgattcagaatcaggcaagatccctgccctttggcacatccactgaaaggccaaacagcaagtccgagtgagttttaaatattaattaatcaccctttattttttacacttgagagtgattgtaataaaggctgtcattaataaacttggttctacctta

SEQ ID NO: 415056 - DNA, 370 bp, Homo sapiens
ttttaccacatatgaattacatcttaaatttcaaaaatcaatgatttaaaaaaatgggacacagtggccagggaaacaagttacaagtgtcactgtttcactcacattttcttcctttctcagatatttgggatatgcctggcccagaatttggttagcgatatcgaagctgtcagggcgagctggtagaccccctgcaaccgctgctgcaagacactggacagacccagctttcgggaccctcccgcgtgccgaactgatcttcgagctgcatggacctaatcacagatgcagcctgcagtctcgcctaatggagctgccattaggggagtgtaaaactgggaaatgctgctcactgacagaattaaaa

SEQ ID NO: 415057 - DNA, 3733 bp, Homo sapiens
ctttgcccgaagcccggggacgaaccgacggaccgaccgcctggcgcacggacgcgggcgctcgctttgtgttcggggctagcgtcggcgaggcttgagcttgcagcgcgcggcttccctgctttctcgcggccaccccggctccggcggcctcggcgcgcgaggggctggaggtgcgggagccgctctccgccggtcggtccccgcgcggctgagcccaggccgccagcgccgcggccccgtgcggtgtccctgagctcctgctccccgccgggctgctccgagcaacggtgcttcggagctccaaactcgggctgccggggcaagtgtcttcatgaacccagaggatgtccgggaagcactacaagggtcctgaagtcagttgttgcatcaaatacttcatatttggcttcaatgtcatattttggtttttgggaataacatttcttggaattggactgtgggcatggaatgaaaaaggagttctgtccaacatctcttccatcaccgatctcggcggctttgacccagtttggctcttccttgtggtgggaggagtgatgttcattttgggatttgcagggtgcattggagcgctacgggaaaacactttccttctcaagtttttttctgtgttcctgggaattattttcttcctggagctcactgccggagttctagcatttgttttcaaagactggatcaaagaccagctgtatttctttataaacaacaacatcagagcatatcgggatgacattgatttgcaaaacctcatagacttcacccaggaatattggcagtgctgtggggcttttggagctgatgattggaacctaaatatttacttcaattgcacagattccaatgcaagtcgagagcgatgtggcgttccattctcctgctgcactaaagatcccgcagaagatgtcatcaacactcagtgtggctatgatgccaggcaaaaaccagaagttgaccagcagattgtaatctacacgaaaggctgtgtgccccagtttgagaagtggttgcaggacaatttaaccatcgttgctggtattttcataggcattgcattgctgcagatatttgggatatgcctggcccagaatttggttagcgatatcgaagctgtcagggcgagctggtagaccccctgcaaccgctgctgcaagacactggacagacccagctttcgggaccctcccgcgtgccgaactgatcttcgagctgcatggacctaatcacagatgcagcctgcagtctcgcctaatggagctgccattaggggagtgtaaaactgggaaatgctgctcactgacagaattaaaaaaaaaaataaccagtatgaaagtcgttgcgccgtgaatctctactgtagccatgaatttatggacagttagatgcttaccaaaaaagaaaaaaagggagggtaggggacccagatgtacttgaatgtgcagaaaatacattcttgtcctcatcttccgtaattggagggctgggagaggcagctttgctcttcaccacaccttggacggaccaccttctttctgttccatggcctgaaggagtgcatctcctcaaagactcagcccctcacctgggagggcagtggtttgtgggcatccctccatgtacattttaggaaacacttgcaactctcatctgaagaagaaaacaactcatctttgggttcagattttgtgatggtattcagcaagtcacttgggcgagcacacttggtctatcctggaaagtctccttataagagaagttgtgtatttcatgtgcaccgagcaagggcattggaagacgtcatgaggctgtattttagcaggactgatcgtttttctaagtagacctgagctttgtttatcagtgaaattcaaggagaaaatgaggttaatgaagaggtatcagttaaatatccccttcttctcaccctgccaaaattagcagttggatttttggaaactctggaatattctgggtcattttgttttgtatgtttgttgtttttcgtcttccaaaggtgaaagctatgatacagttccacttaaattttagtgttttcttactcagctcaagcattaatttttgattaagtcttaatctgcatgacctgtgaatctgaatccatcatctccctttcctgccagcttttctacaaacattgaaatatgttatttggtcagcacttatttcctaggttcacagccttgggaggttgtggcatgtcctcccagtctggctgggaagagaccagctgtaccatccaaatgcttccctggtcttgatgatctcttccagagtcgatctgagtggccttttctgcaccctccccttctttctctttgaatggaattaaacccaatttggaaacaacattgacccagtcaaaagcttctaatggtttctttttcttcctccagttttagtttgcttttattaaaaaaagaaaatagtgcatggccatagctccttcagttctcttattgcagactaaccatcaggatggtatcaaagcacaaatactttggaggggaatgcgttgaactggggcaagtactctgtaacacaaagtgggaaaccacttcctggtgctgccgctcctgcccccactttaggtgggagggacgagttttgccctctagattttaatccagctggtgtccaccggatgttgccctcctggggagcagatatcagtctgtggaactctgggaaaaccacaggcacatttttcggtgcggacagatttgccagcacataactgggcagccagctagaatactttgtggaaattaagcgaggttttccatttcagccccatggtgcatggtggtggccgatgaatgtgtcagtctgctcagagaaaggacaaaaaggaaattattttcaaaactgtgttcactgtttgggtgtgtgtatggctctgcatgtgtgtgtttttgtctctgtataggtagaggtattcacatcttactccgactgtaaggttgtcttacttcatctctgcccccaccacagttgccattttgtaatgtccttccaacatggagaagacacgagctctctccagttggcatcatttgtcttttttgttgattgcctcattctccagtgaactccatctggccaattgattcagaatcaggcaagatccctgccctttggcacatccactgaaaggccaaacagcaagtccgagtgagttttaaatattaattaatcaccctttattttttacacttgagagtgattgtaataaaggctgtcattaataaacttggttctaccttaaaaaaaaaaaaagaaaaaaaaaacagagacacacaccaagacaagacccaacaaaacgacacacaacgaaatcaaaataaagaaaaaaaagaggggggcaaagcaaaaacaccacagggcagagagcgtaaaagagaaccagaatattgaaaagaaagcggcacatgtggacaagacaaagagcccaaggcggaaatatcacggagtgggaagaaaaagcagcacgtacgcggaaccccactcggtggagggatagggcaagacacaagcaaagagcaaggccaacaaaagagcgtgtacacaaccgactcgagaaacacgagcgtatgacaaccaagcacaaaacctgcacacgagcagccggcgacacgcacacagagcgaacacaagcaaggagagacccacaagagaagaaagcacaatg

SEQ ID NO: 415058 - DNA, 2823 bp, Homo sapiens
  misc_feature (3)..(3): n is a, c, g, or t
  misc_feature (75)..(75): n is a, c, g, or t
gantgccgtcggtatatggtcctgtaattgcacgtaaataacgtttcctgcacgctctcctcttcagctggaaangcctcccttttttgggaataacatttcttggaattggactgtgggcatggaatgaaaaaggagttttttctgtgttcctgggaattattttcttcctggagctcactgccggagttctagcatttgttttcaaagactggatcaaagaccagctgtatttctttataaacaacaacatcagagcatatcgggatgacattgatttgcaaaacctcatagacttcacccaggaatattggcagtgctgtggggcttttggagctgatgattggaacctaaatatttacttcaattgcacagattccaatgcaagtcgagagcgatgtggcgttccattctcctgctgcactaaagatcccgcagaagatgtcatcaacactcagtgtggctatgatgccaggcaaaaaccagaagttgaccagcagattgtaatctacacgaaaggctgtgtgccccagtttgagaagtggttgcaggacaatttaaccatcgttgctggtattttcataggcattgcattgctgcagatatttgggatatgcctggcccagaatttggttagcgatatcgaagctgtcagggcgagctggtagaccccctgcaaccgctgctgcaagacactggacagacccagctttcgggaccctcccgcgtgccgaactgatcttcgagctgcatggacctaatcacagatgcagcctgcagtctcgcctaatggagctgccattaggggagtgtaaaactgggaaatgctgctcactgacagaattaaaaaaaaaaataaccagtatgaaagtcgttgcgccgtgaatctctactgtagccatgaatttatggacagttagatgcttaccaaaaaagaaaaaaagggagggtaggggacccagatgtacttgaatgtgcagaaaatacattcttgtcctcatcttccgtaattggagggctgggagaggcagctttgctcttcaccacaccttggacggaccaccttctttctgttccatggcctgaaggagtgcatctcctcaaagactcagcccctcacctgggagggcagtggtttgtgggcatccctccatgtacattttaggaaacacttgcaactctcatctgaagaagaaaacaactcatctttgggttcagattttgtgatggtattcagcaagtcacttgggcgagcacacttggtctatcctggaaagtctccttataagagaagttgtgtatttcatgtgcaccgagcaagggcattggaagacgtcatgaggctgtattttagcaggactgatcgtttttctaagtagacctgagctttgtttatcagtgaaattcaaggagaaaatgaggttaatgaagaggtatcagttaaatatccccttcttctcaccctgccaaaattagcagttggatttttggaaactctggaatattctgggtcattttgttttgtatgtttgttgtttttcgtcttccaaaggtgaaagctatgatacagttccacttaaattttagtgttttcttactcagctcaagcattaatttttgattaagtcttaatctgcatgacctgtgaatctgaatccatcatctccctttcctgccagcttttctacaaacattgaaatatgttatttggtcagcacttatttcctaggttcacagccttgggaggttgtggcatgtcctcccagtctggctgggaagagaccagctgtaccatccaaatgcttccctggtcttgatgatctcttccagagtcgatctgagtggccttttctgcaccctccccttctttctctttgaatggaattaaacccaatttggaaacaacattgacccagtcaaaagcttctaatggtttctttttcttcctccagttttagtttgcttttattaaaaaaagaaaatagtgcatggccatagctccttcagttctcttattgcagactaaccatcaggatggtatcaaagcacaaatactttggaggggaatgcgttgaactggggcaagtactctgtaacacaaagtgggaaaccacttcctggtgctgccgctcctgcccccactttaggtgggagggacgagttttgccctctagattttaatccagctggtgtccaccggatgttgccctcctggggagcagatatcagtctgtggaactctgggaaaaccacaggcacatttttcggtgcggacagatttgccagcacataactgggcagccagctagaatactttgtggaaattaagcgaggttttccatttcagccccatggtgcatggtggtggccgatgaatgtgtcagtctgctcagagaaaggacaaaaaggaaattattttcaaaactgtgttcactgtttgggtgtgtgtatggctctgcatgtgtgtgtttttgtctctgtataggtagaggtattcacatcttactccgactgtaaggttgtcttacttcatctctgcccccaccacagttgccattttgtaatgtccttccaacatggagaagacacgagctctctccagttggcatcatttgtcttttttgttgattgcctcattctccagtgaactccatctggccaattgattcagaatcaggcaagatccctgccctttggcacatccactgaaaggccaaacagcaagtccgagtgagttttaaatattaattaatcaccctttattttttacacttgagagtgattgtaataaaggctgtcattaataaacttggttctacctta

SEQ ID NO: 415059 - DNA, 183 bp, Homo sapiens
ctagaaaagtctttggtaattaaaaaatcacacgcgtttgcccagaatgactgtgctagggttagcagtaatactgcttagttattaggtacagcaaagttcttaccttggagtttctgtcattgttggttggtgctttgtaaatatgccttatacttctgctggaaacagctaacagacagg

SEQ ID NO: 415060 - DNA, 1188 bp, Homo sapiens
cggtacccaagcttttaccgcacacacacacagacataaaataaccaaacatctcatttctaggaaagagataacactaaaggcatcataggtttaactgaaatacgttatatgaagttttacaaaaaggtcaacagaaagctcatttgtgaaaacatactctcatgggagcttctttaacattagttcagaggttaatatatttcctggaggtgttttcctagaattgattgcactattgcatggtaataacatttaattgttaaggaaacattatatataggttcaaattatcccttaatgttgatttctccccttttccatggattttgatactaagaaacaaaatgctttgagattttggtaactattttgattttgataaaacatgttaaaatagaaggacatgatatttttctatagtttccatcaggaagagtacatcagaaacttctccataaggaaagaaaactgactctctcttgaactagtgttgataaaatacactaatgtctttcttaattttattttattaggagaaaaatcagaatattaaatttgcaaacttttgaacagcagtaatagctccttagacactcagtatctttcttccctatctttcaagcacatttaatttctttcccctggtatttgtttgctttgtgttttttcaatattttgtttgctaaagaacaataacaacaacaaagctggtccagccctgacacctacttttgctttttttctttctttcttttaatttgttgaactataggtttctttctgagatgtatttttcattcttccaataatgctctctttttcatttcaaaaccattaccactttcaatatgtaattaacatcctcattcatcagaaagctggtaagtccacacagcatttgtgcagtatcccttctgtgtaaaatgttaaggctttcagatgaaagaaaaaagaacttcctgcaaaagatcaaaagcatcatactaaataaaatgatgacaatatgtgccttgatttttctctcaatggaggttcaacattgacatttaagatgtaaaaaaaattactttgatggtttaattaagaataataagtcaaatatcacatgtatgtagttcttttggatgaccgaataccttaaaatgaactaaataactgaaataaagtgttaaaatgttaaaaacg

SEQ ID NO: 415061 - DNA, 129 bp, Homo sapiens
  misc_feature (71)..(71): n is a, c, g, or t
  misc_feature (125)..(125): n is a, c, g, or t
aacagtttgatgccacgcacattccagggcttagactggaaatgctgtcccttgcccctttgttaccttcngacagggatcagtccatagtgtagttggtgtcacaacagtcccgaagaagcctnccaa

SEQ ID NO: 415062 - DNA, 645 bp, Homo sapiens
tgagactctgtctcaaaaaaaaaaaaaaaaagaaagaaaaagaagcagtatgatgacagggatgacttcattagctgagaatcatttctatcagtttgccgaggaagaaggacactgcgttttcttattattgtctgatttagagagcatggaggtggggaggaatcatataaaatgatgatggcagtcatcatactgttgctgagcacttttttcctgacagaatggcacagtgcttctgtgctctaccaactagccatgaaatagagcatatctgtagaaatcatgcaagggagatggtgggcactaggactgcatagcaatcactgtttaggcaagaatgattaaaaagtagtcatttttggctgggcgcggtggctcacacctgtaatcccagcactttgggaggcaaggtgggtggatcacttgaggtcaggagtttgagaccagcctggtcaatatctccaaaccccatctctactaaaaatacaaaaattagctgagcgtggtggtagatgcttgtaatcccagctactcgggaggctgaggcaggagaatcgcttgaacccgggaggcagaggttgcagtgagccaagatcgcaccattgcactccagcctgggtgacaagagcaaaactctgtctc

SEQ ID NO: 415063 - DNA, 220 bp, Homo sapiens
tttcaacttgactcaaattttaagggatacatttactatgtaaagctagcatttaaattaaatatttaatttaaattaaatattctctacacttgtcccagctactcaggaggctgaggcaggaggattgcttgaacttgggaggcggaggttgcagtgagccgagatggcaccactgcgctgcagcctgggtgacagagtgagactccatctcaaaaaa

SEQ ID NO: 415064 - DNA, 300 bp, Homo sapiens
cccagcagaatcttcaactagaaattgcttttgtggttgatattgggaaggtacttctagattccaggctctttgtaattactgatgagcaaacacttacagccgcacccaaggtcaaataggcaaagcctttccaggatacttaaggataattcgcacatctgtattggctaatccattcatccaagaaaggacaggcacagagaaaggaaagagagaagtagggcagccaaattgctttcacaatacctcatgcctttagcttttctatctcaaggaatttccataggcacaagactt

SEQ ID NO: 415065 - DNA, 328 bp, Homo sapiens
tttgagacggagtctcgctctgtcgcccaggctggagtgcagtggcgggatctcggctcactgcaagctccgatgggcagcctcttaatagttccccatgcttcaacacttgcccaaccaccatctattttctatatagcagccacatcttatagacctggctcatagctgccttgtagaactcatctccttccagccgccttgctctgtctcaaacactctaggcatatttccttctcaaggcctctgtgcttgttccctctgcttgaaatgtgctttccccaaacagctgtatggcttttttcttcacttccttcaggcctcttct

SEQ ID NO: 415066 - DNA, 98 bp, Homo sapiens
gacctcagattatgcaaataaacattgaaggaagaataagataacactccttccatcaagtgtggggcctattttctctccgtttgtatctggcctga

SEQ ID NO: 415067 - DNA, 405 bp, Homo sapiens
tttttgtagagatgggtttcaccatgttggccaggctggtcttgaacacctgaccaagtccaaggtgaactcctgaccaggccaaggtgatccgcccacctcagcctcccaaaatgctgggattacaggcctgagccactgcgccaggccaatgtttttttacctaagggtttgggcagattccttaacctcttttgcctatctattcatagacacagaagacatacaagaggttcagaaattgctgtggatgaaaagcagcagttttatggcaagttatatcaaagtctgagaatatcaaaagacttatttaaaaggaaactttagaaagtgaatctgtttttaagaatagttcttggaatatttttgcttcaagtgatatatttaagttttcttatatttgtc

SEQ ID NO: 415068 - DNA, 3375 bp, Homo sapiens
  misc_feature (3311)..(3311): n is a, c, g, or t
ctaaaagaaggggagaatggatactgggggacaattagtagtctctgctacacacaggctgggaaatatcatgctctgaggctgaactgctccccgtggactttacttcctagagctatgctctagggccatattctccagtgctttgctgatttcagtggaaatgctgtatagggcagatgtcagcaggatctcccagatgctactttccagatcagtgatgcaaacacttctctgaatttggaagaccaaagccttccccaggatttttctgaattcctggggcttatgttcccagggctacatctgcttctgttgactcagctaaaacccctgctctctaggctgtgttctgagattgttcctaaacccttctctccttgttcctaaagccttctctcccggcatcaacccacaggagtgactcatctttttctcaaagccctcacctgcacatggataaaaggccctcgtgctctgcacagtagggctttactggagatctctgggtcacaggcaaaggtcacttaaaatcattgttaatccacttgttcccactggcaccagagaatgctggtgtcatcagtagagatcacacgcttatccccttgttgggcatttaatgcacttaaagggcttggtgatgttgggaaaacccaatggacctgccccagagtctgaaacacacacagggcagaaagagccagaaacgttcctggcatcagattcacttaagaaaccaaactcatggatgttaattctgggtccagcctgggctttacttggcaattacttttccttaatcttcagcgacaagagcctctttgttttactgtctccgactccagaaatgctcactgccagccccacatgacaagtgactttaatggtctttagttttggagatctactttattgaaacctatctgtgtgtaataatatgaaatagacaagaatgactttcagggtcaaatttcctctttttgacagtgatattttaaggactagaagcattttgaccagatgaatggagctttcagacgggatgatgagcatctcaaggcaggttggccatagttatcactatatcttccttattaatttgtattccatttatgcttcctgtttttaaccagtggtccattcggaatatgaatggatgactgtgaaactgagagtagagttcatttgaaactttacctgaccaggaggagtcagtccagaggtgtttctggcaagatggggcccactgctggttttattgtagggtggcaagggagctaggctcaggggcacgctactgcccggggccagggcaggcactaggggttccaggggctgggagcccctgtccctattgcagaggggactggaggaagagaagccttgttgcccccaccatgggacttctctgtcctgaggcctctcacacacattggtttacctttgaaacactgtacattgagagctctcctgagggtgagtgtagacttgaaccaagacaatgtttttgaggacaagggaactttaaggattttttctgtttttttgtttcgttttgttttttaattttgagaaagggtctcactctgtcacctaggctggagtgcagtggcacaatcttggctcactgcagccttgacttctctggctcaggtgatcttcccacctcagcctcccaagtagctgagactacaggtgcacaccaccatggccaggtgattttttgattttttatagagacgggatctcactatgttgcccaggctggtcttgaactcctgtgctcaagtgatcttcctgccttgccctcccaaagtcctgggattacaggcatgacacaccatgcctggcaattttggggtgtaaagtatcacaattaatattatctcaaagattcctgacaccaaaatggatctcaaaagtggttctattttcacattttctccctttctttagtttggaagcatattccctttaacacccccagaaaaagtaatttggcagggttgtatcctgaagtactaatttgttttctgtgtatcccctctctttctgtcctctcagcaagatttccagggctgtgggagtattttgctctccttcctcctgcagagaggcagaaagaaactcgtgggagagggaccaagactggatgcttgcttgcaagcctgtttttgttttttaaaattctgctcttgaaaactaaataaggctgaggccagtcttattttcagactgtttgccaacagcacaccaaaaagttggagtgacaatttctttcttggagagggaatggagtagcatggcacatctattcccaccaaggtcatgatcctggaaataaatagacctttgttgtctatgatgatttgatcaatatctgccttcattggattttcagctccttgaggatagtctgcttttgcttactgaaagttcatcagtacctagcacgtaagagccgctcgatgtatactcattcagtaagtgaatgaattctaggagagcactgggagcagattgtgtcttattgataggtctacttctagcatttgcagggcctaagctgagagtgctcatggagtctcagtatttaggaggtataaacaagctatacactgttaaataaaatactttctattctcctacctagatatgtttgctttcataattgcaaaacaaacatatttgcaaagtgatggcttttatgtgattgaaaattggtaaaatatacaactaaacttaattatcaccgcacttgaagaaagtcgatgggatggcaatgtttggatgagcattaaagacataaattcatgaattttatactttatacatttttaaaatcagactttaatttttacaattatttttctttctttaatttcattagaatcattaattatgctctcctgagcttttcatataatgtgtggtttattgatgatataaaagattaaaaagtacattgaattatacttcagtgtacaagaagtaaatatcttcatcaaaactctgtgttaaaaattgaaaaattaaatttttcatatgcattttcaaagttagttttctttgaaaatattcaaaattattaataataaaaagcgagatacaaataattaaagagctttaatatttaatctcaaaattctttaaatcaaaatgaaatgtctaaattcattttttgaaaatgtaataaaatctgtttttgttttgttttttgatatggggtctcactatgctgcccaggctggcctcaaactcctgggctcaagggatcatcctgcctcagccatctgagtagctggaantacaagcccgtgtcactgcacccagctcaaaaaaattaattaaatcttattaaatatattttat

SEQ ID NO: 415069 - DNA, 990 bp, Homo sapiens
cgcagaagtgcgggaacgcgccgtccctctgcgcaggcgcagtcggcggtcggcgtggggcgctatgccggggcggcacgtttctcgagtccgggcattgtacaagcgcgtcttgcagctgcaccgtgttctgcccccggacctcaaatccctgggcgaccagtacgtgaaagacgaatttaggagacataagaccgttggttctgacgaggcacagcgtttcttgcaagaatgggaggtgtatgcaacagcgttattgcaacaggctaacgaaaacagacaaaattcaactggaaaagcatgttttggcaccttcctcccagaagaaaaacttaatgactttcgtgatgaacaaattggacagttgcaggagctgatgcaagaagccacaaaacccaataggcaatttagtatttctgagtctatgaaaccaaaattttagtctatacaacaaagcttaataagacatgcaaaaatttagaacccctactttaactgtcattggtttttgaaatatatttaagctttgaaaacacctgttattaatgaaatactcttttattttggatattatgattgcagtatatggatcaagatcactagtgacaattgaaaaaaactattggaataatagcacttgtataaaattcagttttggaactaaacagcaaatttctagaattttgctgaaaatgttttaaaatgctattctcatccagccatattagtcttctggcttttctttagcttcatcaaataagcatgttgtgataatgatagatgtacaattccaacaaggttattattttttaaatacattgtcattctgaacattttatcacttctagtttaataatacatacatgatttttcttctgaatgtctcttctccctgcatcactgttcattcacaatgaaaggttaggaagaagctttaaaattcactattttactatcaatcatttgtataataaactatacaaagtataa

SEQ ID NO: 415070 - DNA, 1114 bp, Homo sapiens
  misc_feature (1001)..(1001): n is a, c, g, or t
  misc_feature (1003)..(1003): n is a, c, g, or t
  misc_feature (1005)..(1005): n is a, c, g, or t
  misc_feature (1009)..(1010): n is a, c, g, or t
  misc_feature (1017)..(1017): n is a, c, g, or t
  misc_feature (1019)..(1019): n is a, c, g, or t
  misc_feature (1029)..(1030): n is a, c, g, or t
  misc_feature (1032)..(1032): n is a, c, g, or t
  misc_feature (1043)..(1044): n is a, c, g, or t
  misc_feature (1048)..(1048): n is a, c, g, or t
  misc_feature (1063)..(1063): n is a, c, g, or t
  misc_feature (1068)..(1068): n is a, c, g, or t
  misc_feature (1073)..(1074): n is a, c, g, or t
  misc_feature (1076)..(1076): n is a, c, g, or t
  misc_feature (1078)..(1078): n is a, c, g, or t
  misc_feature (1081)..(1081): n is a, c, g, or t
  misc_feature (1091)..(1091): n is a, c, g, or t
  misc_feature (1093)..(1093): n is a, c, g, or t
  misc_feature (1097)..(1097): n is a, c, g, or t
ctcgagtccgggcattgtacaagcgcgtcttgcaatctgcaccggtgtgtctgcgccccaggtaccttcgaaagtcctcatagggtcgtaggcggtggtgcggtgggctgctgggatgcgtggtaggtggtggtgatcgggtgtgtgtgtggctgttgtgtgggtcttgggggtgtttgtgtggatggtgtggtaggttgtgtgggggtgtggttgtggtgggggttgggtgggcgtggagtgggtgggggggggttggggttagtgtggatggggagaggtgggggtcctcccagaagaaaaacttaatgactttcgtgatgaacaaattggacagttgcaggagctgatgcaagaagccacaaaacccaataggcaatttagtatttctgagtctatgaaaccaaaattttagtctatacaacaaagcttaataagacatgcaaaaatttagaacccctactttaactgtcattggtttttgaaatatatttaagctttgaaaacacctgttattaatgaaatactcttttattttggatattatgattgcagtatatggatcaagatcactagtgacaattgaaaaaaactattggaataatagcacttgtataaaattcagttttggaactaaacagcaaatttctagaattttgctgaaaatgttttaaaatgctattctcatccagccatattagtcttctggcttttctttagcttcatcaaataagcatgttgtgataatgatagatgtacaattccaacaaggttattattttttaaatacattgtcattctgaacattttatcacttctagtttaataatacatacatgatttttcttctgaatgtctcttctccctgcatcactgttcattcacaatgaaaggttaggaagaagctttaaaattcactattttactatcaatcatttgtataataaactatacaaagtataaaaaaaaaaaaaatggccttgttggctcagcggtggacntngnggcnnttccttnangagggtaatnntnacctgctcatnnctcntggctcggcgttcgntgggnagggnntnantcntaaggcggantnggtntccaaaatcagggatac

SEQ ID NO: 415071 - DNA, 799 bp, Homo sapiens
cccgcagtgatttttattattcttacccccccgcttgttaattttcggtgtatgcaacagcgttattgcaacaggctaacgaaaacagacaaaattcaactggaaaagcatgttttggcaccttcctcccagaagaaaaacttaatgactttcgtgatgaacaaattggacagttgcaggagctgatgcaagaagccacaaaacccaataggcaatttagtatttctgagtctatgaaaccaaaattttagtctatacaacaaagcttaataagacatgcaaaaatttagaacccctactttaactgtcattggtttttgaaatatatttaagctttgaaaacacctgttattaatgaaatactcttttattttggatattatgattgcagtatatggatcaagatcactagtgacaattgaaaaaaactattggaataatagcacttgtataaaattcagttttggaactaaacagcaaatttctagaattttgctgaaaatgttttaaaatgctattctcatccagccatattagtcttctggcttttctttagcttcatcaaataagcatgttgtgataatgatagatgtacaattccaacaaggttattattttttaaatacattgtcattctgaacattttatcacttctagtttaataatacatacatgatttttcttctgaatgtctcttctccctgcatcactgttcattcacaatgaaaggttaggaagaagctttaaaattcactattttactatcaatcatttgtataataaactatacaaagtataa

SEQ ID NO: 415072 - DNA, 950 bp, Homo sapiens
  misc_feature (837)..(837): n is a, c, g, or t
  misc_feature (839)..(839): n is a, c, g, or t
  misc_feature (841)..(841): n is a, c, g, or t
  misc_feature (845)..(846): n is a, c, g, or t
  misc_feature (853)..(853): n is a, c, g, or t
  misc_feature (855)..(855): n is a, c, g, or t
  misc_feature (865)..(866): n is a, c, g, or t
  misc_feature (868)..(868): n is a, c, g, or t
  misc_feature (879)..(880): n is a, c, g, or t
  misc_feature (884)..(884): n is a, c, g, or t
  misc_feature (899)..(899): n is a, c, g, or t
  misc_feature (904)..(904): n is a, c, g, or t
  misc_feature (909)..(910): n is a, c, g, or t
  misc_feature (912)..(912): n is a, c, g, or t
  misc_feature (914)..(914): n is a, c, g, or t
  misc_feature (917)..(917): n is a, c, g, or t
  misc_feature (927)..(927): n is a, c, g, or t
  misc_feature (929)..(929): n is a, c, g, or t
  misc_feature (933)..(933): n is a, c, g, or t
cccgcagtgatttttattattcttacccccccgcttgttaattttcggtgtatgcaacagcgttattgcaacaggctaacgaaaacagacaaaattcaactggaaaagcatgttttggcaccttcctcccagaagaaaaacttaatgactttcgtgatgaacaaattggacagttgcaggagctgatgcaagaagccacaaaacccaataggcaatttagtatttctgagtctatgaaaccaaaattttagtctatacaacaaagcttaataagacatgcaaaaatttagaacccctactttaactgtcattggtttttgaaatatatttaagctttgaaaacacctgttattaatgaaatactcttttattttggatattatgattgcagtatatggatcaagatcactagtgacaattgaaaaaaactattggaataatagcacttgtataaaattcagttttggaactaaacagcaaatttctagaattttgctgaaaatgttttaaaatgctattctcatccagccatattagtcttctggcttttctttagcttcatcaaataagcatgttgtgataatgatagatgtacaattccaacaaggttattattttttaaatacattgtcattctgaacattttatcacttctagtttaataatacatacatgatttttcttctgaatgtctcttctccctgcatcactgttcattcacaatgaaaggttaggaagaagctttaaaattcactattttactatcaatcatttgtataataaactatacaaagtataaaaaaaaaaaaaatggccttgttggctcagcggtggacntngnggcnnttccttnangagggtaatnntnacctgctcatnnctcntggctcggcgttcgntgggnagggnntnantcntaaggcggantnggtntccaaaatcagggatac

SEQ ID NO: 415073 - DNA, 784 bp, Homo sapiens
  misc_feature (671)..(671): n is a, c, g, or t
  misc_feature (673)..(673): n is a, c, g, or t
  misc_feature (675)..(675): n is a, c, g, or t
  misc_feature (679)..(680): n is a, c, g, or t
  misc_feature (687)..(687): n is a, c, g, or t
  misc_feature (689)..(689): n is a, c, g, or t
  misc_feature (699)..(700): n is a, c, g, or t
  misc_feature (702)..(702): n is a, c, g, or t
  misc_feature (713)..(714): n is a, c, g, or t
  misc_feature (718)..(718): n is a, c, g, or t
  misc_feature (733)..(733): n is a, c, g, or t
  misc_feature (738)..(738): n is a, c, g, or t
  misc_feature (743)..(744): n is a, c, g, or t
  misc_feature (746)..(746): n is a, c, g, or t
  misc_feature (748)..(748): n is a, c, g, or t
  misc_feature (751)..(751): n is a, c, g, or t
  misc_feature (761)..(761): n is a, c, g, or t
  misc_feature (763)..(763): n is a, c, g, or t
  misc_feature (767)..(767): n is a, c, g, or t
ttatagggttttaagtgcctaaagtcagggagagaaaaggagacagtatttaaggaatttaagatcttgaagtggaaaaggcctagaagagccataactgctgagtcttggaaagaaaatgaaacagagtgtctgcatgcagtttccttaaggtgtatgcaacagcgttattgcaacaggctaacgaaaacagacaaaattcaactggaaaagcatgttttggcaccttcctcccagaagaaaaacttaatgactttcgtgatgaacaaattggacagttgcaggagctgatgcaagaagccacaaaacccaataggcaatttagtatttctgagtctatgaaaccaaaattttagtctatacaacaaagcttaataagacatgcaaaaatttagaacccctactttaactgtcattggtttttgaaatatatttaagctttgaaaacacctgttattaatgaaatactcttttattttggatattatgattgcagtatatggatcaagatcactagtgacaattgaaaaaaactattggaataatagcacttgtataaaattcagttttggaactaaacagcaaatttctagaattttgctgaaaatgttttaaaatgctattctcatccagaaaaaaaaaaaatggccttgttggctcagcggtggacntngnggcnnttccttnangagggtaatnntnacctgctcatnnctcntggctcggcgttcgntgggnagggnntnantcntaaggcggantnggtntccaaaatcagggatac

SEQ ID NO: 415074 - DNA, 1070 bp, Homo sapiens
cgcagaagtgcgggaacgcgccgtccctctgcgcaggcgcagtcggcggtcggcgtggggcgctatgccggggcggcacgtttctcgagtccgggcattgtacaagcgcgtcttgcagctgcaccgtgttctgcccccggacctcaaatccctgggcgaccagtacgtgaaagacgaatttaggagacataagaccgttggttctgacgaggcacagcgtttcttgcaagaatgggagggtatgtccagaaatcttgatgcatgtatctgaaaagaaaatttctgtttcatgtgaagaattccgatttggtactttcagtgtatgcaacagcgttattgcaacaggctaacgaaaacagacaaaattcaactggaaaagcatgttttggcaccttcctcccagaagaaaaacttaatgactttcgtgatgaacaaattggacagttgcaggagctgatgcaagaagccacaaaacccaataggcaatttagtatttctgagtctatgaaaccaaaattttagtctatacaacaaagcttaataagacatgcaaaaatttagaacccctactttaactgtcattggtttttgaaatatatttaagctttgaaaacacctgttattaatgaaatactcttttattttggatattatgattgcagtatatggatcaagatcactagtgacaattgaaaaaaactattggaataatagcacttgtataaaattcagttttggaactaaacagcaaatttctagaattttgctgaaaatgttttaaaatgctattctcatccagccatattagtcttctggcttttctttagcttcatcaaataagcatgttgtgataatgatagatgtacaattccaacaaggttattattttttaaatacattgtcattctgaacattttatcacttctagtttaataatacatacatgatttttcttctgaatgtctcttctccctgcatcactgttcattcacaatgaaaggttaggaagaagctttaaaattcactattttactatcaatcatttgtataataaactatacaaagtataa

SEQ ID NO: 415075 - DNA, 904 bp, Homo sapiens
ttatagggttttaagtgcctaaagtcagggagagaaaaggagacagtatttaaggaatttaagatcttgaagtggaaaaggcctagaagagccataactgctgagtcttggaaagaaaatgaaacagagtgtctgcatgcagtttccttaaggtgtatgcaacagcgttattgcaacaggctaacgaaaacagacaaaattcaactggaaaagcatgttttggcaccttcctcccagaagaaaaacttaatgactttcgtgatgaacaaattggacagttgcaggagctgatgcaagaagccacaaaacccaataggcaatttagtatttctgagtctatgaaaccaaaattttagtctatacaacaaagcttaataagacatgcaaaaatttagaacccctactttaactgtcattggtttttgaaatatatttaagctttgaaaacacctgttattaatgaaatactcttttattttggatattatgattgcagtatatggatcaagatcactagtgacaattgaaaaaaactattggaataatagcacttgtataaaattcagttttggaactaaacagcaaatttctagaattttgctgaaaatgttttaaaatgctattctcatccagccatattagtcttctggcttttctttagcttcatcaaataagcatgttgtgataatgatagatgtacaattccaacaaggttattattttttaaatacattgtcattctgaacattttatcacttctagtttaataatacatacatgatttttcttctgaatgtctcttctccctgcatcactgttcattcacaatgaaaggttaggaagaagctttaaaattcactattttactatcaatcatttgtataataaactatacaaagtataa

SEQ ID NO: 415076 - DNA, 926 bp, Homo sapiens
  misc_feature (28)..(29): n is a, c, g, or t
tatttaagttaaataatgagttagtatnnagcttaaggccaatggccacccttcgtctgggaggtgaggagcgcctctgcccggctgccctatctgggaagtgaggagcgcctctgcccggccgtcccatctgggaggtgaggagtgtctctgcccggccgccccgtctgggaggtgtatgcaacagcgttattgcaacaggctaacgaaaacagacaaaattcaactggaaaagcatgttttggcaccttcctcccagaagaaaaacttaatgactttcgtgatgaacaaattggacagttgcaggagctgatgcaagaagccacaaaacccaataggcaatttagtatttctgagtctatgaaaccaaaattttagtctatacaacaaagcttaataagacatgcaaaaatttagaacccctactttaactgtcattggtttttgaaatatatttaagctttgaaaacacctgttattaatgaaatactcttttattttggatattatgattgcagtatatggatcaagatcactagtgacaattgaaaaaaactattggaataatagcacttgtataaaattcagttttggaactaaacagcaaatttctagaattttgctgaaaatgttttaaaatgctattctcatccagccatattagtcttctggcttttctttagcttcatcaaataagcatgttgtgataatgatagatgtacaattccaacaaggttattattttttaaatacattgtcattctgaacattttatcacttctagtttaataatacatacatgatttttcttctgaatgtctcttctccctgcatcactgttcattcacaatgaaaggttaggaagaagctttaaaattcactattttactatcaatcatttgtataataaactatacaaagtataa

SEQ ID NO: 415077 - DNA, 812 bp, Homo sapiens
gaattaggaatgagatgggtatggaaagagaaaagagaagagacaagtttggacgttaccgtgtatgcaacagcgttattgcaacaggctaacgaaaacagacaaaattcaactggaaaagcatgttttggcaccttcctcccagaagaaaaacttaatgactttcgtgatgaacaaattggacagttgcaggagctgatgcaagaagccacaaaacccaataggcaatttagtatttctgagtctatgaaaccaaaattttagtctatacaacaaagcttaataagacatgcaaaaatttagaacccctactttaactgtcattggtttttgaaatatatttaagctttgaaaacacctgttattaatgaaatactcttttattttggatattatgattgcagtatatggatcaagatcactagtgacaattgaaaaaaactattggaataatagcacttgtataaaattcagttttggaactaaacagcaaatttctagaattttgctgaaaatgttttaaaatgctattctcatccagccatattagtcttctggcttttctttagcttcatcaaataagcatgttgtgataatgatagatgtacaattccaacaaggttattattttttaaatacattgtcattctgaacattttatcacttctagtttaataatacatacatgatttttcttctgaatgtctcttctccctgcatcactgttcattcacaatgaaaggttaggaagaagctttaaaattcactattttactatcaatcatttgtataataaactatacaaagtataa

SEQ ID NO: 415078 - DNA, 955 bp, Homo sapiens
cgcagaagtgcgggaacgcgccgtccctctgcgcaggcgcagtcggcggtcggcgtggggcgctatgccggggcggcacgtttctcgagtccgggcattgtacaagcgcgtcttgcagctgcaccgtgttctgcccccggacctcaaatccctgggcgaccagtacgtgaaagacgaatttaggagacataagaccgttggttctgacgaggcacagcgtttcttgcaagaatgggaggtgtatgcaacagcgttattgcaacaggctaacgaaaacagtcctcccagaagaaaaacttaatgactttcgtgatgaacaaattggacagttgcaggagctgatgcaagaagccacaaaacccaataggcaatttagtatttctgagtctatgaaaccaaaattttagtctatacaacaaagcttaataagacatgcaaaaatttagaacccctactttaactgtcattggtttttgaaatatatttaagctttgaaaacacctgttattaatgaaatactcttttattttggatattatgattgcagtatatggatcaagatcactagtgacaattgaaaaaaactattggaataatagcacttgtataaaattcagttttggaactaaacagcaaatttctagaattttgctgaaaatgttttaaaatgctattctcatccagccatattagtcttctggcttttctttagcttcatcaaataagcatgttgtgataatgatagatgtacaattccaacaaggttattattttttaaatacattgtcattctgaacattttatcacttctagtttaataatacatacatgatttttcttctgaatgtctcttctccctgcatcactgttcattcacaatgaaaggttaggaagaagctttaaaattcactattttactatcaatcatttgtataataaactatacaaagtataa

SEQ ID NO: 415079 - DNA, 1011 bp, Homo sapiens
  misc_feature (898)..(898): n is a, c, g, or t
  misc_feature (900)..(900): n is a, c, g, or t
  misc_feature (902)..(902): n is a, c, g, or t
  misc_feature (906)..(907): n is a, c, g, or t
  misc_feature (914)..(914): n is a, c, g, or t
  misc_feature (916)..(916): n is a, c, g, or t
  misc_feature (926)..(927): n is a, c, g, or t
  misc_feature (929)..(929): n is a, c, g, or t
  misc_feature (940)..(941): n is a, c, g, or t
  misc_feature (945)..(945): n is a, c, g, or t
  misc_feature (960)..(960): n is a, c, g, or t
  misc_feature (965)..(965): n is a, c, g, or t
  misc_feature (970)..(971): n is a, c, g, or t
  misc_feature (973)..(973): n is a, c, g, or t
  misc_feature (975)..(975): n is a, c, g, or t
  misc_feature (978)..(978): n is a, c, g, or t
  misc_feature (988)..(988): n is a, c, g, or t
  misc_feature (990)..(990): n is a, c, g, or t
  misc_feature (994)..(994): n is a, c, g, or t
cgcagaagtgcgggaacgcgccgtccctctgcgcaggcgcagtcggcggtcggcgtggggcgctatgccggggcggcacgtttctcgagtccgggcattgtacaagcgcgtcttgcagctgcaccgtgttctgcccccggacctcaaatccctgggcgaccagtgtatgcaacagcgttattgcaacaggctaacgaaaacagacaaaattcaactggaaaagcatgttttggcaccttcctcccagaagaaaaacttaatgactttcgtgatgaacaaattggacagttgcaggagctgatgcaagaagccacaaaacccaataggcaatttagtatttctgagtctatgaaaccaaaattttagtctatacaacaaagcttaataagacatgcaaaaatttagaacccctactttaactgtcattggtttttgaaatatatttaagctttgaaaacacctgttattaatgaaatactcttttattttggatattatgattgcagtatatggatcaagatcactagtgacaattgaaaaaaactattggaataatagcacttgtataaaattcagttttggaactaaacagcaaatttctagaattttgctgaaaatttcatcaaataagcatgttgtgataatgatagatgtacaattccaacaaggttattattttttaaatacattgtcattctgaacattttatcacttctagtttaataatacatacatgatttttcttctgaatgtctcttctccctgcatcactgttcattcacaatgaaaggttaggaagaagctttaaaattcactattttactatcaatcatttgtataataaactatacaaagtataaaaaaaaaaaaaatggccttgttggctcagcggtggacntngnggcnnttccttnangagggtaatnntnacctgctcatnnctcntggctcggcgttcgntgggnagggnntnantcntaaggcggantnggtntccaaaatcagggatac

SEQ ID NO: 415080 - DNA, 1141 bp, Homo sapiens
  misc_feature (1028)..(1028): n is a, c, g, or t
  misc_feature (1030)..(1030): n is a, c, g, or t
  misc_feature (1032)..(1032): n is a, c, g, or t
  misc_feature (1036)..(1037): n is a, c, g, or t
  misc_feature (1044)..(1044): n is a, c, g, or t
  misc_feature (1046)..(1046): n is a, c, g, or t
  misc_feature (1056)..(1057): n is a, c, g, or t
  misc_feature (1059)..(1059): n is a, c, g, or t
  misc_feature (1070)..(1071): n is a, c, g, or t
  misc_feature (1075)..(1075): n is a, c, g, or t
  misc_feature (1090)..(1090): n is a, c, g, or t
  misc_feature (1095)..(1095): n is a, c, g, or t
  misc_feature (1100)..(1101): n is a, c, g, or t
  misc_feature (1103)..(1103): n is a, c, g, or t
  misc_feature (1105)..(1105): n is a, c, g, or t
  misc_feature (1108)..(1108): n is a, c, g, or t
  misc_feature (1118)..(1118): n is a, c, g, or t
  misc_feature (1120)..(1120): n is a, c, g, or t
  misc_feature (1124)..(1124): n is a, c, g, or t
cgcagaagtgcgggaacgcgccgtccctctgcgcaggcgcagtcggcggtcggcgtggggcgctatgccggggcggcacgtttctcgagtccgggcattgtacaagcgcgtcttgcagctgcaccgtgttctgcccccggacctcaaatccctgggcgaccagtacgtgaaagacgaatttaggagacataagaccgttggttctgacgaggcacagcgtttcttgcaagaatgggaggtgtatgcaacagcgttattgcaacaggctaacgaaaacagacaaaattcaactggaaaagcatgttttggcaccttcctcccagaagaaaaacttaatgactttcgtgatgaacaaattggacagttgcaggagctgatgcaagaagccacaaaacccaataggcaatttagtatttctgagtctatgaaaccaaaattttagtctatacaacaaagcttaataagacatgcaaaaatttagaacccctactttaactgtcattggtttttgaaatatatttaagctttgaaaacacctgttattaatgaaatactcttttattttggatattatgattgcagtatatggatcaagatcactagtgacaattgaaaaaaactattggaataatagcacttgtataaaattcagttttggaactaaacagcaaatttctagaattttgctgaaaatgttttaaaatgctattctcatccagccatattagtcttctggcttttctttagcttcatcaaataagcatgttgtgataatgatagatgtacaattccaacaaggttattattttttaaatacattgtcattctgaacattttatcacttctagtttaataatacatacatgatttttcttctgaatgtctcttctccctgcatcactgttcattcacaatgaaaggttaggaagaagctttaaaattcactattttactatcaatcatttgtataataaactatacaaagtataaaaaaaaaaaaaatggccttgttggctcagcggtggacntngnggcnnttccttnangagggtaatnntnacctgctcatnnctcntggctcggcgttcgntgggnagggnntnantcntaaggcggantnggtntccaaaatcagggatac

SEQ ID NO: 415081 - DNA, 884 bp, Homo sapiens
  misc_feature (844)..(844): n is a, c, g, or t
cgcagaagtgcgggaacgcgccgtccctctgcgcaggcgcagtcggcggtcggcgtggggcgctatgccggggcggcacgtttctcgagtccgggcattgtacaagcgcgtcttgcagctgcaccgtgttctgcccccggacctcaaatccctgggcgaccagtacgtgaaagacgaatttaggagacataagaccgttggttctgacgaggcacagcgtttcttgcaagaatgggaggtgtatgcaacagcgttattgcaacaggctaacgaaaacagacaaaattcaactggaaaagcatgttttggcaccttcctcccagaagaaaaacttaatgactttcgtgatgaacaaattggacagttgcaggagctgatgcaagaagccacaaaacccaataggcaatttagtatttctgagtctatgaaaccaaaattttagtctatacaacaaagcttaataagacatgcaaaaatttagaacccctactttaactgtcattggtttttgaaatatatttaagctttgaaaacacctgttattaatgaaatactcttttattttggatattatgattgcagtatatggatcaagatcactagtgacaattgaaaaaaactattggaataatagcacttgtataaaattcagttttggaactaaacagcaaatttctagaattttgctgaaaatgttttaaaatgctattctcatccagccatattagtcttctggcttttctttagcttcatcaaataagcatgttgtgataatgatagatgtccctcccaagtgttattttaatactgtctctgacatttcactttggttaaaaacacaaantcgaagggtcccgagagggttcaagaggggggaagaactt

SEQ ID NO: 415082 - DNA, 786 bp, Homo sapiens
agatctctacctaaatggctgtcaggaatgggaggtgtatgcaacagcgttattgcaacaggctaacgaaaacagacaaaattcaactggaaaagcatgttttggcaccttcctcccagaagaaaaacttaatgactttcgtgatgaacaaattggacagttgcaggagctgatgcaagaagccacaaaacccaataggcaatttagtatttctgagtctatgaaaccaaaattttagtctatacaacaaagcttaataagacatgcaaaaatttagaacccctactttaactgtcattggtttttgaaatatatttaagctttgaaaacacctgttattaatgaaatactcttttattttggatattatgattgcagtatatggatcaagatcactagtgacaattgaaaaaaactattggaataatagcacttgtataaaattcagttttggaactaaacagcaaatttctagaattttgctgaaaatgttttaaaatgctattctcatccagccatattagtcttctggcttttctttagcttcatcaaataagcatgttgtgataatgatagatgtacaattccaacaaggttattattttttaaatacattgtcattctgaacattttatcacttctagtttaataatacatacatgatttttcttctgaatgtctcttctccctgcatcactgttcattcacaatgaaaggttaggaagaagctttaaaattcactattttactatcaatcatttgtataataaactatacaaagtataa

SEQ ID NO: 415083 - DNA, 963 bp, Homo sapiens
ctcgagtccgggcattgtacaagcgcgtcttgcaatctgcaccggtgtgtctgcgccccaggtaccttcgaaagtcctcatagggtcgtaggcggtggtgcggtgggctgctgggatgcgtggtaggtggtggtgatcgggtgtgtgtgtggctgttgtgtgggtcttgggggtgtttgtgtggatggtgtggtaggttgtgtgggggtgtggttgtggtgggggttgggtgggcgtggagtgggtgggggggggttggggttagtgtggatggggagaggtgggggtcctcccagaagaaaaacttaatgactttcgtgatgaacaaattggacagttgcaggagctgatgcaagaagccacaaaacccaataggcaatttagtatttctgagtctatgaaaccaaaattttagtctatacaacaaagcttaataagacatgcaaaaatttagaacccctactttaactgtcattggtttttgaaatatatttaagctttgaaaacacctgttattaatgaaatactcttttattttggatattatgattgcagtatatggatcaagatcactagtgacaattgaaaaaaactattggaataatagcacttgtataaaattcagttttggaactaaacagcaaatttctagaattttgctgaaaatgttttaaaatgctattctcatccagccatattagtcttctggcttttctttagcttcatcaaataagcatgttgtgataatgatagatgtacaattccaacaaggttattattttttaaatacattgtcattctgaacattttatcacttctagtttaataatacatacatgatttttcttctgaatgtctcttctccctgcatcactgttcattcacaatgaaaggttaggaagaagctttaaaattcactattttactatcaatcatttgtataataaactatacaaagtataa

SEQ ID NO: 415084 - DNA, 2188 bp, Homo sapiens
agcgcctgtgctgccgcgtctcgacgtgtcaccggcggcgccgctgctgtggcaaaggaaggagctgactgggggagttcgaggcggcgggcggcggtgaccccggcctggaactgccccggtacggaagtgttccggggtccgtggggagcaggagagggaggcggcggaccgtcccgcgcggggcacgatgttgaacatgtggaaggtgcgcgagctggtggacaaagccaccaatgttgttatgaattattcagagatcgagtctaaggttcgagaggcaacgaacgatgatccttggggaccttctgggcaactcatgggagagattgccaaggctacatttatgtatgaacaatttccagaacttatgaacatgctttggtcacgaatgttaaaagacaacaaaaagaattggagaagagtttataagtcgttgctgctcctagcttacctcataaggaatggatcagagcgtgttgttacaagtgccagagaacacatttatgatttacgatccctggaaaattaccactttgtagatgagcatggtaaggatcaaggtataaatattcgacagaaggtgaaggaattggttgaatttgcccaggatgacgacaggcttcgtgaagagcgaaagaaagcaaagaagaacaaagacaagtatgttggggtttcctcagacagtgttggaggattcagatacagtgaaagatatgatcctgagcccaaatcaaaatgggatgaggagtgggataaaaacaagagtgcttttccattcagtgataaattaggtgagctgagtgataaaattggaagcacaattgatgacaccatcagcaagttccggaggaaagatagagaagactctccagaaagatgcagcgacagcgatgaggaaaagaaagcgagaagaggcagatctcccaaaggtgaattcaaagatgaagaggagactgtgacgacaaagcatattcatatcacacaggccacagagaccaccacaaccagacacaagcgcacagcaaatccttccaaaaccattgatcttggagcagcagcacattacacaggggacaaagcaagtccagatcagaatgcttcaacccacacacctcagtcttcagttaagacttcagtgcctagcagcaagtcatctggtgaccttgttgatctgtttgatggcaccagccagtcaacaggaggatcagctgatttattcggaggatttgctgactttggctcagctgctgcatcaggcagtttcccttcccaagtaacagcaacaagtgggaatggagactttggtgactggagtgccttcaaccaagccccatcaggccctgttgcttccagtggcgagttctttggcagtgcctcacagccagcggtagaacttgttagtggctcacaatcagctctaggcccacctcctgctgcctcaaattcttcagacctgtttgatcttatgggctcgtcccaggcaaccatgacatcttcccagagtatgaatttctctatgatgagcactaacactgtgggacttggtttgcctatgtcaagatcacagaatacagatatggtccagaaatcagtcagcaaaaccttgccctctacttggtctgaccccagtgtaaacatcagcctagacaacttactacctggtatgcagccttccaaaccccagcagccatcactgaatacaatgattcagcaacagaatatgcagcagcctatgaatgtgatgactcaaagttttggagctgtgaacctcagttctccatcgaacatgcttcctgtccggccccaaactaatgctttgatagggggacccatgcctatgagcatgcccaatgtgatgactggcaccatgggaatggcccctcttggaaatactccgatgatgaaccagagcatgatgggcatgaacatgaacatagggatgtccgctgctgggatgggcttgacaggcacaatgggaatgggcatgcccaacatagccatgacttctggaactgtgcaacccaagcaagatgcctttgcaaatttcgccaattttagcaaataagagattgtaaaagaagcagattgaatgaagaatttttagctgtgcagataggtgatgttgggatggaaaatgctaatcaactaccctttcttttatcaagtaattaaaataaatctacat

SEQ ID NO: 415085 - DNA, 738 bp, Homo sapiens
ctacattatataaatgttttataggctcatctttcaactttcattttcataaagaaaaacaaccaaaatgggagcttcttaattcactattttatagttaaatccgaattacctagtactagcttagaattcagacaagtgcaggcttggaaaatatgtgtctgaatggtaccaggaacttgctatttttgactcaaactattgagaatatgtgtttatgatgctaattactcattttaatgtgtagattctcgtctttggggtattaggatgaaggaaaagaagaaagaagcagaaaggtgactgctctatgtaacagaaataagacctaatgtatgagttaagcataaagtcagtctactttatttgcagtcttaattgtaactgtcataattctttgcattggtacatttttaattattcttcctcttcctgttccttttttctgtccttttcagttatcctcaataaccactaggaacctctgcttctttctcctgaatttcttctttctcctacattgttccatatattaatcagttcagttagtgttgctcactttagatagtaaaagtatacacagaacagcaaaatgtcaggatatgtgaaatataaattgctttttgacagttttgccttatatccttgtataatgtgagacatcatatcctgaattctctgttttgttttgttgttttgaaacagagtgatactccgtctcaaaaaaaaggaaaaaaa

SEQ ID NO: 415086 - DNA, 4025 bp, Homo sapiens
agcgcctgtgctgccgcgtctcgacgtgtcaccggcggcgccgctgctgtggcaaaggaaggagctgactgggggagttcgaggcggcgggcggcggtgaccccggcctggaactgccccggtacggaagtgttccggggtccgtggggagcaggagagggaggcggcggaccgtcccgcgcggggcacgatgttgaacatgtggaaggtgcgcgagctggtggacaaagccaccaatgttgttatgaattattcagagatcgagtctaaggttcgagaggcaacgaacgatgatccttggggaccttctgggcaactcatgggagagattgccaaggctacatttatgtatgaacaatttccagaacttatgaacatgctttggtcacgaatgttaaaagacaacaaaaagaattggagaagagtttataagtcgttgctgctcctagcttacctcataaggaatggatcagagcgtgttgttacaagtgccagagaacacatttatgatttacgatccctggaaaattaccactttgtagatgagcatggtaaggatcaaggtataaatattcgacagaaggtgaaggaattggttgaatttgcccaggatgacgacaggcttcgtgaagagcgaaagaaagcaaagaagaacaaagacaagtatgttggggtttcctcagacagtgttggaggattcagatacagtgaaagatatgatcctgagcccaaatcaaaatgggatgaggagtgggataaaaacaagagtgcttttccattcagtgataaattaggtgagctgagtgataaaattggaagcacaattgatgacaccatcagcaagttccggaggaaagatagagaagactctccagaaagatgcagcgacagcgatgaggaaaagaaagcgagaagaggcagatctcccaaaggtgaattcaaagatgaagaggagactgtgacgacaaagcatattcatatcacacaggccacagagaccaccacaaccagacacaagcgcacagcaaatccttccaaaaccattgatcttggagcagcagcacattacacaggggacaaagcaagtccagatcagaatgcttcaacccacacacctcagtcttcagttaagacttcagtgcctagcagcaagtcatctggtgaccttgttgatctgtttgatggcaccagccagtcaacaggaggatcagctgatttattcggaggatttgctgactttggctcagctgctgcatcaggcagtttcccttcccaagtaacagcaacaagtgggaatggagactttggtgactggagtgccttcaaccaagccccatcaggccctgttgcttccagtggcgagttctttggcagtgcctcacagccagcggtagaacttgttagtggctcacaatcagctctaggcccacctcctgctgcctcaaattcttcagacctgtttgatcttatgggctcgtcccaggcaaccatgacatcttcccagagtatgaatttctctatgatgagcactaacactgtgggacttggtttgcctatgtcaagatcacagcctttgcaaaatgttagcacagtgctgcagaagcctaatcctctctataatcagaatacagatatggtccagaaatcagtcagcaaaaccttgccctctacttggtctgaccccagtgtaaacatcagcctagacaacttactacctggtatgcagccttccaaaccccagcagccatcactgaatacaatgattcagcaacagaatatgcagcagcctatgaatgtgatgactcaaagttttggagctgtgaacctcagttctccatcgaacatgcttcctgtccggccccaaactaatgctttgatagggggacccatgcctatgagcatgcccaatgtgatgactggcaccatgggaatggcccctcttggaaatactccgatgatgaaccagagcatgatgggcatgaacatgaacatagggatgtccgctgctgggatgggcttgacaggcacaatgggaatgggcatgcccaacatagccatgacttctggaactgtgcaacccaagcaagatgcctttgcaaatttcgccaattttagcaaataagagattgtaaaagaagcagattgaatgaagaatttttagctgtgcagataggtgatgttgggatggaaaatgctaatcaactaccctttcttttatcaagtaattaaaataaatctacataaagaaccaaaaaggctgttttataaaagtgaaatatccagtatttcagagggccaggcaagagcacttcagatgaggcagtcaaaatcatttttttccagtgaggatagaccacaagtgggtggtgagaccattgaaagcctttatcaactgaagagtccatttaacagcataatttgtgggaagactggaatagggctgaataaatgtgtttgaatctctaattttatactttcttttcctgaggaacttgatttttctgtccctggatcgccttgtcataattgggtctgttccttttactaccactcttgagtccatatatgaaatcattaaagttggatgatcagttttttataaaaatatatatttttgtccaagaaaaaaaaaagcatacatatgtgattatggctaaatcaaaggtaactggaatgtatatacttttgctaatgttccagcaacactgctattatactatccaaatttttattgtaacaaaacctctttaagcaattggtgattgccatgggacttttcccatgtcttctgctgtaattatcctgtgcagaactaggaagaaatttttttcaggactgctctatggtttcctttaaaagaaaaaaacttctgtttgtttttagcagtcattatttacaatttgcagtgattaacttggcaaggcttccttccgtgtttatccctgtagccatcatttaagtcaggaacagtcagaaaaatatttattttattttttttttgggtgtctgcaaaggtaaaaatccattaaaaccttaagttaaatataaatgttacaactcaatgtttgcttttagattttatacagtatttgttttgttttggttttgagtgtatataatgcagcattagcaatatggttccaatagaggagttaaatatatattgttaaaggagacctgtagcagtcaaagattttattgatttaatgacaaaggaaattaatgaaaatgtttttgtttttctgctgtaattctgcattaagctcacatgaaaatcatgattctagagtttggaatgcaaaattaattgttttaccctcaagctgggaatatttttcaaaataaatactataatatagatatcaaattattacctccccatgttatgttgaaaatttttttattaaattgataaaactttatttccattatattcataatgttctgttatacataacattaaaatgttcattaaaatcaatgttgaactgctttttctttcgttctgttagacatttgagaccatttggggaaaaaataattatagtttgggcaaagtaatttttataaataatttaaaattatttaatgacttctctattctttcctatcagactctactgttaggaattaaaaatgaagcagcaaagatatcctgacctgctccattcttgctaatgttccatctacaacatttctaattaggcagaaattcatgtacttcagctaagtggtaatgaaaagtgattcatttgctgaataagagatgagagtgagtgtaattagctgactgcggtttttaatctttcaacaattcaatgtgtttaacttagtttcaaagaataggagctttcaagtgttgttacttcagagcaatcaagccagcctctggtggccgcatagtagaatatggtccctgatatttaaaaccgatcatcttaagtaaattttttctttaagaagtatatcttcactttctcaaatatgtatggttcttagacgaagtaaatgtttatctgaacctt

SEQ ID NO: 415087 - DNA, 3372 bp, Homo sapiens
agcgcctgtgctgccgcgtctcgacgtgtcaccggcggcgccgctgctgtggcaaaggaaggagctgactgggggagttcgaggcggcgggcggcggtgaccccggcctggaactgccccggtacggaagtgttccggggtccgtggggagcaggagagggaggcggcggaccgtcccgcgcggggcacgatgttgaacatgtggaaggtgcgcgagctggtggacaaagccaccaatgttgttatgaattattcagagatcgagtctaaggttcgagaggcaacgaacgatgatccttggggaccttctgggcaactcatgggagagattgccaaggctacatttatgtatgaacaatttccagaacttatgaacatgctttggtcacgaatgttaaaagacaacaaaaagaattggagaagagtttataagtcgttgctgctcctagcttacctcataaggaatggatcagagcgtgttgttacaagtgccagagaacacatttatgatttacgatccctggaaaattaccactttgtagatgagcatggtaaggatcaaggtataaatattcgacagaaggtgaaggaattggttgaatttgcccaggatgacgacaggcttcgtgaagagcgaaagaaagcaaagaagaacaaagacaagtatgttggggtttcctcagacagtgttggaggattcagatacagtgaaagatatgatcctgagcccaaatcaaaatgggatgaggagtgggataaaaacaagagtgcttttccattcagtgataaattaggtgagctgagtgataaaattggaagcacaattgatgacaccatcagcaagttccggaggaaagatagagaagactctccagaaagatgcagcaaagatgaagaggagactgtgacgacaaagcatattcatatcacacaggccacagagaccaccacaaccagacacaagcgcacagcaaatccttccaaaaccattgatcttggagcagcagcacattacacaggggacaaagcaagtccagatcagaatgcttcaacccacacacctcagtcttcagttaagacttcagtgcctagcagcaagtcatctggtgaccttgttgatctgtttgatggcaccagccagtcaacaggaggatcagctgatttattcggaggatttgctgactttggctcagctgctgcatcaggcagtttcccttcccaagtaacagcaacaagtgggaatggagactttggtgactggagtgccttcaaccaagccccatcaggccctgttgcttccagtggcgagttctttggcagtgcctcacagccagcggtagaacttgttagtggctcacaatcagctctaggcccacctcctgctgcctcaaattcttcagacctgtttgatcttatgggctcgtcccaggcaaccatgacatcttcccagagtatgaatttctctatgatgagcactaacactgtgggacttggtttgcctatgtcaagatcacagaatacagatatggtccagaaatcagtcagcaaaaccttgccctctacttggtctgaccccagtgtaaacatcagcctagacaacttactacctggtatgcagccttccaaaccccagcagccatcactgaatacaatgattcagcaacagaatatgcagcagcctatgaatgtgatgactcaaagttttggagctgtgaacctcagttctccatcgaacatgcttcctgtccggccccaaactaatgctttgatagggggacccatgcctatgagcatgcccaatgtgatgactggcaccatgggaatggcccctcttggaaatactccgatgatgaaccagagcatgatgggcatgaacatgaacatagggatgtccgctgctgggatgggcttgacaggcacaatgggaatgggcatgcccaacatagccatgacttctggaactgtgcaacccaagcaagatgcctttgcaaatttcgccaattttagcaaataagagattgtaaaagaagcagattgaatgaagaatttttagctgtgcagataggtgatgttgggatggaaaatgctaatcaactaccctttcttttatcaagtaattaaaataaatctacataaagaaccaaaaaggctgttttataaaagtgaaatatccagtatttcagagggccaggcaagagcacttcagatgaggcagtcaaaatcatttttttccagtgaggatagaccacaagtgggtggtgagaccattgaaagcctttatcaactgaagagtccatttaacagcataatttgtgggaagactggaatagggctgaataaatgtgtttgaatctctaattttatactttcttttcctgaggaacttgatttttctgtccctggatcgccttgtcataattgggtctgttccttttactaccactcttgagtccatatatgaaatcattaaagttggatgatcagttttttataaaaatatatatttttgtccaagaaaaaaaaaagcatacatatgtgattatggctaaatcaaaggtaactggaatgtatatacttttgctaatgttccagcaacactgctattatactatccaaatttttattgtaacaaaacctctttaagcaattggtgattgccatgggacttttcccatgtcttctgctgtaattatcctgtgcagaactaggaagaaatttttttcaggactgctctatggtttcctttaaaagaaaaaaacttctgtttgtttttagcagtcattatttacaatttgcagtgattaacttggcaaggcttccttccgtgtttatccctgtagccatcatttaagtcaggaacagtcagaaaaatatttattttattttttttttgggtgtctgcaaaggtaaaaatccattaaaaccttaagttaaatataaatgttacaactcaatgtttgcttttagattttatacagtatttgttttgttttggttttgagtgtatataatgcagcattagcaatatggttccaatagaggagttaaatatatattgttaaaggagacctgtagcagtcaaagattttattgatttaatgacaaaggaaattaatgaaaatgtttttgtttttctgctgtaattctgcattaagctcacatgaaaatcatgattctagagtttggaatgcaaaattaattgttttaccctcaagctgggaatatttttcaaaataaatactataatatagatatcaaattattacctccccatgttatgttgaaaatttttttattaaattgataaaactttatttccattatattcataatgttctgttatacataacattaaaatgttcattaaaatca

SEQ ID NO: 415088 - DNA, 3372 bp, Homo sapiens
agcgcctgtgctgccgcgtctcgacgtgtcaccggcggcgccgctgctgtggcaaaggaaggagctgactgggggagttcgaggcggcgggcggcggtgaccccggcctggaactgccccggtacggaagtgttccggggtccgtggggagcaggagagggaggcggcggaccgtcccgcgcggggcacgatgttgaacatgtggaaggtgcgcgagctggtggacaaagccaccaatgttgttatgaattattcagagatcgagtctaaggttcgagaggcaacgaacgatgatccttggggaccttctgggcaactcatgggagagattgccaaggctacatttatgtatgaacaatttccagaacttatgaacatgctttggtcacgaatgttaaaagacaacaaaaagaattggagaagagtttataagtcgttgctgctcctagcttacctcataaggaatggatcagagcgtgttgttacaagtgccagagaacacatttatgatttacgatccctggagaaggtgaaggaattggttgaatttgcccaggatgacgacaggcttcgtgaagagcgaaagaaagcaaagaagaacaaagacaagtatgttggggtttcctcagacagtgttggaggattcagatacagtgaaagatatgatcctgagcccaaatcaaaatgggatgaggagtgggataaaaacaagagtgcttttccattcagtgataaattaggtgagctgagtgataaaattggaagcacaattgatgacaccatcagcaagttccggaggaaagatagagaagactctccagaaagatgcagcgacagcgatgaggaaaagaaagcgagaagaggcagatctcccaaaggtgaattcaaagatgaagaggagactgtgacgacaaagcatattcatatcacacaggccacagagaccaccacaaccagacacaagcgcacagcaaatccttccaaaaccattgatcttggagcagcagcacattacacaggggacaaagcaagtccagatcagaatgcttcaacccacacacctcagtcttcagttaagacttcagtgcctagcagcaagtcatctggtgaccttgttgatctgtttgatggcaccagccagtcaacaggaggatcagctgatttattcggaggatttgctgactttggctcagctgctgcatcaggcagtttcccttcccaagtaacagcaacaagtgggaatggagactttggtgactggagtgccttcaaccaagccccatcaggccctgttgcttccagtggcgagttctttggcagtgcctcacagccagcggtagaacttgttagtggctcacaatcagctctaggcccacctcctgctgcctcaaattcttcagacctgtttgatcttatgggctcgtcccaggcaaccatgacatcttcccagagtatgaatttctctatgatgagcactaacactgtgggacttggtttgcctatgtcaagatcacagaatacagatatggtccagaaatcagtcagcaaaaccttgccctctacttggtctgaccccagtgtaaacatcagcctagacaacttactacctggtatgcagccttccaaaccccagcagccatcactgaatacaatgattcagcaacagaatatgcagcagcctatgaatgtgatgactcaaagttttggagctgtgaacctcagttctccatcgaacatgcttcctgtccggccccaaactaatgctttgatagggggacccatgcctatgagcatgcccaatgtgatgactggcaccatgggaatggcccctcttggaaatactccgatgatgaaccagagcatgatgggcatgaacatgaacatagggatgtccgctgctgggatgggcttgacaggcacaatgggaatgggcatgcccaacatagccatgacttctggaactgtgcaacccaagcaagatgcctttgcaaatttcgccaattttagcaaataagagattgtaaaagaagcagattgaatgaagaatttttagctgtgcagataggtgatgttgggatggaaaatgctaatcaactaccctttcttttatcaagtaattaaaataaatctacataaagaaccaaaaaggctgttttataaaagtgaaatatccagtatttcagagggccaggcaagagcacttcagatgaggcagtcaaaatcatttttttccagtgaggatagaccacaagtgggtggtgagaccattgaaagcctttatcaactgaagagtccatttaacagcataatttgtgggaagactggaatagggctgaataaatgtgtttgaatctctaattttatactttcttttcctgaggaacttgatttttctgtccctggatcgccttgtcataattgggtctgttccttttactaccactcttgagtccatatatgaaatcattaaagttggatgatcagttttttataaaaatatatatttttgtccaagaaaaaaaaaagcatacatatgtgattatggctaaatcaaaggtaactggaatgtatatacttttgctaatgttccagcaacactgctattatactatccaaatttttattgtaacaaaacctctttaagcaattggtgattgccatgggacttttcccatgtcttctgctgtaattatcctgtgcagaactaggaagaaatttttttcaggactgctctatggtttcctttaaaagaaaaaaacttctgtttgtttttagcagtcattatttacaatttgcagtgattaacttggcaaggcttccttccgtgtttatccctgtagccatcatttaagtcaggaacagtcagaaaaatatttattttattttttttttgggtgtctgcaaaggtaaaaatccattaaaaccttaagttaaatataaatgttacaactcaatgtttgcttttagattttatacagtatttgttttgttttggttttgagtgtatataatgcagcattagcaatatggttccaatagaggagttaaatatatattgttaaaggagacctgtagcagtcaaagattttattgatttaatgacaaaggaaattaatgaaaatgtttttgtttttctgctgtaattctgcattaagctcacatgaaaatcatgattctagagtttggaatgcaaaattaattgttttaccctcaagctgggaatatttttcaaaataaatactataatatagatatcaaattattacctccccatgttatgttgaaaatttttttattaaattgataaaactttatttccattatattcataatgttctgttatacataacattaaaatgttcattaaaatca

SEQ ID NO: 415089 - DNA, 3452 bp, Homo sapiens
agcgcctgtgctgccgcgtctcgacgtgtcaccggcggcgccgctgctgtggcaaaggaaggagctgactgggggagttcgaggcggcgggcggcggtgaccccggcctggaactgccccggtacggaagtgttccggggtccgtggggagcaggagagggaggcggcggaccgtcccgcgcggggcacgatgttgaacatgtggaaggtgcgcgagctggtggacaaagccaccaatgttgttatgaattattcagagatcgagtctaaggttcgagaggcaacgaacgatgatccttggggaccttctgggcaactcatgggagagattgccaaggctacatttatgtatgaacaatttccagaacttatgaacatgctttggtcacgaatgttaaaagacaacaaaaagaattggagaagagtttataagtcgttgctgctcctagcttacctcataaggaatggatcagagcgtgttgttacaagtgccagagaacacatttatgatttacgatccctggaaaattaccactttgtagatgagcatggtaaggatcaaggtataaatattcgacagaaggtgaaggaattggttgaatttgcccaggatgacgacaggcttcgtgaagagcgaaagaaagcaaagaagaacaaagacaagtatgttggggtttcctcagacagtgttggaggattcagatacagtgaaagatatgatcctgagcccaaatcaaaatgggatgaggagtgggataaaaacaagagtgcttttccattcagtgataaattaggtgagctgagtgataaaattggaagcacaattgatgacaccatcagcaagttccggaggaaagatagagaagactctccagaaagatgcagcgacagcgatgaggaaaagaaagcgagaagaggcagatctcccaaaggtgaattcaaagatgaagaggagactgtgacgacaaagcatattcatatcacacaggccacagagaccaccacaaccagacacaagcgcacagcaaatccttccaaaaccattgatcttggagcagcagcacattacacaggggacaaagcaagtccagatcagaatgcttcaacccacacacctcagtcttcagttaagacttcagtgcctagcagcaagtcatctggtgaccttgttgatctgtttgatggcaccagccagtcaacaggaggatcagctgatttattcggaggatttgctgactttggctcagctgctgcatcaggcagtttcccttcccaagtaacagcaacaagtgggaatggagactttggtgactggagtgccttcaaccaagccccatcaggccctgttgcttccagtggcgagttctttggcagtgcctcacagccagcggtagaacttgttagtggctcacaatcagctctaggcccacctcctgctgcctcaaattcttcagacctgtttgatcttatgggctcgtcccaggcaaccatgacatcttcccagagtatgaatttctctatgatgagcactaacactgtgggacttggtttgcctatgtcaagatcacagaatacagatatggtccagaaatcagtcagcaaaaccttgccctctacttggtctgaccccagtgtaaacatcagcctagacaacttactacctggtatgcagccttccaaaccccagcagccatcactgaatacaatgattcagcaacagattcttctgtctgttttcgtctggtagatatgcagcagcctatgaatgtgatgactcaaagttttggagctgtgaacctcagttctccatcgaacatgcttcctgtccggccccaaactaatgctttgatagggggacccatgcctatgagcatgcccaatgtgatgactggcaccatgggaatggcccctcttggaaatactccgatgatgaaccagagcatgatgggcatgaacatgaacatagggatgtccgctgctgggatgggcttgacaggcacaatgggaatgggcatgcccaacatagccatgacttctggaactgtgcaacccaagcaagatgcctttgcaaatttcgccaattttagcaaataagagattgtaaaagaagcagattgaatgaagaatttttagctgtgcagataggtgatgttgggatggaaaatgctaatcaactaccctttcttttatcaagtaattaaaataaatctacataaagaaccaaaaaggctgttttataaaagtgaaatatccagtatttcagagggccaggcaagagcacttcagatgaggcagtcaaaatcatttttttccagtgaggatagaccacaagtgggtggtgagaccattgaaagcctttatcaactgaagagtccatttaacagcataatttgtgggaagactggaatagggctgaataaatgtgtttgaatctctaattttatactttcttttcctgaggaacttgatttttctgtccctggatcgccttgtcataattgggtctgttccttttactaccactcttgagtccatatatgaaatcattaaagttggatgatcagttttttataaaaatatatatttttgtccaagaaaaaaaaaagcatacatatgtgattatggctaaatcaaaggtaactggaatgtatatacttttgctaatgttccagcaacactgctattatactatccaaatttttattgtaacaaaacctctttaagcaattggtgattgccatgggacttttcccatgtcttctgctgtaattatcctgtgcagaactaggaagaaatttttttcaggactgctctatggtttcctttaaaagaaaaaaacttctgtttgtttttagcagtcattatttacaatttgcagtgattaacttggcaaggcttccttccgtgtttatccctgtagccatcatttaagtcaggaacagtcagaaaaatatttattttattttttttttgggtgtctgcaaaggtaaaaatccattaaaaccttaagttaaatataaatgttacaactcaatgtttgcttttagattttatacagtatttgttttgttttggttttgagtgtatataatgcagcattagcaatatggttccaatagaggagttaaatatatattgttaaaggagacctgtagcagtcaaagattttattgatttaatgacaaaggaaattaatgaaaatgtttttgtttttctgctgtaattctgcattaagctcacatgaaaatcatgattctagagtttggaatgcaaaattaattgttttaccctcaagctgggaatatttttcaaaataaatactataatatagatatcaaattattacctccccatgttatgttgaaaatttttttattaaattgataaaactttatttccattatattcataatgttctgttatacataacattaaaatgttcattaaaatca

SEQ ID NO: 415090 - DNA, 3241 bp, Homo sapiens
ctacattatataaatgttttataggctcatctttcaactttcattttcataaagaaaaacaaccaaaatgggagcttcttaattcactattttatagttaaatccgaattacctagtactagcttagaattcagacaagtgcaggcttggaaaatatgtgtctgaatggtaccaggaacttgctatttttgactcaaactattgagaatatgtgtttatgatgctaattactcattttaatgtgtagattctcgtctttggggtattaggatgaaggaaaagaagaaagaagcagaaaggtgactgctctatgtaacagaaataagacctaatgtatgagttaagcataaagtcagtctactttatttgcagtcttaattgtaactgtcataattctttgcattggtacatttttaattattcttcctcttcctgttccttttttctgtccttttcagttatcctcaataaccactaggaacctctgcttctttctcctgaatttcttctttctcctacattgttccatatattaatcagttcagttagtgttgctcactttagatagtaaaagtatacacagaacagcaaaatgtcaggatatgtgaaatataaattgctttttgacagttttgccttatatccttgtataatgtgagacatcatatcctgaattctctgttttgttttgttgttttgaaacagagtctcgctctgtcgcccaggctggagtgcagtggcacgatctctgctcactgcagcctccacctccttggttcaaagtgattctcctgccttagcctcccaagtagctgggactacaggcatgtgccaccatgcctggctgattttgtatttttagtagagatggggtttcatcctgttggccagtctggtcttgaacttctgacctcaggtgatctgcccacctcagcctcccaaagtgctgggattacaggcataagtcactgcgcctggcctctgaattctgttttgaaagaataaatgtccacttgtgtatctccttaaagctgtactaacctaaaatcggtagttcccctgggcatttgccagggatggtggcttctagactttgagtgatgggagaataattgttagtgtaggtaagttgttggttttatccacctcaaacctgattgggacttcagaggaacctctttgggaagctaatgattcagggtattgaagacattagcatagaacattagtggttctttttgtttcagaagttcattgttgtgattaaattgccatctgataatttttatagaacagatgcttaatttttagagcatttttctattttccagcctttgcaaaatgttagcacagtgctgcagaagcctaatcctctctataatcagaatacagatatggtccagaaatcagtcagcaaaaccttgccctctacttggtctgaccccagtgtaaacatcagcctagacaacttactacctggtatgcagccttccaaaccccagcagccatcactgaatacaatgattcagcaacagaatatgcagcagcctatgaatgtgatgactcaaagttttggagctgtgaacctcagttctccatcgaacatgcttcctgtccggccccaaactaatgctttgatagggggacccatgcctatgagcatgcccaatgtgatgactggcaccatgggaatggcccctcttggaaatactccgatgatgaaccagagcatgatgggcatgaacatgaacatagggatgtccgctgctgggatgggcttgacaggcacaatgggaatgggcatgcccaacatagccatgacttctggaactgtgcaacccaagcaagatgcctttgcaaatttcgccaattttagcaaataagagattgtaaaagaagcagattgaatgaagaatttttagctgtgcagataggtgatgttgggatggaaaatgctaatcaactaccctttcttttatcaagtaattaaaataaatctacataaagaaccaaaaaggctgttttataaaagtgaaatatccagtatttcagagggccaggcaagagcacttcagatgaggcagtcaaaatcatttttttccagtgaggatagaccacaagtgggtggtgagaccattgaaagcctttatcaactgaagagtccatttaacagcataatttgtgggaagactggaatagggctgaataaatgtgtttgaatctctaattttatactttcttttcctgaggaacttgatttttctgtccctggatcgccttgtcataattgggtctgttccttttactaccactcttgagtccatatatgaaatcattaaagttggatgatcagttttttataaaaatatatatttttgtccaagaaaaaaaaaagcatacatatgtgattatggctaaatcaaaggtaactggaatgtatatacttttgctaatgttccagcaacactgctattatactatccaaatttttattgtaacaaaacctctttaagcaattggtgattgccatgggacttttcccatgtcttctgctgtaattatcctgtgcagaactaggaagaaatttttttcaggactgctctatggtttcctttaaaagaaaaaaacttctgtttgtttttagcagtcattatttacaatttgcagtgattaacttggcaaggcttccttccgtgtttatccctgtagccatcatttaagtcaggaacagtcagaaaaatatttattttattttttttttgggtgtctgcaaaggtaaaaatccattaaaaccttaagttaaatataaatgttacaactcaatgtttgcttttagattttatacagtatttgttttgttttggttttgagtgtatataatgcagcattagcaatatggttccaatagaggagttaaatatatattgttaaaggagacctgtagcagtcaaagattttattgatttaatgacaaaggaaattaatgaaaatgtttttgtttttctgctgtaattctgcattaagctcacatgaaaatcatgattctagagtttggaatgcaaaattaattgttttaccctcaagctgggaatatttttcaaaataaatactataatatagatatcaaattattacctccccatgttatgttgaaaatttttttattaaattgataaaactttatttccattatattcataatgttctgttatacataacattaaaatgttcattaaaatca

SEQ ID NO: 415091 - DNA, 3187 bp, Homo sapiens
ctacattatataaatgttttataggctcatctttcaactttcattttcataaagaaaaacaaccaaaatgggagcttcttaattcactattttatagttaaatccgaattacctagtactagcttagaattcagacaagtgcaggcttggaaaatatgtgtctgaatggtaccaggaacttgctatttttgactcaaactattgagaatatgtgtttatgatgctaattactcattttaatgtgtagattctcgtctttggggtattaggatgaaggaaaagaagaaagaagcagaaaggtgactgctctatgtaacagaaataagacctaatgtatgagttaagcataaagtcagtctactttatttgcagtcttaattgtaactgtcataattctttgcattggtacatttttaattattcttcctcttcctgttccttttttctgtccttttcagttatcctcaataaccactaggaacctctgcttctttctcctgaatttcttctttctcctacattgttccatatattaatcagttcagttagtgttgctcactttagatagtaaaagtatacacagaacagcaaaatgtcaggatatgtgaaatataaattgctttttgacagttttgccttatatccttgtataatgtgagacatcatatcctgaattctctgttttgttttgttgttttgaaacagagtctcgctctgtcgcccaggctggagtgcagtggcacgatctctgctcactgcagcctccacctccttggttcaaagtgattctcctgccttagcctcccaagtagctgggactacaggcatgtgccaccatgcctggctgattttgtatttttagtagagatggggtttcatcctgttggccagtctggtcttgaacttctgacctcaggtgatctgcccacctcagcctcccaaagtgctgggattacaggcataagtcactgcgcctggcctctgaattctgttttgaaagaataaatgtccacttgtgtatctccttaaagctgtactaacctaaaatcggtagttcccctgggcatttgccagggatggtggcttctagactttgagtgatgggagaataattgttagtgtaggtaagttgttggttttatccacctcaaacctgattgggacttcagaggaacctctttgggaagctaatgattcagggtattgaagacattagcatagaacattagtggttctttttgtttcagaagttcattgttgtgattaaattgccatctgataatttttatagaacagatgcttaatttttagagcatttttctattttccagcctttgcaaaatgttagcacagtgctgcagaagcctaatcctctctataatcagaatacagatatggtccagaaatcagtcagcttactacctggtatgcagccttccaaaccccagcagccatcactgaatacaatgattcagcaacagaatatgcagcagcctatgaatgtgatgactcaaagttttggagctgtgaacctcagttctccatcgaacatgcttcctgtccggccccaaactaatgctttgatagggggacccatgcctatgagcatgcccaatgtgatgactggcaccatgggaatggcccctcttggaaatactccgatgatgaaccagagcatgatgggcatgaacatgaacatagggatgtccgctgctgggatgggcttgacaggcacaatgggaatgggcatgcccaacatagccatgacttctggaactgtgcaacccaagcaagatgcctttgcaaatttcgccaattttagcaaataagagattgtaaaagaagcagattgaatgaagaatttttagctgtgcagataggtgatgttgggatggaaaatgctaatcaactaccctttcttttatcaagtaattaaaataaatctacataaagaaccaaaaaggctgttttataaaagtgaaatatccagtatttcagagggccaggcaagagcacttcagatgaggcagtcaaaatcatttttttccagtgaggatagaccacaagtgggtggtgagaccattgaaagcctttatcaactgaagagtccatttaacagcataatttgtgggaagactggaatagggctgaataaatgtgtttgaatctctaattttatactttcttttcctgaggaacttgatttttctgtccctggatcgccttgtcataattgggtctgttccttttactaccactcttgagtccatatatgaaatcattaaagttggatgatcagttttttataaaaatatatatttttgtccaagaaaaaaaaaagcatacatatgtgattatggctaaatcaaaggtaactggaatgtatatacttttgctaatgttccagcaacactgctattatactatccaaatttttattgtaacaaaacctctttaagcaattggtgattgccatgggacttttcccatgtcttctgctgtaattatcctgtgcagaactaggaagaaatttttttcaggactgctctatggtttcctttaaaagaaaaaaacttctgtttgtttttagcagtcattatttacaatttgcagtgattaacttggcaaggcttccttccgtgtttatccctgtagccatcatttaagtcaggaacagtcagaaaaatatttattttattttttttttgggtgtctgcaaaggtaaaaatccattaaaaccttaagttaaatataaatgttacaactcaatgtttgcttttagattttatacagtatttgttttgttttggttttgagtgtatataatgcagcattagcaatatggttccaatagaggagttaaatatatattgttaaaggagacctgtagcagtcaaagattttattgatttaatgacaaaggaaattaatgaaaatgtttttgtttttctgctgtaattctgcattaagctcacatgaaaatcatgattctagagtttggaatgcaaaattaattgttttaccctcaagctgggaatatttttcaaaataaatactataatatagatatcaaattattacctccccatgttatgttgaaaatttttttattaaattgataaaactttatttccattatattcataatgttctgttatacataacattaaaatgttcattaaaatca

SEQ ID NO: 415092 - DNA, 3372 bp, Homo sapiens
agcgcctgtgctgccgcgtctcgacgtgtcaccggcggcgccgctgctgtggcaaaggaaggagctgactgggggagttcgaggcggcgggcggcggtgaccccggcctggaactgccccggtacggaagtgttccggggtccgtggggagcaggagagggaggcggcggaccgtcccgcgcggggcacgatgttgaacatgtggaaggtgcgcgagctggtggacaaagccaccaatgttgttatgaattattcagagatcgagtctaaggttcgagaggcaacgaacgatgatccttggggaccttctgggcaactcatgggagagattgccaaggctacatttatgtatgaacaatttccagaacttatgaacatgctttggtcacgaatgttaaaagacaacaaaaagaattggagaagagtttataagtcgttgctgctcctagcttacctcataaggaatggatcagagcgtgttgttacaagtgccagagaacacatttatgatttacgatccctggaaaattaccactttgtagatgagcatggtaaggatcaaggtataaatattcgacagaaggtgaaggaattggttgaatttgcccaggatgacgacaggcttcgtgaagagcgaaagaaagcaaagaagaacaaagacaagtatgttggggtttcctcagacagtgttggaggattcagatacagtgaaagatatgatcctgagcccaaatcaaaatgggatgaggagtgggataaaaacaagagtgcttttccattcagtgataaattaggtgagctgagtgataaaattggaagcacaattgatgacaccatcagcaagttccggaggaaagatagagaagactctccagaaagatgcagcgacagcgatgaggaaaagaaagcgagaagaggcagatctcccaaaggtgaattcaaagatgaagaggagactgtgacgacaaagcatattcatatcacacaggccacagagaccaccacaaccagacacaagcgcacagcaaatccttccaaaaccattgatcttggagcagcagcacattacacaggggacaaagcaagtccagatcagaatgcttcaacccacacacctcagtcttcagttaagacttcagtgcctagcagcaagtcatctggtgaccttgttgatctgtttgatggcaccagccagtcaacaggaggatcagctgatttattcggaggatttgctgactttggctcagctgctgcatcaggcagtttcccttcccaagtaacagcaacaagtgggaatggagactttggtgactggagtgccttcaaccaagccccatcaggccctgttgcttccagtggcgagttctttggcagtgcctcacagccagcggtagaacttgttagtggctcacaatcagctctaggcccacctcctgctgcctcaaattcttcagacctgtttgatcttatgggctcgtcccaggcaaccatgacatcttcccagagtatgaatttctctatgatgagcactaacactgtgggacttggtttgcctatgtcaagatcacagaatacagatatggtccagaaatcagtcagcaaaaccttgccctctacttggtctgaccccagtgtaaacatcagcctagacaacttactacctggtatgcagccttccaaaccccagcagccatcactgaatacaatgattcagcaacagaatatgcagcagcctatgaatgtgatgactcaaagttttggagctgtgaacctcagttctccatcgaacatgcttcctgtccggccccaaactaatgctttgatagggggacccatgcctatgagcatgcccaatgtgatgactggcaccatgggaatggcccctcttggaaatactccgatgatgaaccagagcatgatgggcatgaacatgaacatagggatgtccgctgctgggatgggcttgacaggcacaatgggaatgggcatgcccaacatagccatgacttctggaactgtgcaacccaagcaagatgcctttgcaaatttcgccaattttagcaaataagagattgtaaaagaagcagattgaatgaagaatttttagctgtgcagataggtgatgttgggatggaaaatgctaatcaactaccctttcttttatcaagtaattaaaataaatctacataaagaaccaaaaaggctgttttataaaagtgaaatatccagtatttcagagggccaggcaagagcacttcagatgaggcagtcaaacctttatcaactgaagagtccatttaacagcataatttgtgggaagactggaatagggctgaataaatgtgtttgaatctctaattttatactttcttttcctgaggaacttgatttttctgtccctggatcgccttgtcataattgggtctgttccttttactaccactcttgagtccatatatgaaatcattaaagttggatgatcagttttttataaaaatatatatttttgtccaagaaaaaaaaaagcatacatatgtgattatggctaaatcaaaggtaactggaatgtatatacttttgctaatgttccagcaacactgctattatactatccaaatttttattgtaacaaaacctctttaagcaattggtgattgccatgggacttttcccatgtcttctgctgtaattatcctgtgcagaactaggaagaaatttttttcaggactgctctatggtttcctttaaaagaaaaaaacttctgtttgtttttagcagtcattatttacaatttgcagtgattaacttggcaaggcttccttccgtgtttatccctgtagccatcatttaagtcaggaacagtcagaaaaatatttattttattttttttttgggtgtctgcaaaggtaaaaatccattaaaaccttaagttaaatataaatgttacaactcaatgtttgcttttagattttatacagtatttgttttgttttggttttgagtgtatataatgcagcattagcaatatggttccaatagaggagttaaatatatattgttaaaggagacctgtagcagtcaaagattttattgatttaatgacaaaggaaattaatgaaaatgtttttgtttttctgctgtaattctgcattaagctcacatgaaaatcatgattctagagtttggaatgcaaaattaattgttttaccctcaagctgggaatatttttcaaaataaatactataatatagatatcaaattattacctccccatgttatgttgaaaatttttttattaaattgataaaactttatttccattatattcataatgttctgttatacataacattaaaatgttcattaaaatca

SEQ ID NO: 415093 - DNA, 2242 bp, Homo sapiens
agcgcctgtgctgccgcgtctcgacgtgtcaccggcggcgccgctgctgtggcaaaggaaggagctgactgggggagttcgaggcggcgggcggcggtgaccccggcctggaactgccccggtacggaagtgttccggggtccgtggggagcaggagagggaggcggcggaccgtcccgcgcggggcacgatgttgaacatgtggaaggtgcgcgagctggtggacaaagccaccaatgttgttatgaattattcagagatcgagtctaaggttcgagaggcaacgaacgatgatccttggggaccttctgggcaactcatgggagagattgccaaggctacatttatgtatgaacaatttccagaacttatgaacatgctttggtcacgaatgttaaaagacaacaaaaagaattggagaagagtttataagtcgttgctgctcctagcttacctcataaggaatggatcagagcgtgttgttacaagtgccagagaacacatttatgatttacgatccctggaaaattaccactttgtagatgagcatggtaaggatcaaggtataaatattcgacagaaggtgaaggaattggttgaatttgcccaggatgacgacaggcttcgtgaagagcgaaagaaagcaaagaagaacaaagacaagtatgttggggtttcctcagacagtgttggaggattcagatacagtgaaagatatgatcctgagcccaaatcaaaatgggatgaggagtgggataaaaacaagagtgcttttccattcagtgataaattaggtgagctgagtgataaaattggaagcacaattgatgacaccatcagcaagttccggaggaaagatagagaagactctccagaaagatgcagcgacagcgatgaggaaaagaaagcgagaagaggcagatctcccaaaggtgaattcaaagatgaagaggagactgtgacgacaaagcatattcatatcacacaggccacagagaccaccacaaccagacacaagcgcacagcaaatccttccaaaaccattgatcttggagcagcagcacattacacaggggacaaagcaagtccagatcagaatgcttcaacccacacacctcagtcttcagttaagacttcagtgcctagcagcaagtcatctggtgaccttgttgatctgtttgatggcaccagccagtcaacaggaggatcagctgatttattcggaggatttgctgactttggctcagctgctgcatcaggcagtttcccttcccaagtaacagcaacaagtgggaatggagactttggtgactggagtgccttcaaccaagccccatcaggccctgttgcttccagtggcgagttctttggcagtgcctcacagccagcggtagaacttgttagtggctcacaatcagctctaggcccacctcctgctgcctcaaattcttcagacctgtttgatcttatgggctcgtcccaggcaaccatgacatcttcccagagtatgaatttctctatgatgagcactaacactgtgggacttggtttgcctatgtcaagatcacagcctttgcaaaatgttagcacagtgctgcagaagcctaatcctctctataatcagaatacagatatggtccagaaatcagtcagcaaaaccttgccctctacttggtctgaccccagtgtaaacatcagcctagacaacttactacctggtatgcagccttccaaaccccagcagccatcactgaatacaatgattcagcaacagaatatgcagcagcctatgaatgtgatgactcaaagttttggagctgtgaacctcagttctccatcgaacatgcttcctgtccggccccaaactaatgctttgatagggggacccatgcctatgagcatgcccaatgtgatgactggcaccatgggaatggcccctcttggaaatactccgatgatgaaccagagcatgatgggcatgaacatgaacatagggatgtccgctgctgggatgggcttgacaggcacaatgggaatgggcatgcccaacatagccatgacttctggaactgtgcaacccaagcaagatgcctttgcaaatttcgccaattttagcaaataagagattgtaaaagaagcagattgaatgaagaatttttagctgtgcagataggtgatgttgggatggaaaatgctaatcaactaccctttcttttatcaagtaattaaaataaatctacat

SEQ ID NO: 415094 - DNA, 1371 bp, Homo sapiens
agcgcctgtgctgccgcgtctcgacgtgtcaccggcggcgccgctgctgtggcaaaggaaggagctgactgggggagttcgaggcggcgggcggcggtgaccccggcctggaactgccccggtacggaagtgttccggggtccgtggggagcaggagagggaggcggcggaccgtcccgcgcggggcacgatgttgaacatgtggaaggtgcgcgagctggtggacaaagccaccaatgttgttatgaattattcagagatcgagtctaaggttcgagaggcaacgaacgatgatccttggggaccttctgggcaactcatgggagagattgccaaggctacatttatgtatgaacaatttccagaacttatgaacatgctttggtcacgaatgttaaaagacaacaaaaagaattggagaagagtttataagtcgttgctgctcctagcttacctcataaggaatggatcagagcgtgttgttacaagtgccagagaacacatttatgatttacgatccctggaaaattaccactttgtagatgagcatggtaaggatcaaggtataaatattcgacagaaggtgaaggaattggttgaatttgcccaggatgacgacaggcttcgtgaagagcgaaagaaagcaaagaagaacaaagacaagtatgttggggtttcctcagacagtgttggaggattcagatacagtgaaagatatgatcctgagcccaaatcaaaatgggatgaggagtgggataaaaacaagagtgcttttccattcagtgataaattaggtgagctgagtgataaaattggaagcacaattgatgacaccatcagcaagttccggaggaaagatagagaagactctccagaaagatgcagcgacagcgatgaggaaaagaaagcgagaagaggcagatctcccaaaggtgaattcaaagatgaagaggagactgtgacgacaaagcatattcatatcacacaggccacagagaccaccacaaccagacacaagcgcacagcaaatccttccaaaaccattgatcttggagcagcagcacattacacaggggacaaagccaggtccaattaaaatggttttaaccaaaaaccctaaagttataattaaaactcaggggcttacaacaagtattttgggaacctttttatcctgtttatgggccccgccatcaacaagggggttccctgtttttttggggggttggctgatttgggcaaagggtgaaaaaagagttttcctttccaggacaacaacaaaggggaagggaattttgggacggaggggctttaaaaaacccaataggccttggttttccagggaagattttggagggcccaaaccccggg

SEQ ID NO: 415095 - DNA, 600 bp, Homo sapiens
agcgcctgtgctgccgcgtctcgacgtgtcaccggcggcgccgctgctgtggcaaaggaaggagctgactgggggagttcgaggcggcgggcggcggtgaccccggcctggaactgccccggtacggaagtgttccggggtccgtggggagcaggagagggaggcggcggaccgtcccgcgcggggcacgatgttgaacatgtggaaggtgcgcgagctggtggacaaagccaccaatgttgttatgaattattcagagatcgagtctaaggttcgagaggcaacgaacgatgatccttggggaccttctgggcaactcatgggagagattgccaaggctacatttatgtatgaacaatttccagaacttatgaacatgctttggtcacgaatgttaaaagacaacaaaaagaattggagaagagtttataagtcgttgctgctcctagcttacctcataaggaatggatcagagcgtgttgttacaagtgccagagaacacatttatgatttacgatccctggaaaattaccactttgtagatgtgcatatgatagtgtcacggtatatatatatggcagagggtgttagggatttgtg

SEQ ID NO: 415096 - DNA, 256 bp, Homo sapiens
ccttccaaaccccagcagccatcactgaatacaatgattcagcaacagagtaagttaccttaagacgtcccacttctttgtgtacttgcagtcttttgccttaatgccaggactacttcaaactataaataaaaatatatcacataaattgtaacagttaaccaaatgcctgttcacttaagatattttcacataatatttactgggtattcctcctggcacattgaattactttatattctattcttgtcctgat

SEQ ID NO: 415097 - DNA, 3426 bp, Homo sapiens
agcgcctgtgctgccgcgtctcgacgtgtcaccggcggcgccgctgctgtggcaaaggaaggagctgactgggggagttcgaggcggcgggcggcggtgaccccggcctggaactgccccggtacggaagtgttccggggtccgtggggagcaggagagggaggcggcggaccgtcccgcgcggggcacgatgttgaacatgtggaaggtgcgcgagctggtggacaaagccaccaatgttgttatgaattattcagagatcgagtctaaggttcgagaggcaacgaacgatgatccttggggaccttctgggcaactcatgggagagattgccaaggctacatttatgtatgaacaatttccagaacttatgaacatgctttggtcacgaatgttaaaagacaacaaaaagaattggagaagagtttataagtcgttgctgctcctagcttacctcataaggaatggatcagagcgtgttgttacaagtgccagagaacacatttatgatttacgatccctggaaaattaccactttgtagatgagcatggtaaggatcaaggtataaatattcgacagaaggtgaaggaattggttgaatttgcccaggatgacgacaggcttcgtgaagagcgaaagaaagcaaagaagaacaaagacaagtatgttggggtttcctcagacagtgttggaggattcagatacagtgaaagatatgatcctgagcccaaatcaaaatgggatgaggagtgggataaaaacaagagtgcttttccattcagtgataaattaggtgagctgagtgataaaattggaagcacaattgatgacaccatcagcaagttccggaggaaagatagagaagactctccagaaagatgcagcgacagcgatgaggaaaagaaagcgagaagaggcagatctcccaaaggtgaattcaaagatgaagaggagactgtgacgacaaagcatattcatatcacacaggccacagagaccaccacaaccagacacaagcgcacagcaaatccttccaaaaccattgatcttggagcagcagcacattacacaggggacaaagcaagtccagatcagaatgcttcaacccacacacctcagtcttcagttaagacttcagtgcctagcagcaagtcatctggtgaccttgttgatctgtttgatggcaccagccagtcaacaggaggatcagctgatttattcggaggatttgctgactttggctcagctgctgcatcaggcagtttcccttcccaagtaacagcaacaagtgggaatggagactttggtgactggagtgccttcaaccaagccccatcaggccctgttgcttccagtggcgagttctttggcagtgcctcacagccagcggtagaacttgttagtggctcacaatcagctctaggcccacctcctgctgcctcaaattcttcagacctgtttgatcttatgggctcgtcccaggcaaccatgacatcttcccagagtatgaatttctctatgatgagcactaacactgtgggacttggtttgcctatgtcaagatcacagaatacagatatggtccagaaatcagtcagcaaaaccttgccctctacttggtctgaccccagtgtaaacatcagcctagacaacttactacctggtatgcagccttccaaaccccagcagccatcactgaatacaatgattcagcaacagaatatgcagcagcctatgaatgtgatgactcaaagttttggagctgtgaacctcagttctccatcgaacatgcttcctgtccggccccaaactaatgctttgatagggggacccatgcctatgagcatgcccaatgtgatgactggcaccatgggaatggcccctcttggaaatactccgatgatgaaccagagcatgatgggcatgaacatgaacatagggatgtccgctgctgggatgggcttgacaggcacaatgggaatgggcatgcccaacatagccatgacttctggaactgtgcaacccaagcaagatgcctttgcaaatttcgccaattttagcaaataagagattgtaaaagaagcagattgaatgaagaatttttagctgtgcagataggtgatgttgggatggaaaatgctaatcaactaccctttcttttatcaagtaattaaaataaatctacataaagaaccaaaaaggctgttttataaaagtgaaatatccagtatttcagagggccaggcaagagcacttcagatgaggcagtcaaaatcatttttttccagtgaggatagaccacaagtgggtggtgagaccattgaaagcctttatcaactgaagagtccatttaacagcataatttgtgggaagactggaatagggctgaataaatgtgtttgaatctctaattttatactttcttttcctgaggaacttgatttttctgtccctggatcgccttgtcataattgggtctgttccttttactaccactcttgagtccatatatgaaatcattaaagttggatgatcagttttttataaaaatatatatttttgtccaagaaaaaaaaaagcatacatatgtgattatggctaaatcaaaggtaactggaatgtatatacttttgctaatgttccagcaacactgctattatactatccaaatttttattgtaacaaaacctctttaagcaattggtgattgccatgggacttttcccatgtcttctgctgtaattatcctgtgcagaactaggaagaaatttttttcaggactgctctatggtttcctttaaaagaaaaaaacttctgtttgtttttagcagtcattatttacaatttgcagtgattaacttggcaaggcttccttccgtgtttatccctgtagccatcatttaagtcaggaacagtcagaaaaatatttattttattttttttttgggtgtctgcaaaggtaaaaatccattaaaaccttaagttaaatataaatgttacaactcaatgtttgcttttagattttatacagtatttgttttgttttggttttgagtgtatataatgcagcattagcaatatggttccaatagaggagttaaatatatattgttaaaggagacctgtagcagtcaaagattttattgatttaatgacaaaggaaattaatgaaaatgtttttgtttttctgctgtaattctgcattaagctcacatgaaaatcatgattctagagtttggaatgcaaaattaattgttttaccctcaagctgggaatatttttcaaaataaatactataatatagatatcaaattattacctccccatgttatgttgaaaatttttttattaaattgataaaactttatttccattatattcataatgttctgttatacataacattaaaatgttcattaaaatca

SEQ ID NO: 415098 - DNA, 3377 bp, Homo sapiens
agcgcctgtgctgccgcgtctcgacgtgtcaccggcggcgccgctgctgtggcaaaggaaggagctgactgggggagttcgaggcggcgggcggcggtgaccccggcctggaactgccccggtacggaagtgttccggggtccgtggggagcaggagagggaggcggcggaccgtcccgcgcggggcacgatgttgaacatgtggaaggtgcgcgagctggtggacaaagccaccaatgttgttatgaattattcagagatcgagtctaaggttcgagaggcaacgaacgatgatccttggggaccttctgggcaactcatgggagagattgccaaggctacatttatgtatgaacaatttccagaacttatgaacatgctttggtcacgaatgttaaaagacaacaaaaagaattggagaagagtttataagtcgttgctgctcctagcttacctcataaggaatggatcagagcgtgttgttacaagtgccagagaacacatttatgatttacgatccctggaaaattaccactttgtagatgagcatggtaaggatcaaggtataaatattcgacagaaggtgaaggaattggttgaatttgcccaggatgacgacaggcttcgtgaagagcgaaagaaagcaaagaagaacaaagacaagtatgttggggtttcctcagacagtgttggaggattcagatacagtgaaagatatgatcctgagcccaaatcaaaatgggatgaggagtgggataaaaacaagagtgcttttccattcagtgataaattaggtgagctgagtgataaaattggaagcacaattgatgacaccatcagcaagttccggaggaaagatagagaagactctccagaaagatgcagcgacagcgatgaggaaaagaaagcgagaagaggcagatctcccaaaggtgaattcaaagatgaagaggagactgtgacgacaaagcatattcatatcacacaggccacagagaccaccacaaccagacacaagcgcacagcaaatccttaagtccagatcagaatgcttcaacccacacacctcagtcttcagttaagacttcagtgcctagcagcaagtcatctggtgaccttgttgatctgtttgatggcaccagccagtcaacaggaggatcagctgatttattcggaggatttgctgactttggctcagctgctgcatcaggcagtttcccttcccaagtaacagcaacaagtgggaatggagactttggtgactggagtgccttcaaccaagccccatcaggccctgttgcttccagtggcgagttctttggcagtgcctcacagccagcggtagaacttgttagtggctcacaatcagctctaggcccacctcctgctgcctcaaattcttcagacctgtttgatcttatgggctcgtcccaggcaaccatgacatcttcccagagtatgaatttctctatgatgagcactaacactgtgggacttggtttgcctatgtcaagatcacagaatacagatatggtccagaaatcagtcagcaaaaccttgccctctacttggtctgaccccagtgtaaacatcagcctagacaacttactacctggtatgcagccttccaaaccccagcagccatcactgaatacaatgattcagcaacagaatatgcagcagcctatgaatgtgatgactcaaagttttggagctgtgaacctcagttctccatcgaacatgcttcctgtccggccccaaactaatgctttgatagggggacccatgcctatgagcatgcccaatgtgatgactggcaccatgggaatggcccctcttggaaatactccgatgatgaaccagagcatgatgggcatgaacatgaacatagggatgtccgctgctgggatgggcttgacaggcacaatgggaatgggcatgcccaacatagccatgacttctggaactgtgcaacccaagcaagatgcctttgcaaatttcgccaattttagcaaataagagattgtaaaagaagcagattgaatgaagaatttttagctgtgcagataggtgatgttgggatggaaaatgctaatcaactaccctttcttttatcaagtaattaaaataaatctacataaagaaccaaaaaggctgttttataaaagtgaaatatccagtatttcagagggccaggcaagagcacttcagatgaggcagtcaaaatcatttttttccagtgaggatagaccacaagtgggtggtgagaccattgaaagcctttatcaactgaagagtccatttaacagcataatttgtgggaagactggaatagggctgaataaatgtgtttgaatctctaattttatactttcttttcctgaggaacttgatttttctgtccctggatcgccttgtcataattgggtctgttccttttactaccactcttgagtccatatatgaaatcattaaagttggatgatcagttttttataaaaatatatatttttgtccaagaaaaaaaaaagcatacatatgtgattatggctaaatcaaaggtaactggaatgtatatacttttgctaatgttccagcaacactgctattatactatccaaatttttattgtaacaaaacctctttaagcaattggtgattgccatgggacttttcccatgtcttctgctgtaattatcctgtgcagaactaggaagaaatttttttcaggactgctctatggtttcctttaaaagaaaaaaacttctgtttgtttttagcagtcattatttacaatttgcagtgattaacttggcaaggcttccttccgtgtttatccctgtagccatcatttaagtcaggaacagtcagaaaaatatttattttattttttttttgggtgtctgcaaaggtaaaaatccattaaaaccttaagttaaatataaatgttacaactcaatgtttgcttttagattttatacagtatttgttttgttttggttttgagtgtatataatgcagcattagcaatatggttccaatagaggagttaaatatatattgttaaaggagacctgtagcagtcaaagattttattgatttaatgacaaaggaaattaatgaaaatgtttttgtttttctgctgtaattctgcattaagctcacatgaaaatcatgattctagagtttggaatgcaaaattaattgttttaccctcaagctgggaatatttttcaaaataaatactataatatagatatcaaattattacctccccatgttatgttgaaaatttttttattaaattgataaaactttatttccattatattcataatgttctgttatacataacattaaaatgttcattaaaatca

SEQ ID NO: 415099 - DNA, 3351 bp, Homo sapiens
agcgcctgtgctgccgcgtctcgacgtgtcaccggcggcgccgctgctgtggcaaaggaaggagctgactgggggagttcgaggcggcgggcggcggtgaccccggcctggaactgccccggtacggaagtgttccggggtccgtggggagcaggagagggaggcggcggaccgtcccgcgcggggcacgatgttgaacatgtggaaggtgcgcgagctggtggacaaagccaccaatgttgttatgaattattcagagatcgagtctaaggttcgagaggcaacgaacgatgatccttggggaccttctgggcaactcatgggagagattgccaaggctacatttatgtatgaacaatttccagaacttatgaacatgctttggtcacgaatgttaaaagacaacaaaaagaattggagaagagtttataagtcgttgctgctcctagcttacctcataaggaatggatcagagcgtgttgttacaagtgccagagaacacatttatgatttacgatccctggaaaattaccactttgtagatgagcatggtaaggatcaaggtataaatattcgacagaaggtgaaggaattggttgaatttgcccaggatgacgacaggcttcgtgaagagcgaaagaaagcaaagaagaacaaagacaagtatgttggggtttcctcagacagtgttggaggattcagatacagtgaaagatatgatcctgagcccaaatcaaaatgggatgaggagtgggataaaaacaagagtgcttttccattcagtgataaattaggtgagctgagtgataaaattggaagcacaattgatgacaccatcagcaagttccggaggaaagatagagaagactctccagaaagatgcagcgacagcgatgaggaaaagaaagcgagaagaggcagatctcccaaaggtgaattcaaagatgaagaggagactgtgacgacaaagcatattcatatcacacaggccacagagaccaccacaaccagacacaagcgcacagcaaatccttccaaaaccattgatcttggagcagcagcacattacacaggggacaaagcaagtccagatcagaatgcttcaacccacacacctcagtcttcagttaagacttcagtgcctagcagcaagtcatctggtgaccttgttgatctgtttgatggcaccagccagtcaacagtaacagcaacaagtgggaatggagactttggtgactggagtgccttcaaccaagccccatcaggccctgttgcttccagtggcgagttctttggcagtgcctcacagccagcggtagaacttgttagtggctcacaatcagctctaggcccacctcctgctgcctcaaattcttcagacctgtttgatcttatgggctcgtcccaggcaaccatgacatcttcccagagtatgaatttctctatgatgagcactaacactgtgggacttggtttgcctatgtcaagatcacagaatacagatatggtccagaaatcagtcagcaaaaccttgccctctacttggtctgaccccagtgtaaacatcagcctagacaacttactacctggtatgcagccttccaaaccccagcagccatcactgaatacaatgattcagcaacagaatatgcagcagcctatgaatgtgatgactcaaagttttggagctgtgaacctcagttctccatcgaacatgcttcctgtccggccccaaactaatgctttgatagggggacccatgcctatgagcatgcccaatgtgatgactggcaccatgggaatggcccctcttggaaatactccgatgatgaaccagagcatgatgggcatgaacatgaacatagggatgtccgctgctgggatgggcttgacaggcacaatgggaatgggcatgcccaacatagccatgacttctggaactgtgcaacccaagcaagatgcctttgcaaatttcgccaattttagcaaataagagattgtaaaagaagcagattgaatgaagaatttttagctgtgcagataggtgatgttgggatggaaaatgctaatcaactaccctttcttttatcaagtaattaaaataaatctacataaagaaccaaaaaggctgttttataaaagtgaaatatccagtatttcagagggccaggcaagagcacttcagatgaggcagtcaaaatcatttttttccagtgaggatagaccacaagtgggtggtgagaccattgaaagcctttatcaactgaagagtccatttaacagcataatttgtgggaagactggaatagggctgaataaatgtgtttgaatctctaattttatactttcttttcctgaggaacttgatttttctgtccctggatcgccttgtcataattgggtctgttccttttactaccactcttgagtccatatatgaaatcattaaagttggatgatcagttttttataaaaatatatatttttgtccaagaaaaaaaaaagcatacatatgtgattatggctaaatcaaaggtaactggaatgtatatacttttgctaatgttccagcaacactgctattatactatccaaatttttattgtaacaaaacctctttaagcaattggtgattgccatgggacttttcccatgtcttctgctgtaattatcctgtgcagaactaggaagaaatttttttcaggactgctctatggtttcctttaaaagaaaaaaacttctgtttgtttttagcagtcattatttacaatttgcagtgattaacttggcaaggcttccttccgtgtttatccctgtagccatcatttaagtcaggaacagtcagaaaaatatttattttattttttttttgggtgtctgcaaaggtaaaaatccattaaaaccttaagttaaatataaatgttacaactcaatgtttgcttttagattttatacagtatttgttttgttttggttttgagtgtatataatgcagcattagcaatatggttccaatagaggagttaaatatatattgttaaaggagacctgtagcagtcaaagattttattgatttaatgacaaaggaaattaatgaaaatgtttttgtttttctgctgtaattctgcattaagctcacatgaaaatcatgattctagagtttggaatgcaaaattaattgttttaccctcaagctgggaatatttttcaaaataaatactataatatagatatcaaattattacctccccatgttatgttgaaaatttttttattaaattgataaaactttatttccattatattcataatgttctgttatacataacattaaaatgttcattaaaatca

SEQ ID NO: 415100 - DNA, 2611 bp, Homo sapiens
  misc_feature (23)..(23): n is a, c, g, or t
  misc_feature (25)..(25): n is a, c, g, or t
  misc_feature (27)..(27): n is a, c, g, or t
ttaccgaccggaagcagactgcncnanacataaacgcagactacattaagaagtgataagcacagtggagcgacagcgatgaggaaaagaaagcgagaagaggcagatctcccaaaggtgaattcaaagatgaagaggagactgtgacgacaaagcatattcatatcacacaggccacagagaccaccacaaccagacacaagcgcacagcaaatccttccaaaaccattgatcttggagcagcagcacattacacaggggacaaagcaagtccagatcagaatgcttcaacccacacacctcagtcttcagttaagacttcagtgcctagcagcaagtcatctggtgaccttgttgatctgtttgatggcaccagccagtcaacaggaggatcagctgatttattcggaggatttgctgactttggctcagctgctgcatcaggcagtttcccttcccaagtaacagcaacaagtgggaatggagactttggtgactggagtgccttcaaccaagccccatcaggccctgttgcttccagtggcgagttctttggcagtgcctcacagccagcggtagaacttgttagtggctcacaatcagctctaggcccacctcctgctgcctcaaattcttcagacctgtttgatcttatgggctcgtcccaggcaaccatgacatcttcccagagtatgaatttctctatgatgagcactaacactgtgggacttggtttgcctatgtcaagatcacagaatacagatatggtccagaaatcagtcagcaaaaccttgccctctacttggtctgaccccagtgtaaacatcagcctagacaacttactacctggtatgcagccttccaaaccccagcagccatcactgaatacaatgattcagcaacagaatatgcagcagcctatgaatgtgatgactcaaagttttggagctgtgaacctcagttctccatcgaacatgcttcctgtccggccccaaactaatgctttgatagggggacccatgcctatgagcatgcccaatgtgatgactggcaccatgggaatggcccctcttggaaatactccgatgatgaaccagagcatgatgggcatgaacatgaacatagggatgtccgctgctgggatgggcttgacaggcacaatgggaatgggcatgcccaacatagccatgacttctggaactgtgcaacccaagcaagatgcctttgcaaatttcgccaattttagcaaataagagattgtaaaagaagcagattgaatgaagaatttttagctgtgcagataggtgatgttgggatggaaaatgctaatcaactaccctttcttttatcaagtaattaaaataaatctacataaagaaccaaaaaggctgttttataaaagtgaaatatccagtatttcagagggccaggcaagagcacttcagatgaggcagtcaaaatcatttttttccagtgaggatagaccacaagtgggtggtgagaccattgaaagcctttatcaactgaagagtccatttaacagcataatttgtgggaagactggaatagggctgaataaatgtgtttgaatctctaattttatactttcttttcctgaggaacttgatttttctgtccctggatcgccttgtcataattgggtctgttccttttactaccactcttgagtccatatatgaaatcattaaagttggatgatcagttttttataaaaatatatatttttgtccaagaaaaaaaaaagcatacatatgtgattatggctaaatcaaaggtaactggaatgtatatacttttgctaatgttccagcaacactgctattatactatccaaatttttattgtaacaaaacctctttaagcaattggtgattgccatgggacttttcccatgtcttctgctgtaattatcctgtgcagaactaggaagaaatttttttcaggactgctctatggtttcctttaaaagaaaaaaacttctgtttgtttttagcagtcattatttacaatttgcagtgattaacttggcaaggcttccttccgtgtttatccctgtagccatcatttaagtcaggaacagtcagaaaaatatttattttattttttttttgggtgtctgcaaaggtaaaaatccattaaaaccttaagttaaatataaatgttacaactcaatgtttgcttttagattttatacagtatttgttttgttttggttttgagtgtatataatgcagcattagcaatatggttccaatagaggagttaaatatatattgttaaaggagacctgtagcagtcaaagattttattgatttaatgacaaaggaaattaatgaaaatgtttttgtttttctgctgtaattctgcattaagctcacatgaaaatcatgattctagagtttggaatgcaaaattaattgttttaccctcaagctgggaatatttttcaaaataaatactataatatagatatcaaattattacctccccatgttatgttgaaaatttttttattaaattgataaaactttatttccattatattcataatgttctgttatacataacattaaaatgttcattaaaatca

SEQ ID NO: 415101 - DNA, 1568 bp, Homo sapiens
attgtgcctgtcaagcccatcccagcagcggacatccctatgttcatgttcatgcccatcatgctctggttcatcatcggagtatttccaagaggggccattcccatggtgccagtcatcacattgggcatgcccaacatagccatgacttctggaactgtgcaacccaagcaagatgcctttgcaaatttcgccaattttagcaaataagagattgtaaaagaagcagattgaatgaagaatttttagctgtgcagataggtgatgttgggatggaaaatgctaatcaactaccctttcttttatcaagtaattaaaataaatctacataaagaaccaaaaaggctgttttataaaagtgaaatatccagtatttcagagggccaggcaagagcacttcagatgaggcagtcaaaatcatttttttccagtgaggatagaccacaagtgggtggtgagaccattgaaagcctttatcaactgaagagtccatttaacagcataatttgtgggaagactggaatagggctgaataaatgtgtttgaatctctaattttatactttcttttcctgaggaacttgatttttctgtccctggatcgccttgtcataattgggtctgttccttttactaccactcttgagtccatatatgaaatcattaaagttggatgatcagttttttataaaaatatatatttttgtccaagaaaaaaaaaagcatacatatgtgattatggctaaatcaaaggtaactggaatgtatatacttttgctaatgttccagcaacactgctattatactatccaaatttttattgtaacaaaacctctttaagcaattggtgattgccatgggacttttcccatgtcttctgctgtaattatcctgtgcagaactaggaagaaatttttttcaggactgctctatggtttcctttaaaagaaaaaaacttctgtttgtttttagcagtcattatttacaatttgcagtgattaacttggcaaggcttccttccgtgtttatccctgtagccatcatttaagtcaggaacagtcagaaaaatatttattttattttttttttgggtgtctgcaaaggtaaaaatccattaaaaccttaagttaaatataaatgttacaactcaatgtttgcttttagattttatacagtatttgttttgttttggttttgagtgtatataatgcagcattagcaatatggttccaatagaggagttaaatatatattgttaaaggagacctgtagcagtcaaagattttattgatttaatgacaaaggaaattaatgaaaatgtttttgtttttctgctgtaattctgcattaagctcacatgaaaatcatgattctagagtttggaatgcaaaattaattgttttaccctcaagctgggaatatttttcaaaataaatactataatatagatatcaaattattacctccccatgttatgttgaaaatttttttattaaattgataaaactttatttccattatattcataatgttctgttatacataacattaaaatgttcattaaaatca

SEQ ID NO: 415102 - DNA, 1658 bp, Homo sapiens
agcgcctgtgctgccgcgtctcgacgtgtcaccggcggcgccgctgctgtggcaaaggaaggagctgactgggggagttcgaggcggcgggcggcggtgaccccggcctggaactgccccggtacggaagtgttccggggtccgtggggagcaggagagggaggcggcggaccgtcccgcgcggggcacgatgttgaacatgtggaaggtgcgcgagctggtggacaaagccaccaatgttgttatgaattattcagagatcgagtctaaggttcgagaggcaacgaacgatgatccttggggaccttctgggcaactcatgggagagattgccaaggctacatttatgtatgaacaatttccagaacttatgaacatgctttggtcacgaatgttaaaagacaacaaaaagaattggagaagagtttataagtcgttgctgctcctagcttacctcataaggaatggatcagagcgtgttgttacaagtgccagagaacacatttatgatttacgatccctggaaaattaccactttgtagatgagcatggtaaggatcaaggtataaatattcgacagaaggtgaaggaattggttgaatttgcccaggatgacgacaggcttcgtgaagagcgaaagaaagcaaagaagaacaaagacaagtatgttggggtttcctcagacagtgttggaggattcagatacagtgaaagatatgatcctgagcccaaatcaaaatgggatgaggagtgggataaaaacaagagtgcttttccattcagtgataaattaggtgagctgagtgataaaattggaagcacaattgatgacaccatcagcaagttccggaggaaagatagagaagactctccagaaagatgcagcgacagcgatgaggaaaagaaagcgagaagaggcagatctcccaaaggtgaattcaaagatgaagaggagactgtgacgacaaagcatattcatatcacacaggccacagagaccaccacaaccagacacaagcgcacagcaaatccttccaaaaccattgatcttggagcagcagcacattacacaggggacaaagcaagtccagatcagaatgcttcaacccacacacctcagtcttcagttaagacttcagtgcctagcagcaagtcatctggtgaccttgttgatctgtttgatggcaccagccagtcaacaggaggatcagctgatttattcggaggatttgctgactttggctcagctgctgcatcaggcagtttcccttcccaagtaacagcaacaagtgggaatggagactttggtgactggagtgccttcaaccaagccccatcaggccctgttgcttccagtggcgagttctttggcagtgcctcacagccagcggtagaacttgttagtggctcacaatcagctctaggcccacctcctgctgcctcaaattcttcagacctgtttgatcttatgggctcgtcccaggcaaccatgacatcttcccagagtatgaatttctctatgatgagcactaacactgtgggacttggtttgcctatgtcaagatcacaggtaagttgtctggttcccttggaatttgttatttataatctttgagatgctctaactcattgaatgatagattagtataaaacagaaa

SEQ ID NO: 415103 - DNA, 2057 bp, Homo sapiens
cgccgcggccggcgcgcgctcccgggaggcggcagcggctgcagcgttggtagcatcagcatcagcatcagcggcagcggcagcggcctcgggcggggccggccggacggacaggcggacagaaggcgccagggcgcgcgtcccgcccgggccggccatggagggcgcctccttcggcgcgggccgcgcaggggccgccctggaccccgtgagctttgcgcggcggccccagaccctgctccgggtcgcgtcctgggtgttctccatcgccgtcttcgggcccatcgtcaacgagggctacgtgaacaccgacagcggccccgagctgcgctgcgtgttcaacgggaacgcgggcgcctgccgcttcggcgtcgcgctgggcctcggagccttcctcgcctgcgccgccttcctgctgctcgatgtgcgcttccagcaaatcagcagcgtccgcgaccgccggcgcgcggtgttgctggacctgggcttctcaggactctggtccttcctgtggttcgtgggcttctgcttcctcaccaatcagtggcagcgcacggcgccagggccggccacgacgcaggcgggggacgcggcgcgggccgccatcgccttcagcttcttctccatcctcagctgggtggcgctcaccgtgaaggccctgcagcggttccgcctgggcaccgacatgtcactcttcgccaccgaacagctgagcaccggggcgagccaggcctaccccggctatccggtgggcagcggcgtggagggcaccgagacctaccagagcccgcccttcaccgagaccctggacaccagccccaaagggtaccaggtgcccgcctactagcggctggcaggcacagaccagggctccaaggccaccccaccaacgcaggccccagggtctccgggacctcccttgggtccttccagctcagtgccgcggacagagtaggtggccgctttgcgccatccggggccaagagggggtggacccgcgtgtctgggctgcccctgccaagttcccccagtccctcagcacctggccccaggactgaggtcctgagaaggggatagcactgcccaggacgtgtgtccctagcctggaatggactggcctggggaaggctttcccctcttgggccacacctgctcactctggggttgggggtccagctgccctctacgatcaggtgcaggggctgcccaggacaaagcgggggcaggggaaagacaccaccctcgccccaagactggggatcctggccactgttcccatcccatgtccctgtgggtagtgactgtctcgtttctgtcatggtggtgcgtcccgtccggagccactctccactttctctcacaggctgctagaacagcccagccctgtcagtgttgtgatcatggtccagtcttcgggtttcacctcctagtactccacaagctgctcctctctctgtggccccggcccctgcccaggtgtgggtggttctggccaggaaggcacaaggtagctgtgggccaagacaccagccctgtcctagcccttcagtaagaccttgccaggagaggagaaggatgcctgggtgccaggcaagacaagcccctcagcaggagagaggcccagaggctccagctggccaccgtgccccacaagatggcccctgtgtggttccctttaccttggcttcctggcccagtccctgcctctccacctgcaccctgcttcctggcccagtcccaggttggagtccctctgcatagctgactactcatgcattgctcaaagctggcttttcacattaagtcaacaccaaacgtggttgccacatttcatcagacagacacctccctctggagatgcagttgagtgacaaccttgttacattgtagcctagaccaattctgtgtggatatttaagtgaacatgtttacaatttttgtatatatcactctctccctctcctgaaagaccagagattgtgtattttcagtgtcccatgttccgactgcaccttctttacaataaagactgtaactgagctgactgtgaaatggac

SEQ ID NO: 415104 - DNA, 1741 bp, Homo sapiens
ggtctggcgctcccgggtgggcggggtcagcgcaggagagggaggcgggacctcgcgccacgcggcgagcccaggcgaggcgccccaagcctcgggcccaccgacctttcctcctccgggcgaggccgccgtgggccaccgcgtggagcgtcgccctgacgcgccgcactgttcgcaggactctggtccttcctgtggttcgtgggcttctgcttcctcaccaatcagtggcagcgcacggcgccagggccggccacgacgcaggcgggggacgcggcgcgggccgccatcgccttcagcttcttctccatcctcagctgggtggcgctcaccgtgaaggccctgcagcggttccgcctgggcaccgacatgtcactcttcgccaccgaacagctgagcaccggggcgagccaggcctaccccggctatccggtgggcagcggcgtggagggcaccgagacctaccagagcccgcccttcaccgagaccctggacaccagccccaaagggtaccaggtgcccgcctactagcggctggcaggcacagaccagggctccaaggccaccccaccaacgcaggccccagggtctccgggacctcccttgggtccttccagctcagtgccgcggacagagtaggtggccgctttgcgccatccggggccaagagggggtggacccgcgtgtctgggctgcccctgccaagttcccccagtccctcagcacctggccccaggactgaggtcctgagaaggggatagcactgcccaggacgtgtgtccctagcctggaatggactggcctggggaaggctttcccctcttgggccacacctgctcactctggggttgggggtccagctgccctctacgatcaggtgcaggggctgcccaggacaaagcgggggcaggggaaagacaccaccctcgccccaagactggggatcctggccactgttcccatcccatgtccctgtgggtagtgactgtctcgtttctgtcatggtggtgcgtcccgtccggagccactctccactttctctcacaggctgctagaacagcccagccctgtcagtgttgtgatcatggtccagtcttcgggtttcacctcctagtactccacaagctgctcctctctctgtggccccggcccctgcccaggtgtgggtggttctggccaggaaggcacaaggtagctgtgggccaagacaccagccctgtcctagcccttcagtaagaccttgccaggagaggagaaggatgcctgggtgccaggcaagacaagcccctcagcaggagagaggcccagaggctccagctggccaccgtgccccacaagatggcccctgtgtggttccctttaccttggcttcctggcccagtccctgcctctccacctgcaccctgcttcctggcccagtcccaggttggagtccctctgcatagctgactactcatgcattgctcaaagctggcttttcacattaagtcaacaccaaacgtggttgccacatttcatcagacagacacctccctctggagatgcagttgagtgacaaccttgttacattgtagcctagaccaattctgtgtggatatttaagtgaacatgtttacaatttttgtatatatcactctctccctctcctgaaagaccagagattgtgtattttcagtgtcccatgttccgactgcaccttctttacaataaagactgtaactgagctgactgtgaaatggac

SEQ ID NO: 415105 - DNA, 258 bp, Homo sapiens
tgtagtaggctggcagttaaaggtgccagatgtgagccaggctgctgggtttgaatcctggagctgcctcatagcagcagtaggactttgggtaacttacataggtgctgtatgcctcagtgacctcatctgtaatatagagatgataagagtacctgtctcattggtctactgagttgtccggattaactcattaaatgagttaaaactcatgaagcccttggaactgtgactgacacatagtaagtactcaataaa

SEQ ID NO: 415106 - DNA, 814 bp, Homo sapiens
ttatttcaggaaggatagtgaccctttccttgaactgttagaagggcatttattaggctaaaacgtcattaacaaaatgcattgcatgttgaaaccagcctcttgaaccataagcacttagcgactttgctctgccctgtactgtgctgcttctgctgtcatcctgtgtgcctacagaagcctggtcttccgtccatgcagaaatgcttatgtcctcctgttgtttagatgactcctattgttcaggtgtactctgagaagagaatcacgtttttctgttttgctaaggagaaaaccttgctgcttgtctctcctcccaccctccaccatccaaaattaaccagtgagctggatattacctggatattgccaggaggtgggcattaagacagtattctttaaaagtgaaaatcttgtgaggcaaactgctaaattcacatttttgtttttttttttttaccatcttccctaggaatattcctagaaagcatctgcttaattttgctgctaacagctaaccttatcccacgttgagggtggtattaaaactgttcacacagagtgagcctgggtcagtcaaaaacagaatttgggcatttgagtgataacagacaacctaaggacaatgagcactttgcagatctctacaattaaaagttgcctctttgaggcaggaggggagaagcacagtccctgccaggttgcctgaactaaagatgccatggagcaggagtgtcttggtgcattgttccccgcttaggagtacctttaaaaagggggtgaaataaatttggcttaataattgtaaaaaaac

SEQ ID NO: 415107 - DNA, 623 bp, Homo sapiens
  misc_feature (618)..(618): n is a, c, g, or t
  misc_feature (621)..(622): n is a, c, g, or t
aatctcagtatttttataaattgtaaagttattttccgtatctcttggacataatggtatttttgtgactgtgatattttgtcattttattttcttctctcacagcgtcagtggaggtcagcaggaggtccctgcaggcttgcactgccctgctggttatcactgctggtgactcatgcagccagcctgctgatgccctgagctggcctgttcagcttggtgtccagagggctctgctgtgggcccggggggagggaaccacgcaccttcctctgtggaactgtggctgctttcccccttcctcatcctgttcttcatctgccccagcctgtgaagggaactcctcgtgcctgggcaggcttatgggtgccgggaggctggggagctggctcacgctctgagtgggcttccctggccagtcctgtgccccatcaccagcctcgctctgtggtctttgccctggtgcactgggcggtaccacttcaccacgtctttcagtggtccttccgtgtgttccaaagcttctggatttcaaatgttgctgtgctcacagaaacctgatggtttacacaccaagcaataccaccaccaccaccgccaccaccacaacaacaaaanaanna

SEQ ID NO: 415108 - DNA, 183 bp, Homo sapiens
gttttactcttgtgaagatagcactttaatcctaaatgagcatgtaacgtgtgacagatcctatatcagttttaataattgaagcagatagtaataactagattattgacatttttgagtcatgtgttcagctattgcttcaaacttgctcaaattatacttggaattttatagtgttttatt

SEQ ID NO: 415109 - DNA, 2748 bp, Homo sapiens
ggaggaagctggcttcctggagccttctcagccctcaaagacagaccgacagacagacagacagctggcaagaggcagcctgggggccacagctgcttcagcagacctcatggctgagtgagcctcccctgggcccagcaccccacctcagcatggtccaagcccatggggggcgctccagagcacagccgttgaccttgtctttgggggcagccatgacccagcctccgcctgaaaaaacgccagccaagaagcatgtgcgactgcaggagaggcggggctccaatgtggctctgatgctggacgttcggtccctgggggccgtagaacccatctgctctgtgaacacaccccgggaggtcaccctacactttctgcgcactgctggacacccccttacccgctgggcccttcagcgccagccacccagccccaagcaactggaagaagaattcttgaagatcccttcaaactttgtcagccccgaagacctggacatccctggccacgcctccaaggaccgatacaagaccatcttgccaaatccccagagccgtgtctgtctaggccgggcacagagccaggaggacggagattacatcaatgccaactacatccgaggctatgacgggaaggagaaggtctacattgccacccagggccccatgcccaacactgtgtcggacttctgggagatggtgtggcaagaggaagtgtccctcattgtcatgctcactcagctccgagagggcaaggagaaatgtgtccactactggcccacagaagaggaaacctatggacccttccagatccgcatccaggacatgaaagagtgcccagaatacactgtgcggcagctcaccatccagtaccaggaagagcgccggtcagtaaagcacatcctcttttcggcctggccagaccatcagacaccagaatcagctgggcccctgctgcgcctagtggcagaggtggaggagagcccggagacagccgcccaccccgggcctatcgtagtccactgcagtgcagggattggccggacgggctgcttcatcgccacgcgaattggctgtcaacagctgaaagcccgaggagaagtggacattctgggtattgtgtgccaactgcggctagacagaggggggatgatccagacggcagagcagtaccagttcctgcaccacactttggccctgtatgcaggccagctgcctgaggaacccagcccctgacccctgccaccctccggtggcccaggtgcctacctccctcaagcctgggaagtcacaggaagcagcagcagtaaggacaaggggccggattccaggtcttcaacactggccactcctctgcttcctctgttggccccagatggacagtaaggggaacctccaatgtctctctgaacttaaagacaggagctggcatttatgacagacaaagaaagaagcccaggtgtcctggtgttctctgagacactctttgtgagcttcagtttcctgttctataacatgaacataagtgcttagctgccatgagggaaaagtaatgagagaagtttctagaagccactccagccactccttcctggggctgacaaaagggtgattccaagatcatccttcacccgaggtcctgcccaagcacaggccagatgcaagaatggggaaaagtctggtcctgatctccaagtctcaacatcctatcagtgactctgctccctgaccacacatcggaagggctggatgaccccaatcaaaagaaagaacaaggactctggttacccttgcctccacccatgtgtcataagagtaggctacagaggtgaccaggcctggcagttgaaatctctggaagagggaacatgtggggactactcagaggcaaagaggagctgctcctgcctccatggttgctggccactcccaccaactactcttagggaggctaagcagtctctgttttgcttccatggctcaaataataccctgggtatgcaggacccactataccttgcatttgctgagtacacctagagagcttggctgtttccaaaaacaatcagggtcataaccatccatgcagacatggaggctcggctgaaccaggactcctcactgtctacctgagagaatgagcacccctcatccatctcagcatcaacacaatttccaggggacctcaggtctacctcaggactgaacgccacacctcaggattcctcctccttgaatctgagactggctgcccattctgagatggggatgaaggtaagatgccgcatcaccaggcacgccgcccctgacagctgccttgataccagctctctgtggaaacccccgaggagttggatctggagaacagctgggcctcctcactcaggacttctctcctgaagaacacgcagtgctaaaactgaggatgatttccctaatgcttctgcttggccttatggaggagctgctccttccttacagccttggggatggacttgcccacacctccacctcccctgagccctgtgagaggcacgactgtctatgccaatgaggctcggtggggggctctcaagtgcctgatcctgccctgggctcagagccagcccagagggaagcaactgcacagccccacaggccctccctggcactgtccccccaaccccatctcagagctcagagggtacaagctccagaacagtaaccaagtgggaaaataaagacttcttggatgactgaaaaattcctt

SEQ ID NO: 415110 - DNA, 466 bp, Homo sapiens
ggaggaagctggcttcctggagccttctcagccctcaaagacagaccgacagacagacagacagctggcaagaggcagcctgggggccacagctgcttcagcagacctcatggctgagtgagcctcccctgggcccagcaccccacctcagcatggtccaagcccatggggggcgctccagagcacagccgttgaccttgtctttgggggcagccatgacccagcctcctcccctgagccctgtgagaggcacgactgtctatgccaatgaggctcggtggggggctctcaagtgcctgatcctgccctgggctcagagccagcccagagggaagcaactgcacagccccacaggccctccctggcactgtccccccaaccccatctcagagctcagagggtacaagctccagaacagtaaccaagtgggaaaataaagacttcttggatgactgaaaaattcctt

SEQ ID NO: 415111 - DNA, 3925 bp, Homo sapiens
ggaggaagctggcttcctggagccttctcagccctcaaagacagaccgacagacagacagacagctggcaagaggcagcctgggggccacagctgcttcagtaagtatctgaaggggggactgggagtcctgtggccccggggggtgcgaactccggggatataagagggcatctctaggagggagtgcgggagggcgagtggggcgccacagtgcctggctggggtatgggtgctcacagacctgatgtccccaagacgggggtgagcagggaagccacagggagctacaaggagagcagaggctgaagggaccttttctgctaccagagaccctcgctctaccactcacacctgtgccaggcccattctgtcccctcacctccgtccctgctgccttggtgattcaacacccccgccacctcgcccactgtgaccctggctctgggagatagggactgcccccaagaggagatggtcccaccacctccatgccccctgtcttgcccccagctgtcgcctcaccatgcgctgtcgttcaagggcttggtgaggccatttcctgtgacggttacagaggcgggagacggggggatgggcaggaggaggaaggaaacacctccagcctacctccctggacagagaccccagaagccagaaacagacctgggagtggaacagcagcagttaggagaggaccctgctggggtccaggagcccgcctgcctggctgcccaaccagctccaacactgctggaggcctccattctctgttcaggggaaggcccactggttagctcagagatggcttctgcgtgctttctcccttccgtcctagagaacacatattttctgtttcctcccttgccttctcccacttggacctgctcagagccctgtgtactctggtgtgtggcctctctcccctctctcttttcctccttctggattctttcctatcttcatccacaatctctaccctttatcttgccgttactctaccccgagactgccttctgccctgggtcccaccaaatagatcctgtccttcccttagtgaaaatgaggccacctcttggggaacagaagacgccccagtgaaaacagagtgcaaacctggcctggcatgggagcctccttctggccaatcaggcaggccagagaacagcagcggagggccctgtctttcaggcagacctcatggctgagtgagcctcccctgggcccagcaccccacctcagcatggtccaagcccatggggggcgctccagagcacagccgttgaccttgtctttgggggcagccatgacccagcctccgcctgaaaaaacgccagccaagaagcatgtgcgactgcaggagaggcggggctccaatgtggctctgatgctggacgttcggtccctgggggccgtagaacccatctgctctgtgaacacaccccgggaggtcaccctacactttctgcgcactgctggacacccccttacccgctgggcccttcagcgccagccacccagccccaagcaactggaagaagaattcttgaagatcccttcaaactttgtcagccccgaagacctggacatccctggccacgcctccaaggaccgatacaagaccatcttgccaaatccccagagccgtgtctgtctaggccgggcacagagccaggaggacggagattacatcaatgccaactacatccgaggctatgacgggaaggagaaggtctacattgccacccagggccccatgcccaacactgtgtcggacttctgggagatggtgtggcaagaggaagtgtccctcattgtcatgctcactcagctccgagagggcaaggagaaatgtgtccactactggcccacagaagaggaaacctatggacccttccagatccgcatccaggacatgaaagagtgcccagaatacactgtgcggcagctcaccatccagtaccaggaagagcgccggtcagtaaagcacatcctcttttcggcctggccagaccatcagacaccagaatcagctgggcccctgctgcgcctagtggcagaggtggaggagagcccggagacagccgcccaccccgggcctatcgtagtccactgcagtgcagggattggccggacgggctgcttcatcgccacgcgaattggctgtcaacagctgaaagcccgaggagaagtggacattctgggtattgtgtgccaactgcggctagacagaggggggatgatccagacggcagagcagtaccagttcctgcaccacactttggccctgtatgcaggccagctgcctgaggaacccagcccctgacccctgccaccctccggtggcccaggtgcctacctccctcaagcctgggaaggtgggtctggggaaagtgggccgagtgatctgggggtaccccttgggttggtgtggggaaggagtgcctccttagtggtgcttgcagtcacaggaagcagcagcagtaaggacaaggggccggattccaggtcttcaacactggccactcctctgcttcctctgttggccccagatggacagtaaggggaacctccaatgtctctctgaacttaaagacaggagctggcatttatgacagacaaagaaagaagcccaggtgtcctggtgttctctgagacactctttgtgagcttcagtttcctgttctataacatgaacataagtgcttagctgccatgagggaaaagtaatgagagaagtttctagaagccactccagccactccttcctggggctgacaaaagggtgattccaagatcatccttcacccgaggtcctgcccaagcacaggccagatgcaagaatggggaaaagtctggtcctgatctccaagtctcaacatcctatcagtgactctgctccctgaccacacatcggaagggctggatgaccccaatcaaaagaaagaacaaggactctggttacccttgcctccacccatgtgtcataagagtaggctacagaggtgaccaggcctggcagttgaaatctctggaagagggaacatgtggggactactcagaggcaaagaggagctgctcctgcctccatggttgctggccactcccaccaactactcttagggaggctaagcagtctctgttttgcttccatggctcaaataataccctgggtatgcaggacccactataccttgcatttgctgagtacacctagagagcttggctgtttccaaaaacaatcagggtcataaccatccatgcagacatggaggctcggctgaaccaggactcctcactgtctacctgagagaatgagcacccctcatccatctcagcatcaacacaatttccaggggacctcaggtctacctcaggactgaacgccacacctcaggattcctcctccttgaatctgagactggctgcccattctgagatggggatgaaggtaagatgccgcatcaccaggcacgccgcccctgacagctgccttgataccagctctctgtggaaacccccgaggagttggatctggagaacagctgggcctcctcactcaggacttctctcctgaagaacacgcagtgctaaaactgaggatgatttccctaatgcttctgcttggccttatggaggagctgctccttccttacagccttggggatggacttgcccacacctccacctcccctgagccctgtgagaggcacgactgtctatgccaatgaggctcggtggggggctctcaagtgcctgatcctgccctgggctcagagccagcccagagggaagcaactgcacagccccacaggccctccctggcactgtccccccaaccccatctcagagctcagagggtacaagctccagaacagtaaccaagtgggaaaataaagacttcttggatgactgaaaaattcctt

SEQ ID NO: 415112 - DNA, 2477 bp, Homo sapiens
ggaggaagctggcttcctggagccttctcagccctcaaagacagaccgacagacagacagacagctggcaagaggcagcctgggggccacagctgcttcaaagatcccttcaaactttgtcagccccgaagacctggacatccctggccacgcctccaaggaccgatacaagaccatcttgccaaatccccagagccgtgtctgtctaggccgggcacagagccaggaggacggagattacatcaatgccaactacatccgaggctatgacgggaaggagaaggtctacattgccacccagggccccatgcccaacactgtgtcggacttctgggagatggtgtggcaagaggaagtgtccctcattgtcatgctcactcagctccgagagggcaaggagaaatgtgtccactactggcccacagaagaggaaacctatggacccttccagatccgcatccaggacatgaaagagtgcccagaatacactgtgcggcagctcaccatccagtaccaggaagagcgccggtcagtaaagcacatcctcttttcggcctggccagaccatcagacaccagaatcagctgggcccctgctgcgcctagtggcagaggtggaggagagcccggagacagccgcccaccccgggcctatcgtagtccactgcagtgcagggattggccggacgggctgcttcatcgccacgcgaattggctgtcaacagctgaaagcccgaggagaagtggacattctgggtattgtgtgccaactgcggctagacagaggggggatgatccagacggcagagcagtaccagttcctgcaccacactttggccctgtatgcaggccagctgcctgaggaacccagcccctgacccctgccaccctccggtggcccaggtgcctacctccctcaagcctgggaaggtgggtctggggaaagtgggccgagtgatctgggggtaccccttgggttggtgtggggaaggagtgcctccttagtggtgcttgcagtcacaggaagcagcagcagtaaggacaaggggccggattccaggtcttcaacactggccactcctctgcttcctctgttggccccagatggacagtaaggggaacctccaatgtctctctgaacttaaagacaggagctggcatttatgacagacaaagaaagaagcccaggtgtcctggtgttctctgagacactctttgtgagcttcagtttcctgttctataacatgaacataagtgcttagctgccatgagggaaaagtaatgagagaagtttctagaagccactccagccactccttcctggggctgacaaaagggtgattccaagatcatccttcacccgaggtcctgcccaagcacaggccagatgcaagaatggggaaaagtctggtcctgatctccaagtctcaacatcctatcagtgactctgctccctgaccacacatcggaagggctggatgaccccaatcaaaagaaagaacaaggactctggttacccttgcctccacccatgtgtcataagagtaggctacagaggtgaccaggcctggcagttgaaatctctggaagagggaacatgtggggactactcagaggcaaagaggagctgctcctgcctccatggttgctggccactcccaccaactactcttagggaggctaagcagtctctgttttgcttccatggctcaaataataccctgggtatgcaggacccactataccttgcatttgctgagtacacctagagagcttggctgtttccaaaaacaatcagggtcataaccatccatgcagacatggaggctcggctgaaccaggactcctcactgtctacctgagagaatgagcacccctcatccatctcagcatcaacacaatttccaggggacctcaggtctacctcaggactgaacgccacacctcaggattcctcctccttgaatctgagactggctgcccattctgagatggggatgaaggtaagatgccgcatcaccaggcacgccgcccctgacagctgccttgataccagctctctgtggaaacccccgaggagttggatctggagaacagctgggcctcctcactcaggacttctctcctgaagaacacgcagtgctaaaactgaggatgatttccctaatgcttctgcttggccttatggaggagctgctccttccttacagccttggggatggacttgcccacacctccacctcccctgagccctgtgagaggcacgactgtctatgccaatgaggctcggtggggggctctcaagtgcctgatcctgccctgggctcagagccagcccagagggaagcaactgcacagccccacaggccctccctggcactgtccccccaaccccatctcagagctcagagggtacaagctccagaacagtaaccaagtgggaaaataaagacttcttggatgactgaaaaattcctt

SEQ ID NO: 415113 - DNA, 2172 bp, Homo sapiens
gagagggcaaggagaaatgtgtccactcggagctgagtgagcatgacaatgagggacacttcctcttgccacaccatctccgagagggcaaggagaaatgtgtccactactggcccacagaagaggaaacctatggacccttccagatccgcatccaggacatgaaagagtgcccagaatacactgtgcggcagctcaccatccagtaccaggaagagcgccggtcagtaaagcacatcctcttttcggcctggccagaccatcagacaccagaatcagctgggcccctgctgcgcctagtggcagaggtggaggagagcccggagacagccgcccaccccgggcctatcgtagtccactgcagtgcagggattggccggacgggctgcttcatcgccacgcgaattggctgtcaacagctgaaagcccgaggagaagtggacattctgggtattgtgtgccaactgcggctagacagaggggggatgatccagacggcagagcagtaccagttcctgcaccacactttggccctgtatgcaggccagctgcctgaggaacccagcccctgacccctgccaccctccggtggcccaggtgcctacctccctcaagcctgggaaggtgggtctggggaaagtgggccgagtgatctgggggtaccccttgggttggtgtggggaaggagtgcctccttagtggtgcttgcagtcacaggaagcagcagcagtaaggacaaggggccggattccaggtcttcaacactggccactcctctgcttcctctgttggccccagatggacagtaaggggaacctccaatgtctctctgaacttaaagacaggagctggcatttatgacagacaaagaaagaagcccaggtgtcctggtgttctctgagacactctttgtgagcttcagtttcctgttctataacatgaacataagtgcttagctgccatgagggaaaagtaatgagagaagtttctagaagccactccagccactccttcctggggctgacaaaagggtgattccaagatcatccttcacccgaggtcctgcccaagcacaggccagatgcaagaatggggaaaagtctggtcctgatctccaagtctcaacatcctatcagtgactctgctccctgaccacacatcggaagggctggatgaccccaatcaaaagaaagaacaaggactctggttacccttgcctccacccatgtgtcataagagtaggctacagaggtgaccaggcctggcagttgaaatctctggaagagggaacatgtggggactactcagaggcaaagaggagctgctcctgcctccatggttgctggccactcccaccaactactcttagggaggctaagcagtctctgttttgcttccatggctcaaataataccctgggtatgcaggacccactataccttgcatttgctgagtacacctagagagcttggctgtttccaaaaacaatcagggtcataaccatccatgcagacatggaggctcggctgaaccaggactcctcactgtctacctgagagaatgagcacccctcatccatctcagcatcaacacaatttccaggggacctcaggtctacctcaggactgaacgccacacctcaggattcctcctccttgaatctgagactggctgcccattctgagatggggatgaaggtaagatgccgcatcaccaggcacgccgcccctgacagctgccttgataccagctctctgtggaaacccccgaggagttggatctggagaacagctgggcctcctcactcaggacttctctcctgaagaacacgcagtgctaaaactgaggatgatttccctaatgcttctgcttggccttatggaggagctgctccttccttacagccttggggatggacttgcccacacctccacctcccctgagccctgtgagaggcacgactgtctatgccaatgaggctcggtggggggctctcaagtgcctgatcctgccctgggctcagagccagcccagagggaagcaactgcacagccccacaggccctccctggcactgtccccccaaccccatctcagagctcagagggtacaagctccagaacagtaaccaagtgggaaaataaagacttcttggatgactgaaaaattcctt

SEQ ID NO: 415114 - DNA, 2058 bp, Homo sapiens
ggaggaagctggcttcctggagccttctcagccctcaaagacagaccgacagacagacagacagctggcaagaggcagcctgggggccacagctgcttcagtaagtatctgaaggggggactgggagtcctgtggccccggggggtgcgaactccggggatataagagggcatctctaggagggagtgcgggagggcgagtggggcgccacagtgcctggctggggtatgggtgctcacagacctgatgtccccaagacgggggtgagcagggaagccacagggagctacaaggagagcagaggctgaagggaccttttctgctaccagagaccctcgctctaccactcacacctgtgccaggcccattctgtcccctcacctccgtccctgctgccttggtgattcaacacccccgccacctcgcccactgtgaccctggctctgggagatagggactgcccccaagaggagatggtcccaccacctccatgccccctgtcttgcccccagctgtcgcctcaccatgcgctgtcgttcaagggcttggtgaggccatttcctgtgacggttacagaggcgggagacggggggatgggcaggaggaggaaggaaacacctccagcctacctccctggacagagaccccagaagccagaaacagacctgggagtggaacagcagcagttaggagaggaccctgctggggtccaggagcccgcctgcctggctgcccaaccagctccaacactgctggaggcctccattctctgttcaggggaaggcccactggttagctcagagatggcttctgcgtgctttctcccttccgtcctagagaacacatattttctgtttcctcccttgccttctcccacttggacctgctcagagccctgtgtactctggtgtgtggcctctctcccctctctcttttcctccttctggattctttcctatcttcatccacaatctctaccctttatcttgccgttactctaccccgagactgccttctgccctgggtcccaccaaatagatcctgtccttcccttagtgaaaatgaggccacctcttggggaacagaagacgccccagtgaaaacagagtgcaaacctggcctggcatgggagcctccttctggccaatcaggcaggccagagaacagcagcggagggccctgtctttcaggcagacctcatggctgagtgagcctcccctgggcccagcaccccacctcagcatggtccaagcccatggggggcgctccagagcacagccgttgaccttgtctttgggggcagccatgacccagcctcgagatcttccctgggggaggggtcttccgagccctgagcccccattccgctcctcccttccttccatctgcccctccagctctgacagcagggtccagagggccctcagttgttgactccaatttggaaaggaaaccagtagtgctcatttgcatgtcttttgcatgtctggagcacagagtttcatatcaaccatgagcctgctccctaaattccaggcaaggcccacagccttcttggtgctggatgcatgtcggagccacagggcctggctgggagtgggaagaggcaggcagctggaaggagcagttgagttcaaggctgccctgttctggctgacaaagggagagggctgagccaggcatggtagctcatgcccaaaatcccagcactttgggaggctgaggtgagaggatctcctgagtccaggaattagagaccggcctaggcaatatagtgagacctcctctctctcaaaaaaaaaaaaaaaaagagggcacacagcaggggcccaaaccctaaatttactgggctaccaggttaaaggaaagataaagagcggccccctcagaggtgccttataacagtaatacttgtaagaaaagcaaatatggtcaggcacagtggctcatgcctataatcccagcactttgggaagccaaggcagaaggatcacttgagcccaggagttcaaaaccagcctgagcaacagaacaagacactgtctctccaaaaaaaaa

SEQ ID NO: 415115 - DNA, 236 bp, Homo sapiens
aaaaaaaaaaaaaaaaaaaaaaaagtgaaaagatgaatataggcaaaggagttggcatgttctttgagaaagtcaggactttcccagtaggaccacagggatgtttgactggagccattcagccagcaccctgaccctccttcactcatggtctgtgtgtttctccttgcagaggggggatgatccagacggcagagcagtaccagttcctgcaccacactttggccctgtatgca

SEQ ID NO: 415116 - DNA, 2835 bp, Homo sapiens
ggaggaagctggcttcctggagccttctcagccctcaaagacagaccgacagacagacagacagctggcaagaggcagcctgggggccacagctgcttcagcagacctcatggctgagtgagcctcccctgggcccagcaccccacctcagcatggtccaagcccatggggggcgctccagagcacagccgttgaccttgtctttgggggcagccatgacccagcctccgcctgaaaaaacgccagccaagaagcatgtgcgactgcaggagaggcggggctccaatgtggctctgatgctggacgttcggtccctgggggccgtagaacccatctgctctgtgaacacaccccgggaggtcaccctacactttctgcgcactgctggacacccccttacccgctgggcccttcagcgccagccacccagccccaagcaactggaagaagaattcttgaagatcccttcaaactttgtcagccccgaagacctggacatccctggccacgcctccaaggaccgatacaagaccatcttgccaaatccccagagccgtgtctgtctaggccgggcacagagccaggaggacggagattacatcaatgccaactacatccgaggctatgacgggaaggagaaggtctacattgccacccagggccccatgcccaacactgtgtcggacttctgggagatggtgtggcaagaggaagtgtccctcattgtcatgctcactcagctccgagagggcaaggagaaatgtgtccactactggcccacagaagaggaaacctatggacccttccagatccgcatccaggacatgaaagagtgcccagaatacactgtgcggcagctcaccatccagtaccaggaagagcgccggtcagtaaagcacatcctcttttcggcctggccagaccatcagacaccagaatcagctgggcccctgctgcgcctagtggcagaggtggaggagagcccggagacagccgcccaccccgggcctatcgtagtccactgcagtgcagggattggccggacgggctgcttcatcgccacgcgaattggctgtcaacagctgaaagcccgaggagaagtggacattctgggtattgtgtgccaactgcggctagacagaggggggatgatccagacggcagagcagtaccagttcctgcaccacactttggccctgtatgcaggccagctgcctgaggaacccagcccctgacccctgccaccctccggtggcccaggtgcctacctccctcaagcctgggaaggtgggtctggggaaagtgggccgagtgatctgggggtaccccttgggttggtgtggggaaggagtgcctccttagtggtgcttgcagtcacaggaagcagcagcagtaaggacaaggggccggattccaggtcttcaacactggccactcctctgcttcctctgttggccccagatggacagtaaggggaacctccaatgtctctctgaacttaaagacaggagctggcatttatgacagacaaagaaagaagcccaggtgtcctggtgttctctgagacactctttgtgagcttcagtttcctgttctataacatgaacataagtgcttagctgccatgagggaaaagtaatgagagaagtttctagaagccactccagccactccttcctggggctgacaaaagggtgattccaagatcatccttcacccgaggtcctgcccaagcacaggccagatgcaagaatggggaaaagtctggtcctgatctccaagtctcaacatcctatcagtgactctgctccctgaccacacatcggaagggctggatgaccccaatcaaaagaaagaacaaggactctggttacccttgcctccacccatgtgtcataagagtaggctacagaggtgaccaggcctggcagttgaaatctctggaagagggaacatgtggggactactcagaggcaaagaggagctgctcctgcctccatggttgctggccactcccaccaactactcttagggaggctaagcagtctctgttttgcttccatggctcaaataataccctgggtatgcaggacccactataccttgcatttgctgagtacacctagagagcttggctgtttccaaaaacaatcagggtcataaccatccatgcagacatggaggctcggctgaaccaggactcctcactgtctacctgagagaatgagcacccctcatccatctcagcatcaacacaatttccaggggacctcaggtctacctcaggactgaacgccacacctcaggattcctcctccttgaatctgagactggctgcccattctgagatggggatgaaggtaagatgccgcatcaccaggcacgccgcccctgacagctgccttgataccagctctctgtggaaacccccgaggagttggatctggagaacagctgggcctcctcactcaggacttctctcctgaagaacacgcagtgctaaaactgaggatgatttccctaatgcttctgcttggccttatggaggagctgctccttccttacagccttggggatggacttgcccacacctccacctcccctgagccctgtgagaggcacgactgtctatgccaatgaggctcggtggggggctctcaagtgcctgatcctgccctgggctcagagccagcccagagggaagcaactgcacagccccacaggccctccctggcactgtccccccaaccccatctcagagctcagagggtacaagctccagaacagtaaccaagtgggaaaataaagacttcttggatgactgaaaaattcctt

SEQ ID NO: 415117 - DNA, 744 bp, Homo sapiens
  misc_feature (59)..(60): n is a, c, g, or t
  misc_feature (160)..(160): n is a, c, g, or t
  misc_feature (174)..(174): n is a, c, g, or t
  misc_feature (176)..(176): n is a, c, g, or t
  misc_feature (725)..(725): n is a, c, g, or t
gggggtttccacagagagctggtatcaaggcagctgtcagggcggcgtgcctggtgatnnggcatcttaccttcatccccatctcagaatggcagccagtctcagattcaaggaggaggaatcctgaggtgtggcgttcagtcctgaggtagacctgagntcccctggaaattntnttgatgctgagatggatgaggggtgctcatcagaggggggatgatccagacggcagagcagtaccagttcctgcaccacactttggccctgtatgcaggccagctgcctgaggaacccagcccctgacccctgccaccctccggtggcccaggtgcctacctccctcaagcctgggaagtcacaggaagcagcagcagtaaggacaaggggccggattccaggtcttcaacactggccactcctctgcttcctctgttggccccagatggacagtaaggggaacctccaatgtctctctgaacttaaagacaggagctggcatttatgacagacaaagaaagaagcccaggtgtcctggtgttctctgagacactctttgtgagcttcagtttcctgttctataacatgaacataagtgcttagctgccatgagggaaaagtaatgagagaagtttctagaagccattcttgcatctggcctgtgcttgggcaggacctcgggtgaaggatgatcttggaatcacccttttgtcagccccaggaaggantggctggagtggcttctag

SEQ ID NO: 415118 - DNA, 2782 bp, Homo sapiens
ggaggaagctggcttcctggagccttctcagccctcaaagacagaccgacagacagacagacagctggcaagaggcagcctgggggccacagctgcttcagcagacctcatggctgagtgagcctcccctgggcccagcaccccacctcagcatggtccaagcccatggggggcgctccagagcacagccgttgaccttgtctttgggggcagccatgacccagcctccgcctgaaaaaacgccagccaagaagcatgtgcgactgcaggagagaacccatctgctctgtgaacacaccccgggaggtcaccctacactttctgcgcactgctggacacccccttacccgctgggcccttcagcgccagccacccagccccaagcaactggaagaagaattcttgaagatcccttcaaactttgtcagccccgaagacctggacatccctggccacgcctccaaggaccgatacaagaccatcttgccaaatccccagagccgtgtctgtctaggccgggcacagagccaggaggacggagattacatcaatgccaactacatccgaggctatgacgggaaggagaaggtctacattgccacccagggccccatgcccaacactgtgtcggacttctgggagatggtgtggcaagaggaagtgtccctcattgtcatgctcactcagctccgagagggcaaggagaaatgtgtccactactggcccacagaagaggaaacctatggacccttccagatccgcatccaggacatgaaagagtgcccagaatacactgtgcggcagctcaccatccagtaccaggaagagcgccggtcagtaaagcacatcctcttttcggcctggccagaccatcagacaccagaatcagctgggcccctgctgcgcctagtggcagaggtggaggagagcccggagacagccgcccaccccgggcctatcgtagtccactgcagtgcagggattggccggacgggctgcttcatcgccacgcgaattggctgtcaacagctgaaagcccgaggagaagtggacattctgggtattgtgtgccaactgcggctagacagaggggggatgatccagacggcagagcagtaccagttcctgcaccacactttggccctgtatgcaggccagctgcctgaggaacccagcccctgacccctgccaccctccggtggcccaggtgcctacctccctcaagcctgggaaggtgggtctggggaaagtgggccgagtgatctgggggtaccccttgggttggtgtggggaaggagtgcctccttagtggtgcttgcagtcacaggaagcagcagcagtaaggacaaggggccggattccaggtcttcaacactggccactcctctgcttcctctgttggccccagatggacagtaaggggaacctccaatgtctctctgaacttaaagacaggagctggcatttatgacagacaaagaaagaagcccaggtgtcctggtgttctctgagacactctttgtgagcttcagtttcctgttctataacatgaacataagtgcttagctgccatgagggaaaagtaatgagagaagtttctagaagccactccagccactccttcctggggctgacaaaagggtgattccaagatcatccttcacccgaggtcctgcccaagcacaggccagatgcaagaatggggaaaagtctggtcctgatctccaagtctcaacatcctatcagtgactctgctccctgaccacacatcggaagggctggatgaccccaatcaaaagaaagaacaaggactctggttacccttgcctccacccatgtgtcataagagtaggctacagaggtgaccaggcctggcagttgaaatctctggaagagggaacatgtggggactactcagaggcaaagaggagctgctcctgcctccatggttgctggccactcccaccaactactcttagggaggctaagcagtctctgttttgcttccatggctcaaataataccctgggtatgcaggacccactataccttgcatttgctgagtacacctagagagcttggctgtttccaaaaacaatcagggtcataaccatccatgcagacatggaggctcggctgaaccaggactcctcactgtctacctgagagaatgagcacccctcatccatctcagcatcaacacaatttccaggggacctcaggtctacctcaggactgaacgccacacctcaggattcctcctccttgaatctgagactggctgcccattctgagatggggatgaaggtaagatgccgcatcaccaggcacgccgcccctgacagctgccttgataccagctctctgtggaaacccccgaggagttggatctggagaacagctgggcctcctcactcaggacttctctcctgaagaacacgcagtgctaaaactgaggatgatttccctaatgcttctgcttggccttatggaggagctgctccttccttacagccttggggatggacttgcccacacctccacctcccctgagccctgtgagaggcacgactgtctatgccaatgaggctcggtggggggctctcaagtgcctgatcctgccctgggctcagagccagcccagagggaagcaactgcacagccccacaggccctccctggcactgtccccccaaccccatctcagagctcagagggtacaagctccagaacagtaaccaagtgggaaaataaagacttcttggatgactgaaaaattcctt

SEQ ID NO: 415119 - DNA, 2104 bp, Homo sapiens
ggaggaagctggcttcctggagccttctcagccctcaaagacagaccgacagacagacagacagctggcaagaggcagcctgggggccacagctgcttcagtaagtatctgaaggggggactgggagtcctgtggccccggggggtgcgaactccggggatataagagggcatctctaggagggagtgcgggagggcgagtggggcgccacagtgcctggctggggtatgggtgctcacagacctgatgtccccaagacgggggtgagcagggaagccacagggagctacaaggagagcagaggctgaagggaccttttctgctaccagagaccctcgctctaccactcacacctgtgccaggcccattctgtcccctcacctccgtccctgctgccttggtgattcaacacccccgccacctcgcccactgtgaccctggctctgggagatagggactgcccccaagaggagatggtcccaccacctccatgccccctgtcttgcccccagctgtcgcctcaccatgcgctgtcgttcaagggcttggtgaggccatttcctgtgacggttacagaggcgggagacggggggatgggcaggaggaggaaggaaacacctccagcctacctccctggacagagaccccagaagccagaaacagacctgggagtggaacagcagcagttaggagaggaccctgctggggtccaggagcccgcctgcctggctgcccaaccagctccaacactgctggaggcctccattctctgttcaggggaaggcccactggttagctcagagatggcttctgcgtgctttctcccttccgtcctagagaacacatattttctgtttcctcccttgccttctcccacttggacctgctcagagccctgtgtactctggtgtgtggcctctctcccctctctcttttcctccttctggattctttcctatcttcatccacaatctctaccctttatcttgccgttactctaccccgagactgccttctgccctgggtcccaccaaatagatcctgtccttcccttagtgaaaatgaggccacctcttggggaacagaagacgccccagtgaaaacagagtgcaaacctggcctggcatgggagcctccttctggccaatcaggcaggccagagaacagcagcggagggccctgtctttcaggcagacctcatggctgagtgagcctcccctgggcccagcaccccacctcagcatggtccaagcccatggggggcgctccagagcacagccgttgaccttgtctttgggggcagccatgacccagcctccgcctgaaaaaacgccagccaagaagcatgtgcgactgcaggagaggagatcttccctgggggaggggtcttccgagccctgagcccccattccgctcctcccttccttccatctgcccctccagctctgacagcagggtccagagggccctcagttgttgactccaatttggaaaggaaaccagtagtgctcatttgcatgtcttttgcatgtctggagcacagagtttcatatcaaccatgagcctgctccctaaattccaggcaaggcccacagccttcttggtgctggatgcatgtcggagccacagggcctggctgggagtgggaagaggcaggcagctggaaggagcagttgagttcaaggctgccctgttctggctgacaaagggagagggctgagccaggcatggtagctcatgcccaaaatcccagcactttgggaggctgaggtgagaggatctcctgagtccaggaattagagaccggcctaggcaatatagtgagacctcctctctctcaaaaaaaaaaaaaaaaagagggcacacagcaggggcccaaaccctaaatttactgggctaccaggttaaaggaaagataaagagcggccccctcagaggtgccttataacagtaatacttgtaagaaaagcaaatatggtcaggcacagtggctcatgcctataatcccagcactttgggaagccaaggcagaaggatcacttgagcccaggagttcaaaaccagcctgagcaacagaacaagacactgtctctccaaaaaaaaa

SEQ ID NO: 415120 - DNA, 1004 bp, Homo sapiens
atggcgcgatctcggctcaccgcaacctccgcctccaaggtttaagcgattctcctgcctcagcctcccgactagctgggattacaggcattcaccaccaagcccgtctaattttatatttttagtagagacgggatttccccatgttggtcaggttggtctcgagctcccgacctcaggtgatcgcccgcctcgacctcccaaagtgctgggattacaggcgtgaaccaccgtgcccggccttggccgcatgtgttttgaattttgctgcccggaattcactgcgaggactgggatcacccgtcaccccgccctggtctacggaaaatgaaatgtgtttactgatatagaaacggaataacggcgctgtgggctggggagggccgagctgccttcaggcttctggtctccagctgcagggcactcacacctgcccgttatgaaaatgcagacccgcagggcaggaattccgagtccgggctggagcgcgatctggaatccggctttcttgaaacagcaccgcggaggattcggatccgggtgagtaggaaactgcgcctcagcccctcccacgggccgcccacgtattccaggatccgaaaacgcttcctgctgctccgtcaccccaggaaggcagcgtccgcctctgggcggttctgatggaaaccggctgcgccgcccgcaggaaaacccacaactaaggggccaggaaaaagcctcttagggtcccgccacttcagtgaggatcctaatttacacccttagtttggcctccatgaaagactggagtgaccttcactgaaatgatacaaggggcccagggagctgcggcgctcagaatgcggtgacagcgccgcctcgcgtcccttccctgacctgctcccggcggacgcggagaagtttgttggcctggaggctggaatataccggggatcaaatgcagagaatggagaaaagagggaaggatggggggacgtgttgaagaaatgagggaagagatagga

SEQ ID NO: 415121 - DNA, 494 bp, Homo sapiens
cttgggggcgcacgcctgtagtcccagctcctcaggagctgaggtaggagaatcacttgaacccaggaggcaaaggttgcagggagttgagccaagatcgcgccattgcaccctagcctgggcaacagagcgagattctgtttcaaaaaacccccaagtgtattataaggcaataattcctatacgaagcaaactaaaatgcagcaatattaaggtataaaaacaaagaggaataattccattgaaccttgattctggaaactttgatccacccagcagtcatgatgttagactcattgaaaagaatgtatttctaatgcatgatgcgatcggtctatagatgtgtcatggaaacttggttgcaacttcaagacaaaataaaaagtaaacatttacatgaaaaatggtggatatggaaggtggagaagagaggagataacagctttatctttcaaaatagagaattgagagatggtaccaaaagctgatgaagt

SEQ ID NO: 415122 - DNA, 2841 bp, Homo sapiens
gggctgtgctcgtcgccgcgctcgtggaccggggccgggcggactcggggaccggcggaggacgccgggcgcgcccggcccgaggctgggggagcggggcggcgtggcgggcgcgccgaggaccccaggccgggccgggccgagaggctgccatgggctccgtggggagccagcgccttgaggagcccagcgtggcaggcacaccagacccgggcgtagtgatgagcttcaccttcgacagtcaccagctggaggaggcggcggaggcggctcagggccagggccttagggccaggggcgtcccagctttcacggatactacattggacgagccagtgcccgatgaccgttatcacgccatctactttgcgatgctgctggctggcgtgggcttcctgctgccatacaacagcttcatcacggacgtggactacctgcatcacaagtacccagggacctccatcgtgtttgacatgagcctcacctacatcttggtggcactggcagctgtcctcctgaacaacgtcctggtggagagactgaccctgcacaccaggatcaccgcagcatctgcgacgtgtggctgcagctcttctctcgggaccaggcctacgccatcaacctggccgctgtgggcaccgtggccttcggctgcacagtgcagcaatccagcttctacgggtacacggggatgctgcccaagcggtacacgcagggggtgatgaccggggagagcacggcgggcgtgatgatctctctgagccgcatcctcacgaagctgctgctgcccgacgagcgcgccagcacgctcatcttcttcctggtgtcggtggcgctggagctgctgtgtttcctgctgcacctgttagtgcggcgcagccgcttcgtgctcttctataccacacggccgcgtgacagccaccggggcaggccaggcctgggcaggggctatggctaccgcgtgcaccacgacgttgtcgccggggacgtccacttcgagcacccagccccggccctggcccccaacgagtccccaaaggacagcccagcccacgaggtgaccggcagcggcggggcctacatgcgctttgatgtgccgcggccaagggtccagcgcagctggcccaccttcagagccctgttactgcaccgctacgtggtggcgcgggtgatctgggccgacatgctctccatcgccgtgacctacttcatcacgctgtgcctgttccccggcctcgagtctgagatccgccactgcatcctgggcgagtggctgcccatcctcatcatggctgtgttcaacctgtcagacttcgtgggcaagatcctggcagccctgcccgtggactggcggggcacccacctgctggcctgctcctgcctgcgtgtggtcttcatccccctcttcatcctgtgcgtctaccccagcggcatgcccgccctccgtcaccccgcctggccctgcatcttctcactgctcatgggcatcagcaacggctacttcggcagcgtgcccatgatcctggcggcaggcaaagtgagccccaagcagcgggagctggcagggaacaccatgaccgtgtcctacatgtcagggctgacgctggggtccgccgtggcctactgcacctacagcctcacccgcgacgctcacggcagctgcctgcacgcctccaccgccaatggttccatcctcgcaggcctctgagccagccccgcccactgccagggacgccgagggcctgaccaggggccccgaggcctgagggcccctcccctgtccccacctcagtgcctgcggggccctgagcctccccctgtgccagcagccccactccctcagggtccagccatgccccaccctggactgaagttctgcaaagtcctccgaggaccggaacacgtttctgcgacccggggctctggccagcactgtgttctgcgtttggtctcatacctgcgtctaccttccatctgtgtccagcggccccggctccagcccagccagcactctgcagggtcacacgcaccgtgtccccacccaggacagcagacacccgccagagtgtgcgcgcccagtgactgcaccccggccctcatcacccaccggcactgattggggcaccgcctggcccagcctccaccagggacccctcctcatgaactctggagccctgagaggagaggggcagccccccaccttgtcaccctcagggcttccccttctgtcctcattcttagagactgcttctcccaaacataacgcgttagccatgaaggagtcggagccctgggtccgaatggacccgcctgcggtctgcatcagcctctgggaaaccacagcagtgatgccagctgggcacgtcaggacctccccacacacccacacgatgccacaggtcagggggctgtgcctgactagggagccctcccattgccttcctggcccgggatagaagaggggaggtaagtctgggggctacgaagccgggcccccacaccctggctgaagtcagcttgacctaggtcttgaccctcatccagcaagggactcgacagacccaagggtccctggaacgtagggaggggctgggggtcactccagcccgggcctcccagaacaccaggcccgtgtgggtggcaccctgaggtcaggggatcctaagggtgtccttccagagacggtgtttccagggggaggaccgcccccgcttccagatccccggccccggctgtgactgccctgtttcacccctgctgtgtcccatcccccgtctgtccactaactgtaccgcaccggccattaaaagatgaaggcagaccgctgcaccgccgcctgca

SEQ ID NO: 415123 - DNA, 2937 bp, Homo sapiens
gggctgtgctcgtcgccgcgctcgtggaccggggccgggcggactcggggaccggcggaggacgccgggcgcgcccggcccgaggctgggggagcggggcggcgtggcgggcgcgccgaggaccccaggccgggccgggccgagaggctgccatgggctccgtggggagccagcgccttgaggagcccagcgtggcaggcacaccagacccgggcgtagtgatgagcttcaccttcgacagtcaccagctggaggaggcggcggaggcggctcagggccagggccttagggccaggggcgtcccagctttcacggatactacattggacgagccagtgcccgatgaccgttatcacgccatctactttgcgatgctgctggctggcgtgggcttcctgctgccatacaacagcttcatcacggacgtggactacctgcatcacaagtacccagggacctccatcgtgtttgacatgagcctcacctacatcttggtggcactggcagctgtcctcctgaacaacgtcctggtggagagactgaccctgcacaccaggatcaccgcaggctacctcttagccttgggccctctcctttttatcagcatctgcgacgtgtggctgcagctcttctctcgggaccaggcctacgccatcaacctggccgctgtgggcaccgtggccttcggctgcacagtgcagcaatccagcttctacgggtacacggggatgctgcccaagcggtacacgcagggggtgatgaccggggagagcacggcgggcgtgatgatctctctgagccgcatcctcacgaagctgctgctgcccgacgagcgcgccagcacgctcatcttcttcctggtgtcggtggcgctggagctgctgtgtttcctgctgcacctgttagtgcggcgcagccgcttcgtgctcttctataccacacggccgcgtgacagccaccggggcaggccaggcctgggcaggggctatggctaccgcgtgcaccacgacgttgtcgccggggacgtccacttcgagcacccagccccggccctggcccccaacgagtccccaaaggacagcccagcccacgaggtgaccggcagcggcggggcctacatgcgctttgatgtgccgcggccaagggtccagcgcagctggcccaccttcagagccctgttactgcaccgctacgtggtggcgcgggtgatctgggccgacatgctctccatcgccgtgacctacttcatcacgctgtgcctgttccccggcctcgagtctgagatccgccactgcatcctgggcgagtggctgcccatcctcatcatggctgtgttcaacctgtcagacttcgtgggcaagatcctggcagccctgcccgtggactggcggggcacccacctgctggcctgctcctgcctgcgtgtggtcttcatccccctcttcatcctgtgcgtctaccccagcggcatgcccgccctccgtcaccccgcctggccctgcatcttctcactgctcatgggcatcagcaacggctacttcggcagcgtgcccatgatcctggcggcaggcaaagtgagccccaagcagcgggagctggcagggaacaccatgaccgtgtcctacatgtcagggctgacgctggggtccgccgtggcctactgcacctacagcctcacccgcgacgctcacggcagctgcctgcacgcctccaccgccaatggttccatcctcgcaggcctctgagccagccccgcccactgccagggacgccgagggcctgaccaggggccccgaggcctgagggcccctcccctgtccccacctcagtgcctgcggggccctgagcctccccctgtgccagcagccccactccctcagggtccagccatgccccaccctggactgaagttctgcaaagtcctccgaggaccggaacacgtttctgcgacccggggctctggccagcactgtgttctgcgtttggtctcatacctgcgtctaccttccatctgtgtccagcggccccggctccagcccagccagcactctgcagggtcacacgcaccgtgtccccacccaggacagcagacacccgccagagtgtgcgcgcccagtgactgcaccccggccctcatcacccaccggcactgattggggcaccgcctggcccagcctccaccagggacccctcctcatgaactctggagccctgagaggagaggggcagccccccaccttgtcaccctcagggcttccccttctgtcctcattcttagagactgcttctcccaaacataacgcgttagccatgaaggagtcggagccctgggtccgaatggacccgcctgcggtctgcatcagcctctgggaaaccacagcagtgatgccagctgggcacgtcaggacctccccacacacccacacgatgccacaggtcagggggctgtgcctgactagggagccctcccattgccttcctggcccgggatagaagaggggaggtaagtctgggggctacgaagccgggcccccacaccctggctgaagtcagcttgacctaggtcttgaccctcatccagcaagggactcgacagacccaagggtccctggaacgtagggaggggctgggggtcactccagcccgggcctcccagaacaccaggcccgtgtgggtggcaccctgaggtcaggggatcctaagggtgtccttccagagacggtgtttccagggggaggaccgcccccgcttccagatccccggccccggctgtgactgccctgtttcacccctgctgtgtcccatcccccgtctgtccactaactgtaccgcaccggccattaaaagacggacccgttccctacacccctacctacactcgaggcgctccccgtctcccacctggcctttaccgcctcgcattccctccctcgcccc

SEQ ID NO: 415124 - DNA, 826 bp, Homo sapiens
atttttttttctttttagatggagtcttgctctgttccccaggctggagtgcagtggcacgatctcagctcactgcaacctctgcctcgcaggttcaagcaattctcatgcctcagcctcctgagtagctgggattatggatgccccccaccatacctggcgaatgtttgtatttttagtagaggtgagatttcaccatcttggccaggctggtctcgaactcctaacctcaggtgatctgcctgcctcagcctcccaaagtgctgggattataggtgtcagccaccatacctggctgagactggagattaaaatggggagggttagggccaggctcactggctcaagacggtgttttgggaagccaaagtaagactaatcacttggggaccagcctgggcagtatagcaagacggaatcctctaacaaaaaaaatttttttaggttagccaggcacaaaaaagcatgcctgtggtcccaggtactcgggaggctgaggtgggaggatcgcgtgagcccaggaggtcaaggctgcaggaagctatggttgtaccactgcactccggtctgggcaacagagcaagaccttgtctttaaattttaaaaatgggggcttgggggactcagagaaggcaggcaaggcctggagtgcatagcagatggcctcgggaagaaggaatgaggaaggacaggatccggagagggtgctcccaggaggagcgatggggcagcgggtcctggaggggcggcacggttcaggcgggtgtcaccgcacctcacacccgagcagccgtggccaccaggtggccgccctggccctgctccc

SEQ ID NO: 415125 - DNA, 2878 bp, Homo sapiens
gggctgtgctcgtcgccgcgctcgtggaccggggccgggcggactcggggaccggcggaggacgccgggcgcgcccggcccgaggctgggggagcggggcggcgtggcgggcgcgccgaggaccccaggccgggccgggccgagaggctgccatgggctccgtggggagccagcgccttgaggagcccagcgtggcaggcacaccagacccgggcgtagtgatgagcttcaccttcgacagtcaccagctggaggaggcggcggaggcggctcagggccagggccttagggccaggggcgtcccagctttcacggatactacattggacgagccagtgcccgatgaccgttatcacgccatctactttgcgatgctgctggctggcgtgggcttcctgctgccatacaacagcttcatcacggacgtggactacctgcatcacaagtacccagggacctccatcgtgtttgacatgagcctcacctacatcttggtggcactggcagctgtcctcctgaacaacgtcctggtggagagactgaccctgcacaccaggatcaccgcaggctacctcttagccttgggccctctcctttttatcagcatctgcgacgtgtggctgcagctcttctctcgggaccaggcctacgccatcaacctggccgctgtgggcaccgtggccttcggctgcacagtgcagcaatccagcttctacgggtacacggggatgctgcccaagcggtacacgcagggggtgatgaccggggagagcacggcgggcgtgatgatctctctgagccgcatcctcacgaagctgctgctgcccgacgagcgcgccagcacgctcatcttcttcctggtgtcggtggcgctggagctgctgtgtttcctgctgcacctgttagtgcggcgcagccgcttcgtgctcttctataccacacggccgcgtgacagccaccggggcaggccaggcctgggcaggggctatggctaccgcgtgcaccacgacgttgtcgccggggacgtccacttcgagcacccagccccggccctggcccccaacgagtccccaaaggacagcccagcccacgaggtgaccggcagcggcggggcctacatgcgctttgatgtgccgcggccaagggtccagcgcagctggcccaccttcagagccctgttactgcaccgctacgtggtggcgcgggtgatctgggccgacatgctctccatcgccgtgacctacttcatcacgctgtgcctgttccccggcctcgagtctgagatccgccactgcatcctgggcgagtggctgcccatcctcatcatggctgtgttcaacctgtcagacttcgtgggcaagatcctggcagccctgcccgtggactggcggggcacccacctgctggcctgctcctgcctgcgtgtggtcttcatccccctcttcatcctgtgcgtctaccccagcggcatgcccgccctccgtcaccccgcctggccctgcatcttctcactgctcatgggcatcagcaacggctacttcggcagcgtgcccatgatcctggcggcaggcaaagtgagccccaagcagcgggagctggcagggaacaccatgaccgtgtcctacatgtcagggctgacgctggggtccgccgtggcctactgcacctacagcctcacccgcgacgctcacggcagctgcctgcacgcctccaccgccaatggttccatcctcgcaggcctctgagccagccccgcccactgccagggacgccgagggcctgaccaggggccccgaggcctgagggcccctcccctgtccccacctcagtgcctgcggggccctgagcctccccctgtgccagcagccccactccctcagggtccagccatgccccaccctggactgaagttctgcaaagtcctccgaggaccggaacacgtttctgcgacccggggctctggccagcactgtgttctgcgtttggtctcatacctgcgtctaccttccatctgtgtccagcggccccggctccagcccagccagcactctgcagggtcacacgcaccgtgtccccacccaggacagcagacacccgccagagtgtgcgcgcccagtgactgcaccccggccctcatcacccaccggcactgattggggcaccgcctggcccagcctccaccagggacccctcctcatgaactctggagccctgagaggagaggggcagccccccaccttgtcaccctcagggcttccccttctgtcctcattcttagagactgcttctcccaaacataacgcgttagccatgaaggagtcggagccctgggtccgaatggacccgcctgcggtctgcatcagcctctgggaaaccacagcagtgatgccagctgggcacgtcaggacctccccacacacccacacgatgccacaggtcagggggctgtgcctgactagggagccctcccattgccttcctggcccgggatagaagaggggaggtaagtctgggggctacgaagccgggcccccacaccctggctgaagtcagcttgacctaggtcttgaccctcatccagcaagggactcgacagacccaagggtccctggaacgtagggaggggctgggggtcactccagcccgggcctcccagaacaccaggcccgtgtgggtggcaccctgaggtcaggggatcctaagggtgtccttccagagacggtgtttccagggggaggaccgcccccgcttccagatccccggccccggctgtgactgccctgtttcacccctgctgtgtcccatcccccgtctgtccactaactgtaccgcaccggccattaaaagatgaaggcagaccgctgcaccgccgcctgca

SEQ ID NO: 415126 - DNA, 1547 bp, Homo sapiens
aagcttggcacgaggcctcgtgccaaaaaatgggggcttgggggactcagagaaggcaggcaaggcctggagtgcatagcagatggcctcgggaagaaggaatgaggaaggacaggatccggagagggtgctcccaggaggagcgatggggcagcgggtcctggaggggcggcacggttcaggcgggtgtcaccgcacctcacacccgagcagccgtggccaccaggtggccgccctggccctgctcccctcaggctggtgttgtccacagggaacaccatgaccgtgtcctacatgtcagggctgacgctggggtccgccgtggcctactgcacctacagcctcacccgcgacgctcacggcagctgcctgcacgcctccaccgccaatggttccatcctcgcaggcctctgagccagccccgcccactgccagggacgccgagggcctgaccaggggccccgaggcctgagggcccctcccctgtccccacctcagtgcctgcggggccctgagcctccccctgtgccagcagccccactccctcagggtccagccatgccccaccctggactgaagttctgcaaagtcctccgaggaccggaacacgtttctgcgacccggggctctggccagcactgtgttctgcgtttggtctcatacctgcgtctaccttccatctgtgtccagcggccccggctccagcccagccagcactctgcagggtcacacgcaccgtgtccccacccaggacagcagacacccgccagagtgtgcgcgcccagtgactgcaccccggccctcatcacccaccggcactgattggggcaccgcctggcccagcctccaccagggacccctcctcatgaactctggagccctgagaggagaggggcagccccccaccttgtcaccctcagggcttccccttctgtcctcattcttagagactgcttctcccaaacataacgcgttagccatgaaggagtcggagccctgggtccgaatggacccgcctgcggtctgcatcagcctctgggaaaccacagcagtgatgccagctgggcacgtcaggacctccccacacacccacacgatgccacaggtcagggggctgtgcctgactagggagccctcccattgccttcctggcccgggatagaagaggggaggtaagtctgggggctacgaagccgggcccccacaccctggctgaagtcagcttgacctaggtcttgaccctcatccagcaagggactcgacagacccaagggtccctggaacgtagggaggggctgggggtcactccagcccgggcctcccagaacaccaggcccgtgtgggtggcaccctgaggtcaggggatcctaagggtgtccttccagagacggtgtttccagggggaggaccgcccccgcttccagatccccggccccggctgtgactgccctgtttcacccctgctgtgtcccatcccccgtctgtccactaactgtaccgcaccggccattaaaagatgaaggcagaccgctgcaccgccgcctgca

SEQ ID NO: 415127 - DNA, 1045 bp, Homo sapiens
ccaacgctcagcacagcagagaaagacaccaagctacgggacccgccgcgcctcccgcgccggggtggagctgaccccgccgagccccgccccagcctgcgtctgccaatgatccaggagccgctcctttccactcgggaaaccttcagaggagtctcagaaaggacacggctggctgcttttctcagcgccgaagccgcgccatgctcgtcctcagaagcgccctgactcgggcgctggcctcacggacgctggcgcctcagatgtgctcatcttttgctacgggacccagacaatacgatggaatattctatgaatttcgttcttattaccttaagccctcaaagatgaatgagttcctggaaaattttgagaaaaacgctcatcttcggacagctcactctgaattggttggatactggagtgtagaatttggaggcagaatgaatacagtgtttcatatttggaagtatgataattttgctcatcgaactgaagttcggaaagccttggccaaagataaggaatggcaagaacaattcctcattccaaatttggctctcattgataaacaagagagtgagattacttatctggtaccatggtgcaaattagaaaaacctccaaaagaaggagtctatgaactggccacttttcagatgaaacctggtgggccagctctgtggggtgatgcatttaaaagggcagttcatgctcatgtcaatctaggctacacaaaactagttggagtgttccacacagagtacggagcactcaacagagttcatgttctttggtggaatgagagtgcagatagtcgtgcagctgggagacataagtcccatgaggatcccagagttgtggcagctgttcgggaaagtgtcaactacctagtatctcagcagaatatgcttctgattcctacatcgttttcaccactgaaatagtttctactgaaatacaaacacatttcattaactgctataggatctgtctgctaatggtgcttaaattctcccaagaggttctcacttttatttgaagg

SEQ ID NO: 415128 - DNA, 998 bp, Homo sapiens
ccaacgctcagcacagcagagaaagacaccaagctacgggacccgccgcgcctcccgcgccggggtggagctgaccccgccgagccccgccccagcctgcgtctgccaatgatccaggagccgctcctttccactcgggaaaccttcagaggagtctcagaaaggacacggctggctgcttttctcagcgccgaagccgcgccatgctcgtcctcagaagcgccctgactcgggcgctggcctcacggacgctggcgcctcagatgtgctcatcttttgctacgggacccagacaatacgatggaatattctatgaatttcgttcttattaccttaagccctcaaagatgaatgagttcctggaaaattttgagaaaaacgctcatcttcggacagctcactctgaattggttggatactggagtgtagaatttggaggcagaatgaatacagtgtttcatatttggaagtatgataattttgctcatcgaactgaagttcggaaagccttggccaaagataaggaatggcaagaacaattcctcattccaaatttggctctcattgataaacaagagagtgagattacttatctggtaccatggtgcaaattagaaaaacctccaaaagaaggagtctatgaactggccacttttcagatgaaacctggtgggccagctctgtggggtgatgcatttaaaagggcagttcatgctcatgtcaatctaggctacacttcatgttctttggtggaatgagagtgcagatagtcgtgcagctgggagacataagtcccatgaggatcccagagttgtggcagctgttcgggaaagtgtcaactacctagtatctcagcagaatatgcttctgattcctacatcgttttcaccactgaaatagtttctactgaaatacaaacacatttcattaactgctataggatctgtctgctaatggtgcttaaattctcccaagaggttctcacttttatttgaagg

SEQ ID NO: 415129 - DNA, 2898 bp, Homo sapiens
ggccctgaggctggccccagcttccgggttggtcgcgcgccttcctgcggctaagatggcgacggagcatcccgagcctcccaaagcagaattgcagctgccgccgccgccacctccaggccactatggcgcctgggctgcccaggagcttcaggccaagttggcagagatcggagctccgatccagggtaatcgcgaggagctggtggagcggctgcagagctacacccgccagactggcatcgtgctgaatcggccggttttgagaggggaagatggggacaaagccgctccacctcccatgtcggcacagctccctggaattcccatgccaccaccacctttgggactcccccctctgcagcctcctccgccagcccccaccacctccaccaggccttggccttggctttcctatggcccacccaccaaatttggggcccccgcctcctctccgtgtgggtgagccagtggcactgtcagaggaggagcggctgaagttggctcagcagcaggcggcattgctgatgcagcaggaggagcgtgccaagcagcagggagatcattcgctgaaggaacatgagctcttggagcagcagaagcgggcagctgtgttactggagcaggaacgacagcaggagattgccaagatgggcaccccagtccctcggcccccacaagacatgggccagattggtgtgcgcactcctctgggtcctcgagtagctgctccagtgggcccagtgggccccactcctacagttttgcccatgggagcccctgttccccggcctcgtggtcccccaccgccccctggagatgagaacagagagatggatgacccctctgtgggccccaagatcccccaggctttggagaagatcctgcagctgaaggagagccgccaggaagagatgaattctcagcaggaggaagaggaaatggaaacagatgctcgctcgtccctgggccagtcagcgtcagagactgaggaggacacagtgtccgtatctaaaaaggagaaaaaccggaagcgtaggaaccgaaagaagaagaaaaagccccagcgggtgcgaggggtgtcctctgagagctctggggaccgggagaaagactcaacccggtcccgtggctctgattccccagcagctgatgttgagattgagtatgtgactgaagaacctgaaatttacgagcccaactttatcttctttaagaggatctttgaggcttttaagctcactgatgatgtgaagaaggagaaagagaaggagccagagaaacttgacaaactggagaactctgcagcccccaagaagaagggatttgaagaggagcacaaggacagtgatgatgacagcagtgatgacgagcaggaaaagaagccagaagcccccaagctgtccaagaagaagttgcgccgaatgaaccgcttcactgtggctgaactcaagcagctggtggctcggcccgatgtcgtggagatgcacgatgtgacagcgcaggaccctaagctcttggttcacctcaaggccactcggaactctgtgcctgtgccacgccactggtgttttaagcgcaaatacctgcagggcaaacggggcattgagaagccccccttcgagctgccagacttcatcaaacgcacaggcatccaggagatgcgagaggccctgcaggagaaggaagaacagaagaccatgaagtcaaaaatgcgagagaaagttcggcctaagatgggcaaaattgacatcgactaccagaaactgcatgatgccttcttcaagtggcagaccaagccaaagctgaccatccatggggacctgtactatgaggggaaggagttcgagacacgactgaaggagaagaagccaggagatctgtctgatgagctaaggatttccttggggatgccagtaggaccaaatgcccacaaggtccctcccccatggctgattgccatgcagcgatatggaccacccccatcgtatcccaacctgaaaatccctgggctgaactcgcccatccctgagagctgttcctttgggtaccatgctggtggctggggcaaacctccagtggatgagactgggaaaccgctctatggggacgtgtttggaaccaatgctgctgaatttcagaccaagactgaggaagaagagattgatcggaccccttggggggaactggaaccatctgatgaagaatcctcagaagaagaggaagaggaagaaagtgatgaagacaaaccagatgagacaggctttattacccctgcagacagtggccttatcactcctggaggcttttcatcagtgcctgctggaatggagacccctgaactcattgagctgaggaagaagaagattgaggaggcgatggacggaagtgagacacctcagctcttcactgtgttgccagagaagagaacagccactgttggaggggccatgatgggatcaacccacatttatgacatgtccacggttatgagccggaagggcccggctcctgagctgcaaggtgtggaagtggcgctggcgcctgaagagttggagctggatcctatggccatgacccagaagtatgaggagcatgtgcgggagcagcaggctcaagtagagaaggaggacttcagtgacatggtggctgagcacgctgccaaacagaagcaaaaaaaacggaaagctcagccccaggacagccgtgggggcagcaagaaatataaggagttcaagttttaggtcccctcacactagccctttttttggccctacgtctggatgcctgggcttcacacaagaaccacctctcccgcagttcccaaggacttgtcatttcatgttcttattttagacctgttttgtaaataaagctgtttcccaaggaaaaatatta

SEQ ID NO: 415130 - DNA, 2646 bp, Homo sapiens
ccgcctcctctccgtgtgggggcgggggccccaaatttggtgggtgggccataggaaagccaaggccaaggcctggtggaggtggtgggggtggcggaggaggctgcagaggggggagtcccaaaggtggtagtggcatgggaattccagggagctgtgccgacatgggaggtggagcggctttgtccccatcttctcctctccgtgtgggtgagccagtggcactgtcagaggaggagcggctgaagttggctcagcagcaggcggcattgctgatgcagcaggaggagcgtgccaagcagcagggagatcattcgctgaaggaacatgagctcttggagcagcagaagcgggcagctgtgttactggagcaggaacgacagcaggagattgccaagatgggcaccccagtccctcggcccccacaagacatgggccagattggtgtgcgcactcctctgggtcctcgagtagctgctccagtgggcccagtgggccccactcctacagttttgcccatgggagcccctgttccccggcctcgtggtcccccaccgccccctggagatgagaacagagagatggatgacccctctgtgggccccaagatcccccaggctttggagaagatcctgcagctgaaggagagccgccaggaagagatgaattctcagcaggaggaagaggaaatggaaacagatgctcgctcgtccctgggccagtcagcgtcagagactgaggaggacacagtgtccgtatctaaaaaggagaaaaaccggaagcgtaggaaccgaaagaagaagaaaaagccccagcgggtgcgaggggtgtcctctgagagctctggggaccgggagaaagactcaacccggtcccgtggctctgattccccagcagctgatgttgagattgagtatgtgactgaagaacctgaaatttacgagcccaactttatcttctttaagaggatctttgaggcttttaagctcactgatgatgtgaagaaggagaaagagaaggagccagagaaacttgacaaactggagaactctgcagcccccaagaagaagggatttgaagaggagcacaaggacagtgatgatgacagcagtgatgacgagcaggaaaagaagccagaagcccccaagctgtccaagaagaagttgcgccgaatgaaccgcttcactgtggctgaactcaagcagctggtggctcggcccgatgtcgtggagatgcacgatgtgacagcgcaggaccctaagctcttggttcacctcaaggccactcggaactctgtgcctgtgccacgccactggtgttttaagcgcaaatacctgcagggcaaacggggcattgagaagccccccttcgagctgccagacttcatcaaacgcacaggcatccaggagatgcgagaggccctgcaggagaaggaagaacagaagaccatgaagtcaaaaatgcgagagaaagttcggcctaagatgggcaaaattgacatcgactaccagaaactgcatgatgccttcttcaagtggcagaccaagccaaagctgaccatccatggggacctgtactatgaggggaaggagttcgagacacgactgaaggagaagaagccaggagatctgtctgatgagctaaggatttccttggggatgccagtaggaccaaatgcccacaaggtccctcccccatggctgattgccatgcagcgatatggaccacccccatcgtatcccaacctgaaaatccctgggctgaactcgcccatccctgagagctgttcctttgggtaccatgctggtggctggggcaaacctccagtggatgagactgggaaaccgctctatggggacgtgtttggaaccaatgctgctgaatttcagaccaagactgaggaagaagagattgatcggaccccttggggggaactggaaccatctgatgaagaatcctcagaagaagaggaagaggaagaaagtgatgaagacaaaccagatgagacaggctttattacccctgcagacagtggccttatcactcctggaggcttttcatcagtgcctgctggaatggagacccctgaactcattgagctgaggaagaagaagattgaggaggcgatggacggaagtgagacacctcagctcttcactgtgttgccagagaagagaacagccactgttggaggggccatgatgggatcaacccacatttatgacatgtccacggttatgagccggaagggcccggctcctgagctgcaaggtgtggaagtggcgctggcgcctgaagagttggagctggatcctatggccatgacccagaagtatgaggagcatgtgcgggagcagcaggctcaagtagagaaggaggacttcagtgacatggtggctgagcacgctgccaaacagaagcaaaaaaaacggaaagctcagccccaggacagccgtgggggcagcaagaaatataaggagttcaagttttaggtcccctcacactagccctttttttggccctacgtctggatgcctgggcttcacacaagaaccacctctcccgcagttcccaaggacttgtcatttcatgttcttattttagacctgttttgtaaataaagctgtttcccaaggaaaaatatta

SEQ ID NO: 415131 - DNA, 1151 bp, Homo sapiens
  misc_feature (798)..(798): n is a, c, g, or t
  misc_feature (806)..(806): n is a, c, g, or t
ggccctgaggctggccccagcttccgggttggtcgcgcgccttcctgcggctaagatggcgacggagcatcccgagcctcccaaagcagaattgcagctgccgccgccgccacctccaggccactatggcgcctgggctgcccaggagcttcaggccaagttggcagagatcggagctccgatccagggtaatcgcgaggagctggtggagcggctgcagagctacacccgccagactggcatcgtgctgaatcggccggttttgagaggggaagatggggacaaagccgctccacctcccatgtcggcacagctccctggaattcccatgccaccaccacctttgggactcccccctctgcagcctcctccgccagcccccaccacctccaccaggccttggccttggctttcctatggcccacccaccaaatttggggcccccgcctcctctccgtgtgggtgagccagtggcactgtcagaggaggagcggctgaagttggctcagcagcaggcggcattgctgatgcagcaggaggagcgtgccaagcagcagggagatcattcgctgaaggaacatgagctcttggagcagcagaagcgggcagctgtgttactggagcaggaacgacagcaggagattgccaagatgggcaccccagtccctcggcccccacaagacatgggccagattggtgtgcgcactcctctgggtcctcgagtagctgctccagtgggcccagtgggccccactcctacagttttgcccatgggagcccctgttccccggcctcgtnggaccacncaacgaccatgaccatacaaacgcgaaacggatacacactagtagaaccagaagcccacagcatgaaagaaaaacgaaaaagaagcggaagccaggagagaaataacaacacgagaaaacaggcaggaacagacggcacacgacataggcagcagcccacagctcagcagagagcacacgccggagcccacacgaggagaagacgcgccgtaacgacgcacgaagcacaccagagcgatgacccgccaacagcgcgacgagcaacaaagccgccgagccaccaacgaccatgcggcacacacgacaaagaacaaaatgagccacgcgaacaacaacgagtagatg

SEQ ID NO: 415132 - DNA, 1401 bp, Homo sapiens
ggccctgaggctggccccagcttccgggttggtcgcgcgccttcctgcggctaagatggcgacggagcatcccgagcctcccaaagcagaattgcagctgccgccgccgccacctccaggccactatggcgcctgggctgcccaggagcttcaggccaagttggcagagatcggagctccgatccagggtaatcgcgaggagctggtggagcggctgcagagctacacccgccaggtaggtgttggcggcgggacgtcaggataggccgagcttctccaggagaccttatataccccatcacggctcggtcttcattctttctttatctcggcacagcaaggcggaggcttgccctttttagcttgttcttgcctttgccagcttagttgtaatttcttgtatccatcttggtcctcttcagtgcccagccagagcgctggcagacaggcactgggtacgttttgttgaatgaattgggagcgaacgtcgtttagtgaaacagctagttttggactgacctagagtcctttctcttttgcagactggcatcgtgctgaatcggccggttttgagaggggaagatggggacaaagccgctccacctcccatgtcggcacaggtagggagattcttctgttttttaagattccatctgctgatccttttgtagttcatgagcatgatgattgggtgttcacgtgcatgtgtgagatgtgacacccttgcacattactcgcctgacctgagtggggaaaaaaaaagattccatatgttcagggtagcccttcctctcacttgcagttgttgggcagggaggtactgccatgacagaattgtgagctcttcagttctctctttgatgctgacacttgcctccttttccactgtctgcttctccaaaagcagcttgtggccgggtgcagtggcgcatgcctgtaatcccaccacttcgggatgcttagatgggacgatcgcttgaagccaggagttcgagaccagcctgggcaacatagtgagactctgttactacaaaaaattttaaaaattagctgggcacggtggcacgcgcctataaagtccctataaagaggctcaaggattgctggagccctggggttggaggctgcagtgagctctggttgcgccactgtactccatgtactccatcctgggtgacagaatgagactttgcttctttaaaaaaaaaaggggggaggtgatgggggaggggctgggagagtgtcagaaaaaatagctaatgcatgccaggcttaatacttaggcagtgggttgataggtgcagcaaaccaccatagcacacatttacctatgtaacaaacctgcgcatactgcacatgtacccgaaaacttacaataaaataaattaaaccaaaaaaaag

SEQ ID NO: 415133 - DNA, 425 bp, Homo sapiens
gaaatcctccagtgggctgccctctttaaggacgatgagggggaggaactcagccaagtctgagagggagctcgaagagaattcagattcagcgcctttcccacagacttctatgtctatgtcaggctgcccacccttgttttgggggtccgggggtggttcaacctgtcttaacctgtgtctctttctccctatacagcaaaaaaaacggaaagctcagccccaggacagccgtgggggcagcaagaaatataaggagttcaagttttaggtcccctcacactagccctttttttggccctacgtctggatgcctgggcttcacacaagaaccacctctcccgcagttcccaaggacttgtcatttcatgttcttattttagacctgttttgtaaataaagctgtttcccaaggaaaaatatta

SEQ ID NO: 415134 - DNA, 1031 bp, Homo sapiens
ggccctgaggctggccccagcttccgggttggtcgcgcgccttcctgcggctaagatggcgacggagcatcccgagcctcccaaagcagaattgcagctgccgccgccgccacctccaggccactatggcgcctgggctgcccaggagcttcaggccaagttggcagagatcggagctccgatccaggaggaggagcggctgaagttggctcagcagcaggcggcattgctgatgcagcaggaggagcgtgccaagcagcagggagatcattcgctgaaggaacatgagctcttggagcagcagaagcgggcagctgtgttactggagcaggaacgacagcaggagattgccaagatgggcaccccagtccctcggcccccacaagacatgggccagattggtgtgcgcactcctctgggtcctcgagtagctgctccagtgggcccagtgggccccactcctacagttttgcccatgggagcccctgttccccggcctcgtggtcccccaccgccccctggagatgagaacagagagatggatgacccctctgtgggccccaagatcccccaggctttggagaagatcctgcagctgaaggagagccgccaggaagagatgaattctcagcaggaggaagcaggcacatggaaccagatgactcgcacgcacatggagccagccagcgtcagacactgccgaggacacaggtccgcatctcaaaaggagaaaaacggacgcgtaagaccgagagaagacaaaccgccccaccggtgccacagggcccccagcacagccccgagggacagcgaaaacacacaaaccggatcagcgcacctgatgatccccaccgacgagcagcaacgaacatacaagacagcacgcgaacacacagacacaagaacaacaacagaatatcagcaccagaccagcaaaggcagagccacgccgcgcaccacagccacacagaacgagggaaatcaggagaggaaaacagacagccaacgacaagagcaagacacgagcgaag

SEQ ID NO: 415135 - DNA, 677 bp, Homo sapiens
gaaatcctccagtgggctgccctctttaaggacgatgagggggaggaactcagccaagtctgagagggagctcgaagagaattcagattcagcgcctttcccacagacttctatgtctatgtcaggctgcccacccttgttttgggggtccgggggtggttcaacctgtcttaacctgtgtctctttctccctatacagcaaaaaaaacggaaagctcagccccaggacagccgtgggggcagcaagaaatataaggagttcaagttttaggtcccctcacactagccctttttttggccctacgtctggatgcctgggcttcacacaagaaccacctctcccgcagttcccaaggacttgtcatttcatgttcttattttagacctgttttgtaaataaagctgtttcccaaggaaaaatattatatttaacactcctgagcctccctcatctccttttagccccttcttgcaaaaggactaaaatagtctctttctacaatcactgggctgccccagtaaccacgaacataaactgggattagacggcgcatttgactggtggtgacgccaaccccaggctgaaatctgtgtttcaccactgccctgctttgtaggaaggcttgggggaagtacctctaggtctggtttgaccttactactttgtccttggggag

SEQ ID NO: 415136 - DNA, 2665 bp, Homo sapiens
  misc_feature (28)..(28): n is a, c, g, or t
  misc_feature (30)..(30): n is a, c, g, or t
  misc_feature (42)..(43): n is a, c, g, or t
aacataaggctagtacgaggctggtttnantcggccgagggnnagatggggacaagcgctcacctcccatgtcggcacagctccctggaattcccatgccaccaccacctttgggactcccccctctgcagcctcctccgccagcccccaccacctccaccaggccttggccttggctttcctatggcccacccaccaaatttggggcccccgcctcctctccgtgtgggtgagccagtggcactgtcagaggaggagcggctgaagttggctcagcagcaggcggcattgctgatgcagcaggaggagcgtgccaagcagcagggagatcattcgctgaaggaacatgagctcttggagcagcagaagcgggcagctgtgttactggagcaggaacgacagcaggagattgccaagatgggcaccccagtccctcggcccccacaagacatgggccagattggtgtgcgcactcctctgggtcctcgagtagctgctccagtgggcccagtgggccccactcctacagttttgcccatgggagcccctgttccccggcctcgtggtcccccaccgccccctggagatgagaacagagagatggatgacccctctgtgggccccaagatcccccaggctttggagaagatcctgcagctgaaggagagccgccaggaagagatgaattctcagcaggaggaagaggaaatggaaacagatgctcgctcgtccctgggccagtcagcgtcagagactgaggaggacacagtgtccgtatctaaaaaggagaaaaaccggaagcgtaggaaccgaaagaagaagaaaaagccccagcgggtgcgaggggtgtcctctgagagctctggggaccgggagaaagactcaacccggtcccgtggctctgattccccagcagctgatgttgagattgagtatgtgactgaagaacctgaaatttacgagcccaactttatcttctttaagaggatctttgaggcttttaagctcactgatgatgtgaagaaggagaaagagaaggagccagagaaacttgacaaactggagaactctgcagcccccaagaagaagggatttgaagaggagcacaaggacagtgatgatgacagcagtgatgacgagcaggaaaagaagccagaagcccccaagctgtccaagaagaagttgcgccgaatgaaccgcttcactgtggctgaactcaagcagctggtggctcggcccgatgtcgtggagatgcacgatgtgacagcgcaggaccctaagctcttggttcacctcaaggccactcggaactctgtgcctgtgccacgccactggtgttttaagcgcaaatacctgcagggcaaacggggcattgagaagccccccttcgagctgccagacttcatcaaacgcacaggcatccaggagatgcgagaggccctgcaggagaaggaagaacagaagaccatgaagtcaaaaatgcgagagaaagttcggcctaagatgggcaaaattgacatcgactaccagaaactgcatgatgccttcttcaagtggcagaccaagccaaagctgaccatccatggggacctgtactatgaggggaaggagttcgagacacgactgaaggagaagaagccaggagatctgtctgatgagctaaggatttccttggggatgccagtaggaccaaatgcccacaaggtccctcccccatggctgattgccatgcagcgatatggaccacccccatcgtatcccaacctgaaaatccctgggctgaactcgcccatccctgagagctgttcctttgggtaccatgctggtggctggggcaaacctccagtggatgagactgggaaaccgctctatggggacgtgtttggaaccaatgctgctgaatttcagaccaagactgaggaagaagagattgatcggaccccttggggggaactggaaccatctgatgaagaatcctcagaagaagaggaagaggaagaaagtgatgaagacaaaccagatgagacaggctttattacccctgcagacagtggccttatcactcctggaggcttttcatcagtgcctgctggaatggagacccctgaactcattgagctgaggaagaagaagattgaggaggcgatggacggaagtgagacacctcagctcttcactgtgttgccagagaagagaacagccactgttggaggggccatgatgggatcaacccacatttatgacatgtccacggttatgagccggaagggcccggctcctgagctgcaaggtgtggaagtggcgctggcgcctgaagagttggagctggatcctatggccatgacccagaagtatgaggagcatgtgcgggagcagcaggctcaagtagagaaggaggacttcagtgacatggtggctgagcacgctgccaaacagaagcaaaaaaaacggaaagctcagccccaggacagccgtgggggcagcaagaaatataaggagttcaagttttaggtcccctcacactagccctttttttggccctacgtctggatgcctgggcttcacacaagaaccacctctcccgcagttcccaaggacttgtcatttcatgttcttattttagacctgttttgtaaataaagctgtttcccaaggaaaaatatta

SEQ ID NO: 415137 - DNA, 3361 bp, Homo sapiens
  misc_feature (2909)..(2909): n is a, c, g, or t
ggccctgaggctggccccagcttccgggttggtcgcgcgccttcctgcggctaagatggcgacggagcatcccgagcctcccaaagcagaattgcagctgccgccgccgccacctccaggccactatggcgcctgggctgcccaggagcttcaggccaagttggcagagatcggagctccgatccagggtaatcgcgaggagctggtggagcggctgcagagctacacccgccagactggcatcgtgctgaatcggccggttttgagaggggaagatggggacaaagccgctccacctcccatgtcggcacagctccctggaattcccatgccaccaccacctttgggactcccccctctgcagcctcctccgccagcccccaccacctccaccaggccttggccttggctttcctatggcccacccaccaaatttggggcccccgcctcctctccgtgtgggtgagccagtggcactgtcagaggaggagcggctgaagttggctcagcagcaggcggcattgctgatgcagcaggaggagcgtgccaagcagcagggagatcattcgctgaaggaacatgagctcttggagcagcagaagcgggcagctgtgttactggagcaggaacgacagcaggagattgccaagatgggcaccccagtccctcggcccccacaagacatgggccagattggtgtgcgcactcctctgggtcctcgagtagctgctccagtgggcccagtgggccccactcctacagttttgcccatgggagcccctgttccccggcctcgtggtcccccaccgccccctggagatgagaacagagagatggatgacccctctgtgggccccaagatcccccaggctttggagaagatcctgcagctgaaggagagccgccaggaagagatgaattctcagcaggaggaagaggaaatggaaacagatgctcgctcgtccctgggccagtcagcgtcagagactgaggaggacacagtgtccgtatctaaaaaggagaaaaaccggaagcgtaggaaccgaaagaagaagaaaaagccccagcgggtgcgaggggtgtcctctgagagctctggggaccgggagaaagactcaacccggtcccgtggctctgattccccagcagctgatgttgagattgagtatgtgactgaagaacctgaaatttacgagcccaactttatcttctttaagaggatctttgaggcttttaagctcactgatgatgtgaagaaggagaaagagaaggagccagagaaacttgacaaactggagaactctgcagcccccaagaagaagggatttgaagaggagcacaaggacagtgatgatgacagcagtgatgacgagcaggaaaagaagccagaagcccccaagctgtccaagaagaagttgcgccgaatgaaccgcttcactgtggctgaactcaagcagctggtggctcggcccgatgtcgtggagatgcacgatgtgacagcgcaggaccctaagctcttggttcacctcaaggccactcggaactctgtgcctgtgccacgccactggtgttttaagcgcaaatacctgcagggcaaacggggcattgagaagccccccttcgagctgccagacttcatcaaacgcacaggcatccaggagatgcgagaggccctgcaggagaaggaagaacagaagaccatgaagtcaaaaatgcgagagaaagttcggcctaagatgggcaaaattgacatcgactaccagaaactgcatgatgccttcttcaagtggcagaccaagccaaagctgaccatccatggggacctgtactatgaggggaaggagttcgagacacgactgaaggagaagaagccaggagatctgtctgatgagctaaggatttccttggggatgccagtaggaccaaatgcccacaaggtccctcccccatggctgattgccatgcagcgatatggaccacccccatcgtatcccaacctgaaaatccctgggctgaactcgcccatccctgagagctgttcctttgggtaccatgctggtggctggggcaaacctccagtggatgagactgggaaaccgctctatggggacgtgtttggaaccaatgctgctgaatttcagaccaagactgaggaagaagagattgatcggaccccttggggggaactggaaccatctgatgaagaatcctcagaagaagaggaagaggaagaaagtgatgaagacaaaccagatgagacaggctttattacccctgcagacagtggccttatcactcctggaggcttttcatcagtgcctgctggaatggagacccctgaactcattgagctgaggaagaagaagattgaggaggcgatggacggaagtgagacacctcagctcttcactgtgttgccagagaagagaacagccactgttggaggggccatgatgggatcaacccacatttatgacatgtccacggttatgagccggaagggcccggctcctgagctgcaaggtgtggaagtggcgctggcgcctgaagagttggagctggatcctatggccatgacccagaagtatgaggagcatgtgcgggagcagcaggctcaagtagagaaggaggacttcagtgacatggtggctgagcacgctgccaaacagaagcaaaaaaaacggaaagctcagccccaggacagccgtgggggcagcaagaaatataaggagttcaagttttaggtcccctcacactagccctttttttggccctacgtctggatgcctgggcttcacacaagaaccacctctcccgcagttcccaaggacttgtcatttcatgttcttattttagacctgttttgtaaataaagctgtttcccaaggaaaaatattaaaaaaaaaaanaaaaaaaaaaaaaagaaagaaaaaaaaaaaaataacaacaaaaaaggggccaaaaaaaaaaaagaaaaccaaaaagctaggagtaacaaagatgtggggtccacaataatagaggggaagttaatatatattaataaaagctcaaaggcacgtgggcacggagacgttattaacaaaagtgagggaacgggggaaaaacgcgtgttaagttgtggagaatctatgtggtgaaagggcaacttaatttcggtgagaaagataacaataattgggcacaacaattaacatgaaaggagatattttcaaagggatgagtaggggtaacacttaggcggagtttaaaaggggctaaaggagggttaaactcgagcggacatagtgtgtatggattgaacatttgggatcatgacaattgattatggaagttatatacagggagttgtgaaaacata

SEQ ID NO: 415138 - DNA, 2972 bp, Homo sapiens
ggccctgaggctggccccagcttccgggttggtcgcgcgccttcctgcggctaagatggcgacggagcatcccgagcctcccaaagcagaattgcagctgccgccgccgccacctccaggccactatggcgcctgggctgcccaggagcttcaggccaagttggcagagatcggagctccgatccagggtaatcgcgaggagctggtggagcggctgcagagctacacccgccagactggcatcgtgctgaatcggccggttttgagaggggaagatggggacaaagccgctccacctcccatgtcggcacagctccctggaattcccatgccaccaccacctttgggactcccccctctgcagcctcctccgccagcccccaccacctccaccaggccttggccttggctttcctatggcccacccaccaaatttggggcccccgcctcctctccgtgtgggtgagccagtggcactgtcagaggaggagcggctgaagttggctcagcagcaggcggcattgctgatgcagcaggaggagcgtgccaagcagcagggagatcattcgctgaaggaacatgagctcttggagcagcagaagcgggcagctgtgttactggagcaggaacgacagcaggagattgccaagatgggcaccccagtccctcggcccccacaagacatgggccagattggtgtgcgcactcctctgggtcctcgagtagctgctccagtgggcccagtgggccccactcctacagttttgcccatgggagcccctgttccccggcctcgtggtcccccaccgccccctggagatgagaacagagagatggatgacccctctgtgggccccaagatcccccaggctttggagaagatcctgcagctgaaggagagccgccaggaagagatgaattctcagcaggaggaagaggaaatggaaacagatgctcgctcgtccctgggccagtcagcgtcagagactgaggaggacacagtgtccgtatctaaaaaggagaaaaaccggaagcgtaggaaccgaaagaagaagaaaaagccccagcgggtgcgaggggtgtcctctgagagctctggggaccgggagaaagactcaacccggtcccgtggctctgattccccagcagctgatgttgagattgagtatgtgactgaagaacctgaaatttacgagcccaactttatcttctttaagaggatctttgaggcttttaagctcactgatgatgtgaagaaggagaaagagaaggagccagagaaacttgacaaactggagaactctgcagcccccaagaagaagggatttgaagaggagcacaaggacagtgatgatgacagcagtgatgacgagcaggaaaagaagccagaagcccccaagctgtccaagaagaagttgcgccgaatgaaccgcttcactgtggctgaactcaagcagctggtggctcggcccgatgtcgtggagatgcacgatgtgacagcgcaggaccctaagctcttggttcacctcaaggccactcggaactctgtgcctgtgccacgccactggtgttttaagcgcaaatacctgcagggcaaacggggcattgagaagccccccttcgagctgccagacttcatcaaacgcacaggcatccaggagatgcgagaggccctgcaggagaaggaagaacagaagaccatgaagtcaaaaatgcgagagaaagttcggcctaagatgggcaaaattgacatcgactaccagaaactgcatgatgccttcttcaagtggcagaccaagccaaagctgaccatccatggggacctgtactatgaggggaaggagttcgagacacgactgaaggagaagaagccaggagatctgtctgatgagctaaggatttccttggggatgccagtaggaccaaatgcccacaaggtccctcccccatggctgattgccatgcagcgatatggaccacccccatcgtatcccaacctgaaaatccctgggctgaactcgcccatccctgagagctgttcctttgggtaccatgctggtggctggggcaaacctccagtggatgagactgggaaaccgctctatggggacgtgtttggaaccaatgctgctgaatttcagaccaagactgaggaagaagagattgatcggaccccttggggggaactggaaccatctgatgaagaatcctcagaagaagaggaagaggaagaaagtgatgaagacaaaccagatgagacaggctttattacccctgcagacagtggccttatcactcctggaggcttttcatcagtgcctgctggaatggagacccctgaactcattgagctgaggaagaagaagattgaggaggcgatggacggaagtgagacacctcagctcttcactgtgttgccagagaagagaacagccactgttggaggggccatgatgggatcaacccacatttatgacatgtccacggttatgagccggaagggcccggctcctgagctgcaaggtgtggaagtggcgctggcgcctgaagagttggagctggatcctatggccatgacccagaagtatgaggagcatgtgcgggagcagcaggctcaagtagagaaggaggacttcagtgacatggtggctgagcacgctgccaaacagaagcaaaaaaaacggaaagctcagccccaggacagccgtgggggcagcaagaaatataaggagttcaagttttaggtcccctcacactagccctttttttggccctacgtctggatgcctgggcttcacacaagaaccacctctcccgcagttcccaaggacttgtcatttcatgttcttattttagacctgttttgtaaataaagctgtttcccaaggaaaaatattattaatttagtaagtattattattttaatataaaataaaaaattgccatcatttacaacttctaattggtaaact

SEQ ID NO: 415139 - DNA, 3150 bp, Homo sapiens
ggccctgaggctggccccagcttccgggttggtcgcgcgccttcctgcggctaagatggcgacggagcatcccgagcctcccaaagcagaattgcagctgccgccgccgccacctccaggccactatggcgcctgggctgcccaggagcttcaggccaagttggcagagatcggagctccgatccagggtaatcgcgaggagctggtggagcggctgcagagctacacccgccagactggcatcgtgctgaatcggccggttttgagaggggaagatggggacaaagccgctccacctcccatgtcggcacagctccctggaattcccatgccaccaccacctttgggactcccccctctgcagcctcctccgccagcccccaccacctccaccaggccttggccttggctttcctatggcccacccaccaaatttggggcccccgcctcctctccgtgtgggtgagccagtggcactgtcagaggaggagcggctgaagttggctcagcagcaggcggcattgctgatgcagcaggaggagcgtgccaagcagcagggagatcattcgctgaaggaacatgagctcttggagcagcagaagcgggcagctgtgttactggagcaggaacgacagcaggagattgccaagatgggcaccccagtccctcggcccccacaagacatgggccagattggtgtgcgcactcctctgggtcctcgagtagctgctccagtgggcccagtgggccccactcctacagttttgcccatgggagcccctgttccccggcctcgtggtcccccaccgccccctggagatgagaacagagagatggatgacccctctgtgggccccaagatcccccaggctttggagaagatcctgcagctgaaggagagccgccaggaagagatgaattctcagcaggaggaagaggaaatggaaacagatgctcgctcgtccctgggccagtcagcgtcagagactgaggaggacacagtgtccgtatctaaaaaggagaaaaaccggaagcgtaggaaccgaaagaagaagaaaaagccccagcgggtgcgaggggtgtcctctgagagctctggggaccgggagaaagactcaacccggtcccgtggctctgattccccagcagctgatgttgagattgagtatgtgactgaagaacctgaaatttacgagcccaactttatcttctttaagaggatctttgaggcttttaagctcactgatgatgtgaagaaggagaaagagaaggagccagagaaacttgacaaactggagaactctgcagcccccaagaagaagggatttgaagaggagcacaaggacagtgatgatgacagcagtgatgacgagcaggaaaagaagccagaagcccccaagctgtccaagaagaagttgcgccgaatgaaccgcttcactgtggctgaactcaagcagctggtggctcggcccgatgtcgtggagatgcacgatgtgacagcgcaggaccctaagctcttggttcacctcaaggccactcggaactctgtgcctgtgccacgccactggtgttttaagcgcaaatacctgcagggcaaacggggcattgagaagccccccttcgagctgccagacttcatcaaacgcacaggcatccaggagatgcgagaggccctgcaggagaaggaagaacagaagaccatgaagtcaaaaatgcgagagaaagttcggcctaagatgggcaaaattgacatcgactaccagaaactgcatgatgccttcttcaagtggcagaccaagccaaagctgaccatccatggggacctgtactatgaggggaaggagttcgagacacgactgaaggagaagaagccaggagatctgtctgatgagctaaggatttccttggggatgccagtaggaccaaatgcccacaaggtccctcccccatggctgattgccatgcagcgatatggaccacccccatcgtatcccaacctgaaaatccctgggctgaactcgcccatccctgagagctgttcctttgggtaccatgctggtggctggggcaaacctccagtggatgagactgggaaaccgctctatggggacgtgtttggaaccaatgctgctgaatttcagaccaagactgaggaagaagagattgatcggaccccttggggggaactggaaccatctgatgaagaatcctcagaagaagaggaagaggaagaaagtgatgaagacaaaccagatgagacaggctttattacccctgcagacagtggccttatcactcctggaggcttttcatcagtgcctgctggaatggagacccctgaactcattgagctgaggaagaagaagattgaggaggcgatggacggaagtgagacacctcagctcttcactgtgttgccagagaagagaacagccactgttggaggggccatgatgggatcaacccacatttatgacatgtccacggttatgagccggaagggcccggctcctgagctgcaaggtgtggaagtggcgctggcgcctgaagagttggagctggatcctatggccatgacccagaagtatgaggagcatgtgcgggagcagcaggctcaagtagagaaggaggacttcagtgacatggtggctgagcacgctgccaaacagaagcaaaaaaaacggaaagctcagccccaggacagccgtgggggcagcaagaaatataaggagttcaagttttaggtcccctcacactagccctttttttggccctacgtctggatgcctgggcttcacacaagaaccacctctcccgcagttcccaaggacttgtcatttcatgttcttattttagacctgttttgtaaataaagctgtttcccaaggaaaaatattatatttaacactcctgagcctccctcatctccttttagccccttcttgcaaaaggactaaaatagtctctttctacaatcactgggctgccccagtaaccacgaacataaactgggattagacggcgcatttgactggtggtgacgccaaccccaggctgaaatctgtgtttcaccactgccctgctttgtaggaaggcttgggggaagtacctctaggtctggtttgaccttactactttgtccttggggag

SEQ ID NO: 415140 - DNA, 2087 bp, Homo sapiens
ggccctgaggctggccccagcttccgggttggtcgcgcgccttcctgcggctaagatggcgacggagcatcccgagcctcccaaagcagaattgcagctgccgccgccgccacctccaggccactatggcgcctgggctgcccaggagcttcaggccaagttggcagagatcggagctccgatccagggtaatcgcgaggagctggtggagcggctgcagagctacacccgccagactggcatcgtgctgaatcggccggttttgagaggggaagatggggacaaagccgctccacctcccatgtcggcacagctccctggaattcccatgccaccaccacctttgggaattgagtatgtgactgaagaacctgaaatttacgagcccaactttatcttctttaagaggatctttgaggcttttaagctcactgatgatgtgaagaaggagaaagagaaggagccagagaaacttgacaaactggagaactctgcagcccccaagaagaagggatttgaagaggagcacaaggacagtgatgatgacagcagtgatgacgagcaggaaaagaagccagaagcccccaagctgtccaagaagaagttgcgccgaatgaaccgcttcactgtggctgaactcaagcagctggtggctcggcccgatgtcgtggagatgcacgatgtgacagcgcaggaccctaagctcttggttcacctcaaggccactcggaactctgtgcctgtgccacgccactggtgttttaagcgcaaatacctgcagggcaaacggggcattgagaagccccccttcgagctgccagacttcatcaaacgcacaggcatccaggagatgcgagaggccctgcaggagaaggaagaacagaagaccatgaagtcaaaaatgcgagagaaagttcggcctaagatgggcaaaattgacatcgactaccagaaactgcatgatgccttcttcaagtggcagaccaagccaaagctgaccatccatggggacctgtactatgaggggaaggagttcgagacacgactgaaggagaagaagccaggagatctgtctgatgagctaaggatttccttggggatgccagtaggaccaaatgcccacaaggtccctcccccatggctgattgccatgcagcgatatggaccacccccatcgtatcccaacctgaaaatccctgggctgaactcgcccatccctgagagctgttcctttgggtaccatgctggtggctggggcaaacctccagtggatgagactgggaaaccgctctatggggacgtgtttggaaccaatgctgctgaatttcagaccaagactgaggaagaagagattgatcggaccccttggggggaactggaaccatctgatgaagaatcctcagaagaagaggaagaggaagaaagtgatgaagacaaaccagatgagacaggctttattacccctgcagacagtggccttatcactcctggaggcttttcatcagtgcctgctggaatggagacccctgaactcattgagctgaggaagaagaagattgaggaggcgatggacggaagtgagacacctcagctcttcactgtgttgccagagaagagaacagccactgttggaggggccatgatgggatcaacccacatttatgacatgtccacggttatgagccggaagggcccggctcctgagctgcaaggtgtggaagtggcgctggcgcctgaagagttggagctggatcctatggccatgacccagaagtatgaggagcatgtgcgggagcagcaggctcaagtagagaaggaggacttcagtgacatggtggctgagcacgctgccaaacagaagcaaaaaaaacggaaagctcagccccaggacagccgtgggggcagcaagaaatataaggagttcaagttttaggtcccctcacactagccctttttttggccctacgtctggatgcctgggcttcacacaagaaccacctctcccgcagttcccaaggacttgtcatttcatgttcttattttagacctgttttgtaaataaagctgtttcccaaggaaaaatatta

SEQ ID NO: 415141 - DNA, 2844 bp, Homo sapiens
ggccctgaggctggccccagcttccgggttggtcgcgcgccttcctgcggctaagatggcgacggagcatcccgagcctcccaaagcagaattgcagctgccgccgccgccacctccaggccactatggcgcctgggctgcccaggagcttcaggccaagttggcagagatcggagctccgatccagggtaatcgcgaggagctggtggagcggctgcagagctacacccgccagactggcatcgtgctgaatcggccggttttgagaggggaagatggggacaaagccgctccacctcccatgtcggcacagctccctggaattcccatgccaccaccacctttgggactcccccctctgcagcctcctccgccagcccccaccacctccaccaggccttggccttggctttcctatggcccacccaccaaatttggggcccccgcctcctctccgtgtgggtgagccagtggcactgtcagaggaggagcggctgaagttggctcagcagcaggcggcattgctgatgcagcaggaggagcgtgccaagcagcagggagatcattcgctgaaggaacatgagctcttggagcagcagaagcgggcagctgtgttactggagcaggaacgacagcaggagattgccaagatgggcaccccagtccctcggcccccacaagacatgggccagattggtgtgcgcactcctctgggtcctcgagtagctgctccagtgggcccagtgggccccactcctacagttttgcccatgggagcccctgttccccggcctcgtggtcccccaccgccccctggagatgagaacagagagatggatgacccctctgtgggccccaagatcccccaggctttggagaagatcctgcagctgaaggagagccgccaggaagagatgaattctcagcaggaggaagaggaaatggaaacagatgctcgctcgtccctgggccagtcagcgtcagagactgaggaggacacagtgtccgtatctaaaaaggagaaaaaccggaagcgtaggaaccgaaagaagaagaaaaagccccagcgggtgcgaggggtgtcctctgagagctctggggaccgggagaaagactcaacccggtcccgtggctctgattccccagcagctgatgttgagattgagtatgtgactgaagaacctgaaatttacgagcccaactttatcttctttaagaggatctttgaggcttttaagctcactgatgatgtgaagaaggagaaagagaaggagccagagaaacttgacaaactggagaactctgcagcccccaagaagaagggatttgaagaggagcacaaggacagtgatgatgacagcagtgatgacgagcaggaaaagaagccagaagcccccaagctgtccaagaagaagttgcgccgaatgaaccgcttcactgtggctgaactcaagcagctggtggctcggcccgatgtcgtggagatgcacgatgtgacagcgcaggaccctaagctcttggttcacctcaaggccactcggaactctgtgcctgtgccacgccactggtgttttaagcgcaaatacctgcagggcaaacggggcattgagaagccccccttcgagctgccagacttcatcaaacgcacaggcatccaggagatgcgagaggccctgcaggagaaggaagaacagaagaccatgaagtcaaaaatgcgagagaaagttcggcctaagatgggcaaaattgacatcgactaccagaaactgcatgatgccttcttcaagtggcagaccaagccaaagctgaccatccatggggacctgtactatgaggggaaggagttcgagacacgactgaaggagaagaagccaggagatctgtctgatgagctaaggatttccttggggatgccagtaggaccaaatgcccacaaggtccctcccccatggctgattgccatgcagcgatatggaccacccccatcgtatcccaaccatgctggtggctggggcaaacctccagtggatgagactgggaaaccgctctatggggacgtgtttggaaccaatgctgctgaatttcagaccaagactgaggaagaagagattgatcggaccccttggggggaactggaaccatctgatgaagaatcctcagaagaagaggaagaggaagaaagtgatgaagacaaaccagatgagacaggctttattacccctgcagacagtggccttatcactcctggaggcttttcatcagtgcctgctggaatggagacccctgaactcattgagctgaggaagaagaagattgaggaggcgatggacggaagtgagacacctcagctcttcactgtgttgccagagaagagaacagccactgttggaggggccatgatgggatcaacccacatttatgacatgtccacggttatgagccggaagggcccggctcctgagctgcaaggtgtggaagtggcgctggcgcctgaagagttggagctggatcctatggccatgacccagaagtatgaggagcatgtgcgggagcagcaggctcaagtagagaaggaggacttcagtgacatggtggctgagcacgctgccaaacagaagcaaaaaaaacggaaagctcagccccaggacagccgtgggggcagcaagaaatataaggagttcaagttttaggtcccctcacactagccctttttttggccctacgtctggatgcctgggcttcacacaagaaccacctctcccgcagttcccaaggacttgtcatttcatgttcttattttagacctgttttgtaaataaagctgtttcccaaggaaaaatatta

SEQ ID NO: 415142 - DNA, 2926 bp, Homo sapiens
ggccctgaggctggccccagcttccgggttggtcgcgcgccttcctgcggctaagatggcgacggagcatcccgagcctcccaaagcagaattgcagctgccgccgccgccacctccaggccactatggcgcctgggctgcccaggagcttcaggccaagttggcagagatcggagctccgatccagggtaatcgcgaggagctggtggagcggctgcagagctacacccgccagactggcatcgtgctgaatcggccggttttgagaggggaagatggggacaaagccgctccacctcccatgtcggcacagctccctggaattcccatgccaccaccacctttgggactcccccctctgcagcctcctccgccagcccccaccacctccaccaggccttggccttggctttcctatggcccacccaccaaatttggggcccccgcctcctctccgtgtgggtgagccagtggcactgtcagaggaggagcggctgaagttggctcagcagcaggcggcattgctgatgcagcaggaggagcgtgccaagcagcagggagatcattcgctgaaggaacatgagctcttggagcagcagaagcgggcagctgtgttactggagcaggaacgacagcaggagattgccaagatgggcaccccagtccctcggcccccacaagacatgggccagattggtgtgcgcactcctctgggtcctcgagtagctgctccagtgggcccagtgggccccactcctacagttttgcccatgggagcccctgttccccggcctcgtggtcccccaccgccccctggagatgagaacagagagatggatgacccctctgtgggccccaagatcccccaggctttggagaagatcctgcagctgaaggagagccgccaggaagagatgaattctcagcaggaggaagaggaaatggaaacagatgctcgctcgtccctgggccagtcagcgtcagagactgaggaggacacagtgtccgtatctaaaaaggagaaaaaccggaagcgtaggaaccgaaagaagaagaaaaagccccagcgggtgcgaggggtgtcctctgagagctctggggaccgggagaaagactcaacccggtcccgtggctctgattccccagcagctgatgttgagattgagtatgtgactgaagaacctgaaatttacgagcccaactttatcttctttaagaggatctttgaggcttttaagctcactgatgatgtgaagaaggagaaagagaaggagccagagaaacttgacaaactggagaactctgcagcccccaagaagaagggatttgaagaggagcacaaggacagtgatgatgacagcagtgatgacgagcaggaaaagaagccagaagcccccaagctgtccaagaagaagttgcgccgaatgaaccgcttcactgtggctgaactcaagcagctggtggctcggcccgatgtcgtggagatgcacgatgtgacagcgcaggaccctaagctcttggttcacctcaaggccactcggaactctgtgcctgtgccacgccactggtgttttaagcgcaaatacctgcagggcaaacggggcattgagaagccccccttcgagctgccagacttcatcaaacgcacaggcatccaggagatgcgagaggccctgcaggagaaggaagaacagaagaccatgaagtcaaaaatgcgagagaaagttcggcctaagatgggcaaaattgacatcgactaccagaaactgcatgatgccttcttcaagtggcagaccaagccaaagctgaccatccatggggacctgtactatgaggggaaggagttcgagacacgactgaaggagaagaagccaggagatctgtctgatgagctaaggatttccttggggatgccagtaggaccaaatgcccacaaggtccctcccccatggctgattgccatgcagcgatatggaccacccccatcgtatcccaacctgaaaatccctgggctgaactcgcccatccctgagagctgttcctttgggtaccatgctggtggctggggcaaacctccagtggatgagactgggaaaccgctctatggggacgtgtttggaaccaatgctgctgaatttcagaccaagactgaggaagaagagattgatcggaccccttggggggaactggaaccatctgatgaagaatcctcagaagaagaggaagaggaagaaagtgatgaagacaaaccagatgagacaggctttattacccctgcagacagtggccttatcactcctggaggcttttcatcagtgcctgctggaatggagacccctgaactcattgagctgaggaagaagaagattgaggaggcgatggacggaagtgagacacctcagctcttcactgtgttgccagagaagagaacagccactgttggaggggccatgatgggatcaacccacatttatgacatgtccacggttatgagccggaagggcccggctcctgagctgcaaggtgtggaagtggcgctggcgcctgaagagttggagctggatcctatggccatgacccagaagtatgaggagcatgtgcgggagcagcaggctcaagtagagaaggaggagggttcgagtcgaacattggtgcgagtagagtcagtgctagcccgaaaccagaagctaacaaaaacgagagagatcagccccaggacaagcccgtgaggggcagacaagagagataaaggagattcaagcttgtaaggtcccctacagcacctacgccctctggatttaggccttacagtccaggatgccatgggatttaacacaagggaccactttatccgagcagttctcgaagacgtttgtcactttaatgttcgtattgtaaccgatcctgagtactcaagtgtttcacg

SEQ ID NO: 415143 - DNA, 3010 bp, Homo sapiens
ggccctgaggctggccccagcttccgggttggtcgcgcgccttcctgcggctaagatggcgacggagcatcccgagcctcccaaagcagaattgcagctgccgccgccgccacctccaggccactatggcgcctgggctgcccaggagcttcaggccaagttggcagagatcggagctccgatccagggtaatcgcgaggagctggtggagcggctgcagagctacacccgccagactggcatcgtgctgaatcggccggttttgagaggggaagatggggacaaagccgctccacctcccatgtcggcacagctccctggaattcccatgccaccaccacctttgggactcccccctctgcagcctcctccgccagcccccaccacctccaccaggccttggccttggctttcctatggcccacccaccaaatttggggcccccgcctcctctccgtgtgggtgagccagtggcactgtcagaggaggagcggctgaagttggctcagcagcaggcggcattgctgatgcagcaggaggagcgtgccaagcagcagggagatcattcgctgaaggaacatgagctcttggagcagcagaagcgggcagctgtgttactggagcaggaacgacagcaggagattgccaagatgggcaccccagtccctcggcccccacaagacatgggccagattggtgtgcgcactcctctgggtcctcgagtagctgctccagtgggcccagtgggccccactcctacagttttgcccatgggagcccctgttccccggcctcgtggtcccccaccgccccctggagatgagaacagagagatggatgacccctctgtgggccccaagatcccccaggctttggagaagatcctgcagctgaaggagagccgccaggaagagatgaattctcagcaggaggaagaggaaatggaaacagatgctcgctcgtccctgggccagtcagcgtcagagactgaggaggacacagtgtccgtatctaaaaaggagaaaaaccggaagcgtaggaaccgaaagaagaagaaaaagccccagcgggtgcgaggggtgtcctctgagagctctggggaccgggagaaagactcaacccggtcccgtggctctgattccccagcagctgatgttgagattgagtatgtgactgaagaacctgaaatttacgagcccaactttatcttctttaagaggatctttgaggcttttaagctcactgatgatgtgaagaaggagaaagagaaggagccagagaaacttgacaaactggagaactctgcagcccccaagaagaagggatttgaagaggagcacaaggacagtgatgatgacagcagtgatgacgagcaggaaaagaagccagaagcccccaagctgtccaagaagaagttgcgccgaatgaaccgcttcactgtggctgaactcaagcagctggtggctcggcccgatgtcgtggagatgcacgatgtgacagcgcaggaccctaagctcttggttcacctcaaggccactcggaactctgtgcctgtgccacgccactggtgttttaagcgcaaatacctgcagggcaaacggggcattgagaagccccccttcgagctgccagacttcatcaaacgcacaggcatccaggagatgcgagaggccctgcaggagaaggaagaacagaagaccatgaagtcaaaaatgcgagagaaagttcggcctaagatgggcaaaattgacatcgactaccagaaactgcatgatgccttcttcaagtggcagaccaagccaaagctgaccatccatggggacctgtactatgaggggaaggagttcgagacacgactgaaggagaagaagccaggagatctgtctgatgagctaaggatttccttggggatgccagtaggaccaaatgcccacaaggtccctcccccatggctgattgccatgcagcgatatggaccacccccatcgtatcccaacctgaaaatccctgggctgaactcgcccatccctgagagctgttcctttgggtaccatgctggtggctggggcaaacctccagtggatgagactgggaaaccgctctatggggacgtgtttggaaccaatgctgctgaatttcagaccaagactgaggaagaagagattgatcggaccccttggggggaactggaaccatctgatgaagaatcctcagaagaagaggaagaggaagaaagtgatgaagacaaaccagatgagacaggctttattacccctgcagacagtggccttatcactcctggaggcttttcatcagtgcctgctggaatggagacccctgaactcattgagctgaggaagaagaagattgaggaggcgatggacggaagtgagacacctcagctcttcactgtgttgccagagaagagaacagccactgttggaggggccatgatgggatcaacccacatttatgacatgtccacggttatgagccggaagggcccggctcctgagctgcaaggtgtggaagtggcgctggcgcctgaagagttggagctggatcctatggccatgacccagaagttgcgccgaatgaaccgcttcactgtggctgaactcaagcagctggtggctcggcccgatgtcgtggagatgcacgatgtgacagcgcaggaccctaagctcttggttcacctcaaggccactcggaactctgtgcctgtgccacgccactggtgttttaagcgcaaatacctgcagggcaaacggggcattgagaagccccccttcgagctgccagacttcatcaaacgcacaggcatccaggagatgcgagaggccctgcaggagaaggaagaacagaagaccatgaagtcaaaaatgcgagagaaagttcggcctaagatgggcaaaattgacatcgactaccagaaactgcatgatgccttcttcatgtagctgaccagcctaccagatcttttatgcgatgatgggatccatggtaccga

SEQ ID NO: 415144 - DNA, 1583 bp, Homo sapiens
attgactctacaggatcctttgtccatcccccttcgtgatcacagcatttatgacgagcaggaaaagaagccagaagcccccaagctgtccaagaagaagttgcgccgaatgaaccgcttcactgtggctgaactcaagcagctggtggctcggcccgatgtcgtggagatgcacgatgtgacagcgcaggaccctaagctcttggttcacctcaaggccactcggaactctgtgcctgtgccacgccactggtgttttaagcgcaaatacctgcagggcaaacggggcattgagaagccccccttcgagctgccagacttcatcaaacgcacaggcatccaggagatgcgagaggccctgcaggagaaggaagaacagaagaccatgaagtcaaaaatgcgagagaaagttcggcctaagatgggcaaaattgacatcgactaccagaaactgcatgatgccttcttcaagtggcagaccaagccaaagctgaccatccatggggacctgtactatgaggggaaggagttcgagacacgactgaaggagaagaagccaggagatctgtctgatgagctaaggatttccttggggatgccagtaggaccaaatgcccacaaggtccctcccccatggctgattgccatgcagcgatatggaccacccccatcgtatcccaacctgaaaatccctgggctgaactcgcccatccctgagagctgttcctttgggtaccatgctggtggctggggcaaacctccagtggatgagactgggaaaccgctctatggggacgtgtttggaaccaatgctgctgaatttcagaccaagactgaggaagaagagattgatcggaccccttggggggaactggaaccatctgatgaagaatcctcagaagaagaggaagaggaagaaagtgatgaagacaaaccagatgagacaggctttattacccctgcagacagtggccttatcactcctggaggcttttcatcagtgcctgctggaatggagacccctgaactcattgagctgaggaagaagaagattgaggaggcgatggacggaagtgagacacctcagctcttcactgtgttgccagagaagagaacagccactgttggaggggccatgatgggatcaacccacatttatgacatgtccacggttatgagccggaagggcccggctcctgagctgcaaggtgtggaagtggcgctggcgcctgaagagttggagctggatcctatggccatgacccagaagtatgaggagcatgtgcgggagcagcaggctcaagtagagaaggaggacttcagtgacatggtggctgagcacgctgccaaacagaagcaaaaaaaacggaaagctcagccccaggacagccgtgggggcagcaagaaatataaggagttcaagttttaggtcccctcacactagccctttttttggccctacgtctggatgcctgggcttcacacaagaaccacctctcccgcagttcccaaggacttgtcatttcatgttcttattttagacctgttttgtaaataaagctgtttcccaaggaaaaatatta

SEQ ID NO: 415145 - DNA, 2594 bp, Homo sapiens
ggccctgaggctggccccagcttccgggttggtcgcgcgccttcctgcggctaagatggcgacggagcatcccgagcctcccaaagcagaattgcagctgccgccgccgccacctccaggccactatggcgcctgggctgcccaggagcttcaggccaagttggcagagatcggagctccgatccagggtaatcgcgaggagctggtggagcggctgcagagctacacccgccagactggcatcgtgctgaatcggccggttttgagaggggaagatggggacaaagccgctccacctcccatgtcggcacagctccctggaattcccatgccaccaccacctttgggactcccccctctgcagcctcctccgccagcccccaccacctccaccaggccttggccttggctttcctatggcccacccaccaaatttggggcccccgcctcctctccgtgtgggtgagccagtggcactgtcagaggaggagcggctgaagttggctcagcagcaggcggcattgctgatgcagcaggaggagcgtgccaagcagcagggagatcattcgctgaaggaacatgagctcttggagcagcagaagcgggcagctgtgttactggagcaggaacgacagcaggagattgccaagatgggcaccccagtccctcggcccccacaagacatgggccagattggtgtgcgcactcctctgggtcctcgagtagctgctccagtgggcccagtgggccccactcctacagttttgcccatgggagcccctgttccccggcctcgtggtcccccaccgccccctggagatgagaacagagagatggatgacccctctgtgggccccaagatcccccaggctttggagaagatcctgcagctgaaggagagccgccaggaagagatgaattctcagcaggaggaagaggaaatggaaacagatgctcgctcgtccctgggccagtcagcgtcagagactgaggaggacacagtgtccgtatctaaaaaggagaaaaaccggaagcgtaggaaccgaaagaagaagaaaaagccccagcgggtgcgaggggtgtcctctgagagctctggggaccgggagaaagactcaacccggtcccgtggctctgattccccagcagctgatgttgagattgagtatgtgactgaagaacctgaaatttacgagcccaactttatcttctttaagaggatctttgaggcttttaagctcactgatgatgtgaagaaggagaaagagaaggagccagagaaacttgacaaactggagaactctgcagcccccaagaagaagggatttgaagaggagcacaaggacagtgatgatgacagcagtgatgacgagcaggaaaagaagccagaagcccccaagctgtccaagaagaagttgcgccgaatgaaccgcttcactgtggctgaactcaagcagctggtggctcggcccgatgtcgtggagatgcacgatgtgacagcgcaggaccctaagctcttggttcacctcaaggccactcggaactctgtgcctgtgccacgccactggtgttttaagcgcaaatacctgcagggcaaacggggcattgagaagccccccttcgagctgccagacttcatcaaacgcacaggcatccaggagatgcgagaggccctgcaggagaaggaagaacagaagaccatgaagtcaaaaatgcgagagaaagttcggcctaagatgggcaaaattgacatcgactaccagaaactgcatgatgccttcttcaagtggcagaccaagccaaagctgaccatccatggggacctgtactatgaggggaaggagttcgagacacgactgaaggagaagaagccaggagatctgtctgatgagctaaggatttccttggggatgccagtaggaccaaatgcccacaaggtccctcccccatggctgattgccatgcagcgatatggaccacccccatcgtatcccaacctgaaaatccctgggctgaactcgcccatccctgagagctgttcctttgggtaccatgctggtggctggggcaaacctccagtggatgagactgggaaaccgctctatggggacgtgtttggaaccaatgctgctgaatttcagaccaagactgaggaagaagagattgatcggaccccttggggggaactggaaccatctgatgaagaatcctcagaagaagaggaagaggaagaaagtgatgaagacaaaccagatgagacaggctttattacccctgcagacagtggccttatcactcctggaggcttttcatcagtgcctgctggaatggagacccctgaactcattgagctgaggaagaagaagattgaggaggcgatggacggaagtgagacacctcagctcttcactgtgttgccagagaagagaacagccactgttggaggggccatgatgggatcaacccacatttatgacatgtccacgttatgagcggaagggcggtctgagctgagggtgaatgggcgggctgaaagtggtggtcatgcatacaagttaggcttgggacgggtatggaggaacggcttaacgggt

SEQ ID NO: 415146 - DNA, 2705 bp, Homo sapiens
ggccctgaggctggccccagcttccgggttggtcgcgcgccttcctgcggctaagatggcgacggagcatcccgagcctcccaaagcagaattgcagctgccgccgccgccacctccaggccactatggcgcctgggctgcccaggagcttcaggccaagttggcagagatcggagctccgatccagggtaatcgcgaggagctggtggagcggctgcagagctacacccgccagactggcatcgtgctgaatcggccggttttgagaggggaagatggggacaaagccgctccacctcccatgtcggcacagctccctggaattcccatgccaccaccacctttgggactcccccctctgcagcctcctccgccagcccccaccacctccaccaggccttggccttggctttcctatggcccacccaccaaatttggggcccccgcctcctctccgtgtgggtgagccagtggcactgtcagaggaggagcggctgaagttggctcagcagcaggcggcattgctgatgcagcaggaggagcgtgccaagcagcagggagatcattcgctgaaggaacatgagctcttggagcagcagaagcgggcagctgtgttactggagcaggaacgacagcaggagattgccaagatgggcaccccagtccctcggcccccacaagacatgggccagattggtgtgcgcactcctctgggtcctcgagtagctgctccagtgggcccagtgggccccactcctacagttttgcccatgggagcccctgttccccggcctcgtggtcccccaccgccccctggagatgagaacagagagatggatgacccctctgtgggccccaagatcccccaggctttggagaagatcctgcagctgaaggagagccgccaggaagagatgaattctcagcaggaggaagaggaaatggaaacagatgctcgctcgtccctgggccagtcagcgtcagagactgaggaggacacagtgtccgtatctaaaaaggagaaaaaccggaagcgtaggaaccgaaagaagaagaaaaagccccagcgggtgcgaggggtgtcctctgagagctctggggaccgggagaaagactcaacccggtcccgtggctctgattccccagcagctgatgttgagattgagtatgtgactgaagaacctgaaatttacgagcccaactttatcttctttaagaggatctttgaggcttttaagctcactgatgatgtgaagaaggagaaagagaaggagccagagaaacttgacaaactggagaactctgcagcccccaagaagaagggatttgaagaggagcacaaggacagtgatgatgacagcagtgatgacgagcaggaaaagaagccagaagcccccaagctgtccaagaagaagttgcgccgaatgaaccgcttcactgtggctgaactcaagcagctggtggctcggcccgatgtcgtggagatgcacgatgtgacagcgcaggaccctaagctcttggttcacctcaaggccactcggaactctgtgcctgtgccacgccactggtgttttaagcgcaaatacctgcagggcaaacggggcattgagaagccccccttcgagctgccagacttcatcaaacgcacaggcatccaggagatgcgagaggccctgcaggagaaggaagaacagaagaccatgaagtcaaaaatgcgagagaaagttcggcctaagatgggcaaaattgacatcgactaccagaaactgcatgatgccttcttcaagtggcagaccaagccaaagctgaccatccatggggacctgtactatgaggggaaggagttcgagacacgactgaaggagaagaagccaggagatctgtctgatgagctaaggatttccttggggatgccagtaggaccaaatgcccacaaggtccctcccccatggctgattgccatgcagcgatatggaccacccccatcgtatcccaacctgaaaatccctgggctgaactcgcccatccctgagagctgttcctttgggtaccatgctggtggctggggcaaacctccagtggatgagactgggaaaccgctctatggggacgtgtttggaaccaatgctgctgaatttcagaccaagactgaggaagaagagattgatcggaccccttggggggaactggaaccatctgatgaagaatcctcagaagaagaggaagaggaagaaagtgatgaagacaaaccagatgagacaggctttattacccctgcagacagtggccttatcactcctggaggcttttcatcagtgcctgctggaatggagacccctgaactcattgagctgaggaagaagaagattgaggaggcgatggacggaaagtgagacaaccctcaagctccttcacgtgtgttcgccaggacgaagaagaacaaggcacttggtggagggggccattggatggggttcaccccaccatttatgaccgtgtcaccggttattggaccgggagaggccggtcctggaggctgcaaagtgtggaaagtgggccctggcgcctgaaaaagttggagctggttcattgggcaaggaccacaaagttttagggcgctcgtgcggagacagacgtccatagaaaggagaccgactgggggacaccgaacaagaaaaaaggaggccccgaacggggggcaaaag

SEQ ID NO: 415147 - DNA, 2345 bp, Homo sapiens
ggccctgaggctggccccagcttccgggttggtcgcgcgccttcctgcggctaagatggcgacggagcatcccgagcctcccaaagcagaattgcagctgccgccgccgccacctccaggccactatggcgcctgggctgcccaggagcttcaggccaagttggcagagatcggagctccgatccagggtaatcgcgaggagctggtggagcggctgcagagctacacccgccagactggcatcgtgctgaatcggccggttttgagaggggaagatggggacaaagccgctccacctcccatgtcggcacagctccctggaattcccatgccaccaccacctttgggactcccccctctgcagcctcctccgccagcccccaccacctccaccaggccttggccttggctttcctatggcccacccaccaaatttggggcccccgcctcctctccgtgtgggtgagccagtggcactgtcagaggaggagcggctgaagttggctcagcagcaggcggcattgctgatgcagcaggaggagcgtgccaagcagcagggagatcattcgctgaaggaacatgagctcttggagcagcagaagcgggcagctgtgttactggagcaggaacgacagcaggagattgccaagatgggcaccccagtccctcggcccccacaagacatgggccagattggtgtgcgcactcctctgggtcctcgagtagctgctccagtgggcccagtgggccccactcctacagttttgcccatgggagcccctgttccccggcctcgtggtcccccaccgccccctggagatgagaacagagagatggatgacccctctgtgggccccaagatcccccaggctttggagaagatcctgcagctgaaggagagccgccaggaagagatgaattctcagcaggaggaagaggaaatggaaacagatgctcgctcgtccctgggccagtcagcgtcagagactgaggaggacacagtgtccgtatctaaaaaggagaaaaaccggaagcgtaggaaccgaaagaagaagaaaaagccccagcgggtgcgaggggtgtcctctgagagctctggggaccgggagaaagactcaacccggtcccgtggctctgattccccagcagctgatgttgagattgagtatgtgactgaagaacctgaaatttacgagcccaactttatcttctttaagaggatctttgaggcttttaagctcactgatgatgtgaagaaggagaaagagaaggagccagagaaacttgacaaactggagaactctgcagcccccaagaagaagggatttgaagaggagcacaaggacagtgatgatgacagcagtgatgacgagcaggaaaagaagccagaagcccccaagctgtccaagaagaagttgcgccgaatgaaccgcttcactgtggctgaactcaagcagctggtggctcggcccgatgtcgtggagatgcacgatgtgacagcgcaggaccctaagctcttggttcacctcaaggccactcggaactctgtgcctgtgccacgccactggtgttttaagcgcaaatacctgcagggcaaacggggcattgagaagccccccttcgagctgccagacttcatcaaacgcacaggcatccaggagatgcgagaggccctgcaggagaaggaagaacagaagaccatgaagtcaaaaatgcgagagaaagttcggcctaagatgggcaaaattgacatcgactaccagaaactgcatgatgccttcttcaagtggcagaccaagccaaagctgaccatccatggggacctgtactatgaggggaaggagttcgagacacgactgaaggagaagaagccaggagatctgtctgatgagctaaggatttccttggggatgccagtaggaccaaatgcccacaaggtccctcccccatggctgattgccatgcagcgatatggaccacccccatcgtatcccaacctgaaaatccctgggctgaactcgcccatccctgagagctgttcctttgggtaccatgctggtggctggggcaaacctccagtggatgagactgggaaaccgctctatggggacgtgtttggaaccaatgctgctgaatttcagaccaagactgaggaagaagagattgatcggaccccttggggggaactggaaccatctgatgaagaatcctcagaagaagaggaagaggaagaaagtgatgaagacaaaccagatgagacaggctttattacccctgcagacagtgaccttatcactcctggatggctttttctatcactgtctactgcgatcgccagttatact

SEQ ID NO: 415148 - DNA, 1310 bp, Homo sapiens
cttctcaatgccccgtttgccctgcaggtatttgcgcttaaaacaccagtggcgtggcacaggcatccaggagatgcgagaggccctgcaggagaaggaagaacagaagaccatgaagtcaaaaatgcgagagaaagttcggcctaagatgggcaaaattgacatcgactaccagaaactgcatgatgccttcttcaagtggcagaccaagccaaagctgaccatccatggggacctgtactatgaggggaaggagttcgagacacgactgaaggagaagaagccaggagatctgtctgatgagctaaggatttccttggggatgccagtaggaccaaatgcccacaaggtccctcccccatggctgattgccatgcagcgatatggaccacccccatcgtatcccaacctgaaaatccctgggctgaactcgcccatccctgagagctgttcctttgggtaccatgctggtggctggggcaaacctccagtggatgagactgggaaaccgctctatggggacgtgtttggaaccaatgctgctgaatttcagaccaagactgaggaagaagagattgatcggaccccttggggggaactggaaccatctgatgaagaatcctcagaagaagaggaagaggaagaaagtgatgaagacaaaccagatgagacaggctttattacccctgcagacagtggccttatcactcctggaggcttttcatcagtgcctgctggaatggagacccctgaactcattgagctgaggaagaagaagattgaggaggcgatggacggaagtgagacacctcagctcttcactgtgttgccagagaagagaacagccactgttggaggggccatgatgggatcaacccacatttatgacatgtccacggttatgagccggaagggcccggctcctgagctgcaaggtgtggaagtggcgctggcgcctgaagagttggagctggatcctatggccatgacccagaagtatgaggagcatgtgcgggagcagcaggctcaagtagagaaggaggacttcagtgacatggtggctgagcacgctgccaaacagaagcaaaaaaaacggaaagctcagccccaggacagccgtgggggcagcaagaaatataaggagttcaagttttaggtcccctcacactagccctttttttggccctacgtctggatgcctgggcttcacacaagaaccacctctcccgcagttcccaaggacttgtcatttcatgttcttattttagacctgttttgtaaataaagctgtttcccaaggaaaaatatta

SEQ ID NO: 415149 - DNA, 1106 bp, Homo sapiens
  misc_feature (14)..(15): n is a, c, g, or t
taggtcggtaccgnnattctccttatggggactgtactatgaggggaaggagttcgagacacgactgaaggagaagaagccaggagatctgtctgatgagctaaggatttccttggggatgccagtaggaccaaatgcccacaaggtccctcccccatggctgattgccatgcagcgatatggaccacccccatcgtatcccaacctgaaaatccctgggctgaactcgcccatccctgagagctgttcctttgggtaccatgctggtggctggggcaaacctccagtggatgagactgggaaaccgctctatggggacgtgtttggaaccaatgctgctgaatttcagaccaagactgaggaagaagagattgatcggaccccttggggggaactggaaccatctgatgaagaatcctcagaagaagaggaagaggaagaaagtgatgaagacaaaccagatgagacaggctttattacccctgcagacagtggccttatcactcctggaggcttttcatcagtgcctgctggaatggagacccctgaactcattgagctgaggaagaagaagattgaggaggcgatggacggaagtgagacacctcagctcttcactgtgttgccagagaagagaacagccactgttggaggggccatgatgggatcaacccacatttatgacatgtccacggttatgagccggaagggcccggctcctgagctgcaaggtgtggaagtggcgctggcgcctgaagagttggagctggatcctatggccatgacccagaagtatgaggagcatgtgcgggagcagcaggctcaagtagagaaggaggacttcagtgacatggtggctgagcacgctgccaaacagaagcaaaaaaaacggaaagctcagccccaggacagccgtgggggcagcaagaaatataaggagttcaagttttaggtcccctcacactagccctttttttggccctacgtctggatgcctgggcttcacacaagaaccacctctcccgcagttcccaaggacttgtcatttcatgttcttattttagacctgttttgtaaataaagctgtttcccaaggaaaaatatta

SEQ ID NO: 415150 - DNA, 1215 bp, Homo sapiens
ctgggcgccctgtgggtttgcaccttccttgtgagggaaatcgtgtcacttaacgaaaaatgaagaaacgcggagtctgctttatgtcatcctcgtggctctcgaaatgccttatttggccagtggctctgcgaccggacctgtactatgaggggaaggagttcgagacacgactgaaggagaagaagccaggagatctgtctgatgagctaaggatttccttggggatgccagtaggaccaaatgcccacaaggtccctcccccatggctgattgccatgcagcgatatggaccacccccatcgtatcccaacctgaaaatccctgggctgaactcgcccatccctgagagctgttcctttgggtaccatgctggtggctggggcaaacctccagtggatgagactgggaaaccgctctatggggacgtgtttggaaccaatgctgctgaatttcagaccaagactgaggaagaagagattgatcggaccccttggggggaactggaaccatctgatgaagaatcctcagaagaagaggaagaggaagaaagtgatgaagacaaaccagatgagacaggctttattacccctgcagacagtggccttatcactcctggaggcttttcatcagtgcctgctggaatggagacccctgaactcattgagctgaggaagaagaagattgaggaggcgatggacggaagtgagacacctcagctcttcactgtgttgccagagaagagaacagccactgttggaggggccatgatgggatcaacccacatttatgacatgtccacggttatgagccggaagggcccggctcctgagctgcaaggtgtggaagtggcgctggcgcctgaagagttggagctggatcctatggccatgacccagaagtatgaggagcatgtgcgggagcagcaggctcaagtagagaaggaggacttcagtgacatggtggctgagcacgctgccaaacagaagcaaaaaaaacggaaagctcagccccaggacagccgtgggggcagcaagaaatataaggagttcaagttttaggtcccctcacactagccctttttttggccctacgtctggatgcctgggcttcacacaagaaccacctctcccgcagttcccaaggacttgtcatttcatgttcttattttagacctgttttgtaaataaagctgtttcccaaggaaaaatatta

SEQ ID NO: 415151 - DNA, 2041 bp, Homo sapiens
ggccctgaggctggccccagcttccgggttggtcgcgcgccttcctgcggctaagatggcgacggagcatcccgagcctcccaaagcagaattgcagctgccgccgccgccacctccaggccactatggcgcctgggctgcccaggagcttcaggccaagttggcagagatcggagctccgatccagggtaatcgcgaggagctggtggagcggctgcagagctacacccgccagactggcatcgtgctgaatcggccggttttgagaggggaagatggggacaaagccgctccacctcccatgtcggcacagctccctggaattcccatgccaccaccacctttgggactcccccctctgcagcctcctccgccagcccccaccacctccaccaggccttggccttggctttcctatggcccacccaccaaatttggggcccccgcctcctctccgtgtgggtgagccagtggcactgtcagaggaggagcggctgaagttggctcagcagcaggcggcattgctgatgcagcaggaggagcgtgccaagcagcagggagatcattcgctgaaggaacatgagctcttggagcagcagaagcgggcagctgtgttactggagcaggaacgacagcaggagattgccaagatgggcaccccagtccctcggcccccacaagacatgggccagattggtgtgcgcactcctctgggtcctcgagtagctgctccagtgggcccagtgggccccactcctacagttttgcccatgggagcccctgttccccggcctcgtggtcccccaccgccccctggagatgagaacagagagatggatgacccctctgtgggccccaagatcccccaggctttggagaagatcctgcagctgaaggagagccgccaggaagagatgaattctcagcaggaggaagaggaaatggaaacagatgctcgctcgtccctgggccagtcagcgtcagagactgaggaggacacagtgtccgtatctaaaaaggagaaaaaccggaagcgtaggaaccgaaagaagaagaaaaagccccagcgggtgcgaggggtgtcctctgagagctctggggaccgggagaaagactcaacccggtcccgtggctctgattccccagcagctgatgttgagattgagtatgtgactgaagaacctgaaatttacgagcccaactttatcttctttaagaggatctttgaggcttttaagctcactgatgatgtgaagaaggagaaagagaaggagccagagaaacttgacaaactggagaactctgcagcccccaagaagaagggatttgaagaggagcacaaggacagtgatgatgacagcagtgatgacgagcaggaaaagaagccagaagcccccaagctgtccaagaagaagttgcgccgaatgaaccgcttcactgtggctgaactcaagcagctggtggctcggcccgatgtcgtggagatgcacgatgtgacagcgcaggaccctaagctcttggttcacctcaaggccactcggaactctgtgcctgtgccacgccactggtgttttaagcgcaaatacctgcagggcaaacggggcattgagaagccccccttcgagctgccagacttcatcaaacgcacaggcatccaggagatgcgagaggccctgcaggagaaggaagaacagaagaccatgaagtcaaaaatgcgagagaaagttcggcctaagatgggcaaaattgacatcgactaccagaaactgcatgatgccttcttcaagtggcagaccaagccaaagctgaccatccatggggacctgtactatgaggggaaggagttcgagacacgactgaaggagaagaagccaggagatctgtctgatgagctaaggatttccctttttttggccctacgtctggatgcctgggcttcacacaagaaccacctctcccgcagttcccaaggacttgtcatttcatgttcttattttagacctgttttgtaaataaagctgtttcccaaggaaaaatatta

SEQ ID NO: 415152 - DNA, 942 bp, Homo sapiens
gggtgactctagaggattagtgtcatcccccttcgtatccaacttaaaatcctgggctgaactcgccatcccatgagagctgttcctttgggtaccatgctggtggctggggcaaacctccagtggatgagactgggaaaccgctctatggggacgtgtttggaaccaatgctgctgaatttcagaccaagactgaggaagaagagattgatcggaccccttggggggaactggaaccatctgatgaagaatcctcagaagaagaggaagaggaagaaagtgatgaagacaaaccagatgagacaggctttattacccctgcagacagtggccttatcactcctggaggcttttcatcagtgcctgctggaatggagacccctgaactcattgagctgaggaagaagaagattgaggaggcgatggacggaagtgagacacctcagctcttcactgtgttgccagagaagagaacagccactgttggaggggccatgatgggatcaacccacatttatgacatgtccacggttatgagccggaagggcccggctcctgagctgcaaggtgtggaagtggcgctggcgcctgaagagttggagctggatcctatggccatgacccagaagtatgaggagcatgtgcgggagcagcaggctcaagtagagaaggaggacttcagtgacatggtggctgagcacgctgccaaacagaagcaaaaaaaacggaaagctcagccccaggacagccgtgggggcagcaagaaatataaggagttcaagttttaggtcccctcacactagccctttttttggccctacgtctggatgcctgggcttcacacaagaaccacctctcccgcagttcccaaggacttgtcatttcatgttcttattttagacctgttttgtaaataaagctgtttcccaaggaaaaatatta

SEQ ID NO: 415153 - DNA, 1289 bp, Homo sapiens
tagtttaggacctgtggcagctcgcacctgagttaactcaggggcgagctgccggtaactcaggggcgagctgccagacttcatcaaacgcacaggcatccaggagatgcgagaggccctgcaggagaaggaagaacagaagaccatgaagtcaaaaatgcgagagaaagttcggcctaagatgggcaaaattgacatcgactaccagaaactgcatgatgccttcttcaagtggcagaccaagccaaagctgaccatccatggggacctgtactatgaggggaaggagttcgagacacgactgaaggagaagaagccaggagatctgtctgatgagctaaggatttccttggggatgccagtaggaccaaatgcccacaaggtccctcccccatggctgattgccatgcagcgatatggaccacccccatcgtatcccaaccatgctggtggctggggcaaacctccagtggatgagactgggaaaccgctctatggggacgtgtttggaaccaatgctgctgaatttcagaccaagactgaggaagaagagattgatcggaccccttggggggaactggaaccatctgatgaagaatcctcagaagaagaggaagaggaagaaagtgatgaagacaaaccagatgagacaggctttattacccctgcagacagtggccttatcactcctggaggcttttcatcagtgcctgctggaatggagacccctgaactcattgagctgaggaagaagaagattgaggaggcgatggacggaagtgagacacctcagctcttcactgtgttgccagagaagagaacagccactgttggaggggccatgatgggatcaacccacatttatgacatgtccacggttatgagccggaagggcccggctcctgagctgcaaggtgtggaagtggcgctggcgcctgaagagttggagctggatcctatggccatgacccagaagtatgaggagcatgtgcgggagcagcaggctcaagtagagaaggaggacttcagtgacatggtggctgagcacgctgccaaacagaagcaaaaaaaacggaaagctcagccccaggacagccgtgggggcagcaagaaatataaggagttcaagttttaggtcccctcacactagccctttttttggccctacgtctggatgcctgggcttcacacaagaaccacctctcccgcagttcccaaggacttgtcatttcatgttcttattttagacctgttttgtaaataaagctgtttcccaaggaaaaatatta

SEQ ID NO: 415154 - DNA, 963 bp, Homo sapiens
tgaagtctagcctgggtgttgccatggatggagggaagagtaggctggcctgtggcgtgggtgggaggagaggggacggagagggcactcggcccgctgcaatctgacccctctctcctcagggcaggaaacacagagtcagacagtttgggggggggggaccgctctatggggacgtgtttggaaccaatgctgctgaatttcagaccaagactgaggaagaagagattgatcggaccccttggggggaactggaaccatctgatgaagaatcctcagaagaagaggaagaggaagaaagtgatgaagacaaaccagatgagacaggctttattacccctgcagacagtggccttatcactcctggaggcttttcatcagtgcctgctggaatggagacccctgaactcattgagctgaggaagaagaagattgaggaggcgatggacggaagtgagacacctcagctcttcactgtgttgccagagaagagaacagccactgttggaggggccatgatgggatcaacccacatttatgacatgtccacggttatgagccggaagggcccggctcctgagctgcaaggtgtggaagtggcgctggcgcctgaagagttggagctggatcctatggccatgacccagaagtatgaggagcatgtgcgggagcagcaggctcaagtagagaaggaggacttcagtgacatggtggctgagcacgctgccaaacagaagcaaaaaaaacggaaagctcagccccaggacagccgtgggggcagcaagaaatataaggagttcaagttttaggtcccctcacactagccctttttttggccctacgtctggatgcctgggcttcacacaagaaccacctctcccgcagttcccaaggacttgtcatttcatgttcttattttagacctgttttgtaaataaagctgtttcccaaggaaaaatatta

SEQ ID NO: 415155 - DNA, 1983 bp, Homo sapiens
ggccctgaggctggccccagcttccgggttggtcgcgcgccttcctgcggctaagatggcgacggagcatcccgagcctcccaaagcagaattgcagctgccgccgccgccacctccaggccactatggcgcctgggctgcccaggagcttcaggccaagttggcagagatcggagctccgatccagggtaatcgcgaggagctggtggagcggctgcagagctacacccgccagactggcatcgtgctgaatcggccggttttgagaggggaagatggggacaaagccgctccacctcccatgtcggcacagctccctggaattcccatgccaccaccacctttgggactcccccctctgcagcctcctccgccagcccccaccacctccaccaggccttggccttggctttcctatggcccacccaccaaatttggggcccccgcctcctctccgtgtgggtgagccagtggcactgtcagaggaggagcggctgaagttggctcagcagcaggcggcattgctgatgcagcaggaggagcgtgccaagcagcagggagatcattcgctgaaggaacatgagctcttggagcagcagaagcgggcagctgtgttactggagcaggaacgacagcaggagattgccaagatgggcaccccagtccctcggcccccacaagacatgggccagattggtgtgcgcactcctctgggtcctcgagtagctgctccagtgggcccagtgggccccactcctacagttttgcccatgggagcccctgttccccggcctcgtggtcccccaccgccccctggagatgagaacagagagatggatgacccctctgtgggccccaagatcccccaggctttggagaagatcctgcagctgaaggagagccgccaggaagagatgaattctcagcaggaggaagaggaaatggaaacagatgctcgctcgtccctgggccagtcagcgtcagagactgaggaggacacagtgtccgtatctaaaaaggagaaaaaccggaagcgtaggaaccgaaagaagaagaaaaagccccagcgggtgcgaggggtgtcctctgagagctctggggaccgggagaaagactcaacccggtcccgtggctctgattccccagcagctgatgttgagattgagtatgtgactgaagaacctgaaatttacgagcccaactttatcttctttaagaggatctttgaggcttttaagctcactgatgatgtgaagaaggagaaagagaaggagccagagaaacttgacaaactggagaactctgcagcccccaagaagaagggatttgaagaggagcacaaggacagtgatgatgacagcagtgatgacgagcaggaaaagaagccagaagcccccaagctgtccaagaagaagttgcgccgaatgaaccgcttcactgtggctgaactcaagcagctggtggctcggcccgatgtcgtggagatgcacgatgtgacagcgcaggaccctaagctcttggttcacctcaaggccactcggaactctgtgcctgtgccacgccactggtgttttaagcgcaaatacctgcagggcaaacggggcattgagaagccccccttcgagctgccagacttcatcaaacgcacaggcatccaggagatgcgagaggccctgcaggagaaggaagaacagaagaccatgaagtcaaaaatgcgagagaaatagacgctctagtgggcatcgagacagagagagattctagagatagagagtctcgtagagagaaggaagaagcccgaggaaaggaaaagcctgaggtgacagacagggcaggtggtaacaaaaccgttgaacctcccattagccaagtgggaaatgtagacactgcttcagaacttgagaagggggtgtctgaggctgcagtcctaaagccttctgaagagttacctgctgaggttactcatccgttgaaccgaaaagg

SEQ ID NO: 415156 - DNA, 1734 bp, Homo sapiens
ggccctgaggctggccccagcttccgggttggtcgcgcgccttcctgcggctaagatggcgacggagcatcccgagcctcccaaagcagaattgcagctgccgccgccgccacctccaggccactatggcgcctgggctgcccaggagcttcaggccaagttggcagagatcggagctccgatccagggtaatcgcgaggagctggtggagcggctgcagagctacacccgccagactggcatcgtgctgaatcggccggttttgagaggggaagatggggacaaagccgctccacctcccatgtcggcacagctccctggaattcccatgccaccaccacctttgggactcccccctctgcagcctcctccgccagcccccaccacctccaccaggccttggccttggctttcctatggcccacccaccaaatttggggcccccgcctcctctccgtgtgggtgagccagtggcactgtcagaggaggagcggctgaagttggctcagcagcaggcggcattgctgatgcagcaggaggagcgtgccaagcagcagggagatcattcgctgaaggaacatgagctcttggagcagcagaagcgggcagctgtgttactggagcaggaacgacagcaggagattgccaagatgggcaccccagtccctcggcccccacaagacatgggccagattggtgtgcgcactcctctgggtcctcgagtagctgctccagtgggcccagtgggccccactcctacagttttgcccatgggagcccctgttccccggcctcgtggtcccccaccgccccctggagatgagaacagagagatggatgacccctctgtgggccccaagatcccccaggctttggagaagatcctgcagctgaaggagagccgccaggaagagatgaattctcagcaggaggaagaggaaatggaaacagatgctcgctcgtccctgggccagtcagcgtcagagactgaggaggacacagtgtccgtatctaaaaaggagaaaaaccggaagcgtaggaaccgaaagaagaagaaaaagccccagcgggtgcgaggggtgtcctctgagagctctggggaccgggagaaagactcaacccggtcccgtggctctgattccccagcagctgatgttgagattgagtatgtgactgaagaacctgaaatttacgagcccaactttatcttctttaagaggatctttgaggcttttaagctcactgatgatgtgaagaaggagaaagagaaggagccagagaaacttgacaaactggagaactctgcagcccccaagaagaagggatttgaagaggagcacaaggacagtgatgatgacagcagtgatgacgagcaggaaaagaagccagaagcccccaagctgtccaagaagaagttgcgccgaatgaaccgcttcactgtggctgaactcaagcagctggtggctcggcccgatgtcgtggagatgcacgatgtgacagcggaccctaattagggtccgctgttcaatcctgaattacggttttctgtttgaaaacacgaaatatgcgagttagagactggggataaatgtggagagggtcctgaagtcaaggagaagattttaccaaaactagagcacttcaatggagaattagccgggcatggtggctcatgcctgtaatcccagcactttgggaggccgaggcaggcagattacttgaggtcgggagttc

SEQ ID NO: 415157 - DNA, 570 bp, Homo sapiens
  misc_feature (51)..(51): n is a, c, g, or t
  misc_feature (55)..(57): n is a, c, g, or t
tgctggaggtgatctagaggatcttcaaaagtgcactcttctatatctacntggnnngaagtgagacacctcagctcttcactgtgttgccagagaagagaacagccactgttggaggggccatgatgggatcaacccacatttatgacatgtccacggttatgagccggaagggcccggctcctgagctgcaaggtgtggaagtggcgctggcgcctgaagagttggagctggatcctatggccatgacccagaagtatgaggagcatgtgcgggagcagcaggctcaagtagagaaggaggacttcagtgacatggtggctgagcacgctgccaaacagaagcaaaaaaaacggaaagctcagccccaggacagccgtgggggcagcaagaaatataaggagttcaagttttaggtcccctcacactagccctttttttggccctacgtctggatgcctgggcttcacacaagaaccacctctcccgcagttcccaaggacttgtcatttcatgttcttattttagacctgttttgtaaataaagctgtttcccaaggaaaaatatta

SEQ ID NO: 415158 - DNA, 558 bp, Homo sapiens
tcatggacgccaccaagaggattatgcagatgctgaagctggacggaagtgagacacctcagctcttcactgtgttgccagagaagagaacagccactgttggaggggccatgatgggatcaacccacatttatgacatgtccacggttatgagccggaagggcccggctcctgagctgcaaggtgtggaagtggcgctggcgcctgaagagttggagctggatcctatggccatgacccagaagtatgaggagcatgtgcgggagcagcaggctcaagtagagaaggaggacttcagtgacatggtggctgagcacgctgccaaacagaagcaaaaaaaacggaaagctcagccccaggacagccgtgggggcagcaagaaatataaggagttcaagttttaggtcccctcacactagccctttttttggccctacgtctggatgcctgggcttcacacaagaaccacctctcccgcagttcccaaggacttgtcatttcatgttcttattttagacctgttttgtaaataaagctgtttcccaaggaaaaatatta

SEQ ID NO: 415159 - DNA, 865 bp, Homo sapiens
ggccctgaggctggccccagcttccgggttggtcgcgcgccttcctgcggctaagatggcgacggagcatcccgagcctcccaaagcagaattgcagctgccgccgccgccacctccaggccactatggcgcctgggctgcccaggagcttcaggccaagttggcagagatcggagctccgatccagggtaatcgcgaggagctggtggagcggctgcagagctacacccgccagactggcatcgtgctgaatcggccggttttgagaggggaagatggggacaaagccgctccacctcccatgtcggcacagctccctggaattcccatgccaccaccacctttgggactcccccctctgcagcctcctccgccagcccccaccacctccaccaggccttggccttggctttcctatggcccacccaccaaatttggggcccccgcctcctctccgtgtgggtgagccagtggcactgtcagaggaggagcggctgaagttggctcagcagcaggcggcattgctgatgcagcaggaggagcgtgccaagcagcagggagatcattcgctgaaggaacatgagctcttggagcagcagaagcgggtaatacccctccccctaacctttgacctcgtggtccagtcagttggctgtcatttatagtgcttagagtgcaccattcaagttttccctggaggctactttgttctcaactaagttctagtatcttccaaagctttcaatttttcttgaagttcaggaattgacaaactatgacctgtggcctgcatgtgtatggcctatgagctaaaaataactttaaaatttttagctcataggccatacacatgcaggcacagtcg

SEQ ID NO: 415160 - DNA, 1129 bp, Homo sapiens
  misc_feature (28)..(28): n is a, c, g, or t
  misc_feature (30)..(30): n is a, c, g, or t
  misc_feature (42)..(43): n is a, c, g, or t
aacataaggctagtacgaggctggtttnantcggccgagggnnagatgggcaccccagtccctcggcccccacaagacatgggccagattggtgtgcgcactcctctgggtcctcgagtagctgctccagtgggcccagtgggccccactcctacagttttgcccatgggagcccctgttccccggcctcgtggtcccccaccgccccctggagatgagaacagagagatggatgacccctctgtgggccccaagatcccccaggctttggagaagatcctgcagctgaaggagagccgccaggaagagatgaattctcagcaggaggaagaggaaatggaaacagatgctcgctcgtccctgggccagtcagcgtcagagactgaggaggacacagtgtccgtatctaaaaaggagaaaaaccggaagcgtaggaaccgaaagaagaagaaaaagccccagcgggtgcgaggggtgtcctctgagagctctggggaccgggagaaagactcaacccggtcccgtggctctgattccccagcagctgatgttgagattgagtatgtgactgaagaacctgaaatttacgagcccaactttatcttctttaagaggatctttgaggcttttaagctcactgatgatgtgaagaaggagaaagagaaggagccagagaaacttgacaaactggagaactctgcagcccccaagaagaagggatttgaagaggagcacaaggacagtgatgatgacagcagtgatgacgagcaggaaaagaagccagaagcccccaagctgtccaagaagaagttgcgccgaatgaaccgcttcactgtggctgaactcaagcagctggtggctcggcccgatgtcgtggagatgcacgatgtgacagcggaccctaattagggtccgctgttcaatcctgaattacggttttctgtttgaaaacacgaaatatgcgagttagagactggggataaatgtggagagggtcctgaagtcaaggagaagattttaccaaaactagagcacttcaatggagaattagccgggcatggtggctcatgcctgtaatcccagcactttgggaggccgaggcaggcagattacttgaggtcgggagttc

SEQ ID NO: 415161 - DNA, 244 bp, Homo sapiens
tgctggtggctggggcaaacctccagtggatgagactgggaaaccgctctatggggacgtgtttggaaccaatgctgctgaatttcaggtatgggccatgtactagcgatcttggttttacttaatgtcatgaaggttagattgttggtttatagcttcattatcagggagttgtgtgttctgacacagcagagcctggaaaagggcatacattttcctgagatgttaatgtaagctcctcact

SEQ ID NO: 415162 - DNA, 172 bp, Homo sapiens
gggctcagaggtgggtgagaggcagcggtgaacaggcatcttttagtgctggccttaggaactgggaaggggctcagagggcaggggtttcaccttgtctgcctccttagctcactgatgatgtgaagaaggagaaagagaaggagccagagaaacttgacaaactggagaa

SEQ ID NO: 415163 - DNA, 789 bp, Homo sapiens
ttggggagctcagaagctctccaaggcgctgagtggaggtgccacctgtatcttttgtttccgcttctggagacccttttgtcccttgctttttgggcctgatcccattgtccttcgcagaagtgagacacctcagctcttcactgtgttgccagagaagagaacagccactgttggaggggccatgatgggatcaacccacatttatgacatgtccacggtgagtacttggaggatactgcttttggaggctgagaaaggcagcagaagctagggcttctctgactctttggagatgaccaggccctgatctcctttccaggttatgagccggaagggcccggctcctgagctgcaaggtgtggaagtggcgctggcgcctgaagagttggagctggatcctatggccatgacccagaagtatgaggagcatgtgcgggagcagcaggctcaagtagagaaggaggacttcagtgacatggtggctgagcacgctgccaaacagaaggtaggcgcttccaggggcgctgggctgggtgagagccagggaccctggcctgccgttttcagtggcatggtgccctctagtggtgagagtgagggtggcctctgcttgctgctctgtgcttccttagatttggaagtcttagaaatcctccagtgggctgccctctttaaggacgatgagggggaggaactcagccaagtctgagagggagctcgaagagaattcagattcagcgcctttcccacagacttctatgtctatgtcaggctgcccacccttgt

SEQ ID NO: 415164 - DNA, 415 bp, Homo sapiens
agtaaatatatagtttaatggttttttacacactgaacacacctgtacaaccagcacctggaccatgatccaaaacattaccagcattccaaaagccacgccacgtgccctcctcccctgcaggtttaccatcaccctttcagcaagagaggtaattttttacgtgagtgttttgcctcttctgacattggatttctttttcccgtctcttagtagctgctccagtgggcccagtgggccccactcctacagttttgcccatgggagcccctgttccccggcctcgtggtcccccaccgccccctggagatgagaacagagaggtgagactgatgatttattcctagggataagagagtggtagtttaggatgggactatttttggatttttagagaaaggttctgtgagaagat

SEQ ID NO: 415165 - DNA, 488 bp, Homo sapiens
gccgccgccacctccaggccactatggcgcctgggctgcccaggagcttcaggccaagttggcagagatcggagctccgatccagggaggaacacaggaagtcgaggggcctttacgggcctgcggagaagcggagcctggttacccgggagactcgggtgcgaggggcggaggcaggccgctggggcctgacctggccgggctggcctgccccattgatcgtgtactttgccctgcaggtaatcgcgaggagctggtggagcggctgcagagctacacccgccaggtaggtgttggcggcgggacgtcaggataggccgagcttctccaggagaccttatataccccatcacggctcggtcttcattctttctttatctcggcacagcaaggcggaggcttgccctttttagcttgttcttgcctttgccagcttagttgtaatttcttgtatccatcttggtcctcttcagtgcccagccagagcg

SEQ ID NO: 415166 - DNA, 2637 bp, Homo sapiens
  misc_feature (1249)..(1249): n is a, c, g, or t
atccccgtgtgggggaggggggccttcggtctctccccagcctcttccttccccctggcctgagggtgggtggggaggggcagttcctctttccttcccaagcaccgaggaggccccagctccctaggggctgagaagctggagtcctgggcaaggggaggagctgagccctactcttgcaagacccccggcctcctcaccccacgcgggaagcatgaacagaaaagacagtaagaggaagtcccaccaggaatgcaccggaaaaacaggagggcgaggccggccccgccaagtgcgccgccacaagacatgccccagccctcgggaaatcagcaaggtcatggcttccatgaacctgggcctgctgagtgagggcggctgcagcgaagatgagctgctggagaaatgcatccagtccttcgattcagctggcagcctgtgccacgaggaccacatgctcaacatggtgctggccatgcacagctgggtgctgccgtccgccgacctggctgcccgcctgctgacctcataccagaaggccacaggggacacccaggagctgagacggctgcagatctgtcacctggtcaggtactggctgatgcgacaccctgaggtgatgcaccaggatccccagctagaagaagtcataggtcgtttctgggccaccgtggcccgggagggcaactcagcccagagaagactgggagactcttctgacctcctgagccctggtggccctggccccccactcccaatgagcagcccaggcctgggcaaaaagcgcaaagtgtccttgcttttcgaccacttggagacgggggagctggctcagcacctcacctacctggagttccggtccttccaggctatcacgccccaggacctgcggagctacgttttgcagggctcagtacgaggctgcccggccctggagggctccgtaggtctcagcaacagcgtgtcccgctgggtgcaggtgatggtgctgagccgtcccgggcccctacagcgtgcacaggtgctggacaagttcattcacgtggcacagaggctccaccagctgcagaatttcaacacgctgatggcagtcacagggggcctgtgtcacagtgccatctccagactcaaggactcccatgcccacctgagccctgacagcaccaaggccctcctggagctcactgagctccttgcctcccacaacaactacgcccgctaccgccgcacctgggctggctgcgcgggnttccggctgcctgtactgggcgtgcacctcaaggacctggtgtccctgcatgaggcacagcccgacaggttgcctgacggccgcctgcacctacccaagctgaacaacctctacctgcggctgcaggagctggtggccctccaagggcagcatccaccctgcagcgccaatgaggatctgctgcacctgctcacgctctccctggacctcttctacacggaagacgagatctatgagctttcttatgcccgggagccgcgttgtcccaagagcctgccaccctcccccttcaatgcacctctggtggtggagtgggcccctggtgtgacacccaagccggacagggtcacactgggtcggcatgtggagcagctggtggagtctgtgttcaagaattatgaccctgaaggccgaggaacaatctctcaggaggactttgagcgactctcgggcaattttcccttcgcctgccatgggcttcacccacccccacgccaggggagaggatccttcagcagagaggagctgacagggtacctgctccgggccagcgccatctgctccaagttgggcctggccttcctgcacaccttccatgaggtcaccttccgaaagcctaccttctgcgacagctgcagtggcttcctctggggtgtcaccaagcaaggctaccgctgtcgggagtgcgggctgtgttgccacaaacactgcagagaccaggtgaaggtagaatgtaagaagaggccaggggccaagggcgatgcaggaccccccggagctcctgtcccatccacaccagctccccatgccagctgtggctccgaggaaaatcactcctacacgctatccctggagcctgagactgggtgccagcttcgccatgcctggacccagactgaatccccacacccttcctgggaaacagatacggtcccctgcccggtgatggacccaccatcaactgcatcctccaagctggattcctagacatctcttggtctcctctcttcctcactcccttcccccagtcagtcctgagtcctgccgtcagactctggcagggctcccagaggagcatcaactccaggagaacagggatttctatcaatgtcattcactgctgcatccccagtgcctagaacagggctggcaggtggtaggcgcctgacagatgcttgtctgatgcctgaatgtctccttacccatgcccacggcacaggatagatgtgctatagggcaaagaactttgagggtcgagcagcaggggcccattcagtcccagggagcagagacccccccaaccccttcacaaaccccaacacccctgacttggcccccacagagagaggtcctacagctgtcataaattaaatttattctctggagaa

SEQ ID NO: 415167 - DNA, 2754 bp, Homo sapiens
  misc_feature (741)..(741): n is a, c, g, or t
  misc_feature (1366)..(1366): n is a, c, g, or t
atccccgtgtgggggaggggggccttcggtctctccccagcctcttccttccccctggcctgagggtgggtggggaggggcagttcctctttccttcccaagcaccgaggaggccccagctccctaggggctgagaagctggagtcctgggcaaggggaggagctgagccctactcttgcaagacccccggcctcctcaccccacgcgggaagcatgaacagaaaagacagtaagaggaagtcccaccaggaatgcaccggaaaaacaggagggcgaggccggccccgccaagtgcgccgccacaagacatgccccagccctcgggaaatcagcaaggtcatggcttccatgaacctgggcctgctgagtgagggcggctgcagcgaagatgagctgctggagaaatgcatccagtccttcgattcagctggcagcctgtgccacgaggaccacatgctcaacatggtgctggccatgcacagctgggtgctgccgtccgccgacctggctgcccgcctgctgacctcataccagaaggccacaggggacacccaggagctgagacggctgcagatctgtcacctggtcaggtactggctgatgcgacaccctgaggtgatgcaccaggatccccagctagaagaagtcataggtcgtttctgggccaccgtggcccgggagggcaactcagcccagagaagactgggagactcttctgacctgtgagtcagccctgtgcncccctcttccctgccccatcgccattctgccatctccctctatatccccaagccctcaactgtgagccactccaataccctgcccctcttggcccccagcctgagccctggtggccctggccccccactcccaatgagcagcccaggcctgggcaaaaagcgcaaagtgtccttgcttttcgaccacttggagacgggggagctggctcagcacctcacctacctggagttccggtccttccaggctatcacgccccaggacctgcggagctacgttttgcagggctcagtacgaggctgcccggccctggagggctccgtaggtctcagcaacagcgtgtcccgctgggtgcaggtgatggtgctgagccgtcccgggcccctacagcgtgcacaggtgctggacaagttcattcacgtggcacagaggctccaccagctgcagaatttcaacacgctgatggcagtcacagggggcctgtgtcacagtgccatctccagactcaaggactcccatgcccacctgagccctgacagcaccaaggccctcctggagctcactgagctccttgcctcccacaacaactacgcccgctaccgccgcacctgggctggctgcgcgggnttccggctgcctgtactgggcgtgcacctcaaggacctggtgtccctgcatgaggcacagcccgacaggttgcctgacggccgcctgcacctacccaagctgaacaacctctacctgcggctgcaggagctggtggccctccaagggcagcatccaccctgcagcgccaatgaggatctgctgcacctgctcacgctctccctggacctcttctacacggaagacgagatctatgagctttcttatgcccgggagccgcgttgtcccaagagcctgccaccctcccccttcaatgcacctctggtggtggagtgggcccctggtgtgacacccaagccggacagggtcacactgggtcggcatgtggagcagctggtggagtctgtgttcaagaattatgaccctgaaggccgaggaacaatctctcaggaggactttgagcgactctcgggcaattttcccttcgcctgccatgggcttcacccacccccacgccaggggagaggatccttcagcagagaggagctgacagggtacctgctccgggccagcgccatctgctccaagttgggcctggccttcctgcacaccttccatgaggtcaccttccgaaagcctaccttctgcgacagctgcagtggcttcctctggggtgtcaccaagcaaggctaccgctgtcgggagtgcgggctgtgttgccacaaacactgcagagaccaggtgaaggtagaatgtaagaagaggccaggggccaagggcgatgcaggaccccccggagctcctgtcccatccacaccagctccccatgccagctgtggctccgaggaaaatcactcctacacgctatccctggagcctgagactgggtgccagcttcgccatgcctggacccagactgaatccccacacccttcctgggaaacagatacggtcccctgcccggtgatggacccaccatcaactgcatcctccaagctggattcctagacatctcttggtctcctctcttcctcactcccttcccccagtcagtcctgagtcctgccgtcagactctggcagggctcccagaggagcatcaactccaggagaacagggatttctatcaatgtcattcactgctgcatccccagtgcctagaacagggctggcaggtggtaggcgcctgacagatgcttgtctgatgcctgaatgtctccttacccatgcccacggcacaggatagatgtgctatagggcaaagaactttgagggtcgagcagcaggggcccattcagtcccagggagcagagacccccccaaccccttcacaaaccccaacacccctgacttggcccccacagagagaggtcctacagctgtcataaattaaatttattctctggagaa

SEQ ID NO: 415168 - DNA, 2595 bp, Homo sapiens
  misc_feature (1207)..(1207): n is a, c, g, or t
atccccgtgtgggggaggggggccttcggtctctccccagcctcttccttccccctggcctgagggtgggtggggaggggcagttcctctttccttcccaagcaccgaggaggccccagctccctaggggctgagaagctggagtcctgggcaaggggaggagctgagccctactcttgcaagacccccggcctcctcaccccacgcgggaagcatgaacagaaaagacagtaagaggaagtcccaccaggaatgcaccggaaaaacaggagggcgaggccggccccgccaagtgcgccgccacaagacatgccccagccctcgggaaatcagcaaggtcatggcttccatgaacctgggcctgctgagtgagggcggctgcagcgaagatgagctgctggagaaatgcatccagtccttcgattcagctggcagcctgtgccacgaggaccacatgctcaacatggtgctggccatgcacagctgggtgctgccgtccgccgacctggctgcccgcctgctgacctcataccagaaggccacaggggacacccaggagctgagacggctgcagatctgtcacctggtcaggtactggctgatgcgacaccctgaggtgatgcaccaggatccccagctagaagaagtcataggtcgtttctgggccaccgtggcccgggagggcaactcagcccagagaagactgggagactcttctgacctcccaggcctgggcaaaaagcgcaaagtgtccttgcttttcgaccacttggagacgggggagctggctcagcacctcacctacctggagttccggtccttccaggctatcacgccccaggacctgcggagctacgttttgcagggctcagtacgaggctgcccggccctggagggctccgtaggtctcagcaacagcgtgtcccgctgggtgcaggtgatggtgctgagccgtcccgggcccctacagcgtgcacaggtgctggacaagttcattcacgtggcacagaggctccaccagctgcagaatttcaacacgctgatggcagtcacagggggcctgtgtcacagtgccatctccagactcaaggactcccatgcccacctgagccctgacagcaccaaggccctcctggagctcactgagctccttgcctcccacaacaactacgcccgctaccgccgcacctgggctggctgcgcgggnttccggctgcctgtactgggcgtgcacctcaaggacctggtgtccctgcatgaggcacagcccgacaggttgcctgacggccgcctgcacctacccaagctgaacaacctctacctgcggctgcaggagctggtggccctccaagggcagcatccaccctgcagcgccaatgaggatctgctgcacctgctcacgctctccctggacctcttctacacggaagacgagatctatgagctttcttatgcccgggagccgcgttgtcccaagagcctgccaccctcccccttcaatgcacctctggtggtggagtgggcccctggtgtgacacccaagccggacagggtcacactgggtcggcatgtggagcagctggtggagtctgtgttcaagaattatgaccctgaaggccgaggaacaatctctcaggaggactttgagcgactctcgggcaattttcccttcgcctgccatgggcttcacccacccccacgccaggggagaggatccttcagcagagaggagctgacagggtacctgctccgggccagcgccatctgctccaagttgggcctggccttcctgcacaccttccatgaggtcaccttccgaaagcctaccttctgcgacagctgcagtggcttcctctggggtgtcaccaagcaaggctaccgctgtcgggagtgcgggctgtgttgccacaaacactgcagagaccaggtgaaggtagaatgtaagaagaggccaggggccaagggcgatgcaggaccccccggagctcctgtcccatccacaccagctccccatgccagctgtggctccgaggaaaatcactcctacacgctatccctggagcctgagactgggtgccagcttcgccatgcctggacccagactgaatccccacacccttcctgggaaacagatacggtcccctgcccggtgatggacccaccatcaactgcatcctccaagctggattcctagacatctcttggtctcctctcttcctcactcccttcccccagtcagtcctgagtcctgccgtcagactctggcagggctcccagaggagcatcaactccaggagaacagggatttctatcaatgtcattcactgctgcatccccagtgcctagaacagggctggcaggtggtaggcgcctgacagatgcttgtctgatgcctgaatgtctccttacccatgcccacggcacaggatagatgtgctatagggcaaagaactttgagggtcgagcagcaggggcccattcagtcccagggagcagagacccccccaaccccttcacaaaccccaacacccctgacttggcccccacagagagaggtcctacagctgtcataaattaaatttattctctggagaa

SEQ ID NO: 415169 - DNA, 629 bp, Homo sapiens
  misc_feature (47)..(47): n is a, c, g, or t
  misc_feature (50)..(50): n is a, c, g, or t
cttctccctccacccgcttccgtcggccgggcccctcccgccccgcncgncggctcgcccacccggccccggcacgccccaccatgcccggctaatttttgtatttttagtagagacggggtttccccatgttggccaagatggtctcaaactcctgacctcatgatccaccagcctcagcctcccaaagtgctgggaatacaggcgtgagccaccacgcccagctcctgtttttctgcatagaatgtgctccctctgacagcctatactttttccctctttatctcgttgaacgtctgtctttcctcaacaggagcatcaactccaggagaacagggatttctatcaatgtcattcactgctgcatccccagtgcctagaacagggctggcaggtggtaggcgcctgacagatgcttgtctgatgcctgaatgtctccttacccatgcccacggcacaggatagatgtgctatagggcaaagaactttgagggtcgagcagcaggggcccattcagtcccagggagcagagacccccccaaccccttcacaaaccccaacacccctgacttggcccccacagagagaggtcctacagctgtcataaattaaatttattctctggagaa

SEQ ID NO: 415170 - DNA, 2732 bp, Homo sapiens
  misc_feature (1249)..(1249): n is a, c, g, or t
atccccgtgtgggggaggggggccttcggtctctccccagcctcttccttccccctggcctgagggtgggtggggaggggcagttcctctttccttcccaagcaccgaggaggccccagctccctaggggctgagaagctggagtcctgggcaaggggaggagctgagccctactcttgcaagacccccggcctcctcaccccacgcgggaagcatgaacagaaaagacagtaagaggaagtcccaccaggaatgcaccggaaaaacaggagggcgaggccggccccgccaagtgcgccgccacaagacatgccccagccctcgggaaatcagcaaggtcatggcttccatgaacctgggcctgctgagtgagggcggctgcagcgaagatgagctgctggagaaatgcatccagtccttcgattcagctggcagcctgtgccacgaggaccacatgctcaacatggtgctggccatgcacagctgggtgctgccgtccgccgacctggctgcccgcctgctgacctcataccagaaggccacaggggacacccaggagctgagacggctgcagatctgtcacctggtcaggtactggctgatgcgacaccctgaggtgatgcaccaggatccccagctagaagaagtcataggtcgtttctgggccaccgtggcccgggagggcaactcagcccagagaagactgggagactcttctgacctcctgagccctggtggccctggccccccactcccaatgagcagcccaggcctgggcaaaaagcgcaaagtgtccttgcttttcgaccacttggagacgggggagctggctcagcacctcacctacctggagttccggtccttccaggctatcacgccccaggacctgcggagctacgttttgcagggctcagtacgaggctgcccggccctggagggctccgtaggtctcagcaacagcgtgtcccgctgggtgcaggtgatggtgctgagccgtcccgggcccctacagcgtgcacaggtgctggacaagttcattcacgtggcacagaggctccaccagctgcagaatttcaacacgctgatggcagtcacagggggcctgtgtcacagtgccatctccagactcaaggactcccatgcccacctgagccctgacagcaccaaggccctcctggagctcactgagctccttgcctcccacaacaactacgcccgctaccgccgcacctgggctggctgcgcgggnttccggctgcctgtactgggcgtgcacctcaaggacctggtgtccctgcatgaggcacagcccgacaggttgcctgacggccgcctgcacctacccaagctgaacaacctctacctgcggctgcaggagctggtggccctccaagggcagcatccaccctgcagcgccaatgaggatctgctgcacctgctcacgctctccctggacctcttctacacggaagacgagatctatgagctttcttatgcccgggagccgcgttgtcccaagagcctgccaccctcccccttcaatgcacctctggtggtggagtgggcccctggtgtgacacccaagccggacagggtcacactgggtcggcatgtggagcagctggtggagtctgtgttcaagaattatgaccctgaaggccgaggaacaatctctcaggaggactttgagcgactctcgggcaattttcccttcgcctgccatgggcttcacccacccccacgccaggggagaggatccttcagcagagaggagctgacagggtacctgctccgggccagcgccatctgctccaagttgggcctggccttcctgcacaccttccatgaggtcaccttccgaaagcctaccttctgcgacagctgcagtggcttcctctggggtgtcaccaagcaaggctaccgctgtcggggtgagtggggtgtcagtgagtgggagggaagccttggcccgcaggctggaagaatggatgacacagatcggacccctgccgctgccttcccccagagtgcgggctgtgttgccacaaacactgcagagaccaggtgaaggtagaatgtaagaagaggccaggggccaagggcgatgcaggaccccccggagctcctgtcccatccacaccagctccccatgccagctgtggctccgaggaaaatcactcctacacgctatccctggagcctgagactgggtgccagcttcgccatgcctggacccagactgaatccccacacccttcctgggaaacagatacggtcccctgcccggtgatggacccaccatcaactgcatcctccaagctggattcctagacatctcttggtctcctctcttcctcactcccttcccccagtcagtcctgagtcctgccgtcagactctggcagggctcccagaggagcatcaactccaggagaacagggatttctatcaatgtcattcactgctgcatccccagtgcctagaacagggctggcaggtggtaggcgcctgacagatgcttgtctgatgcctgaatgtctccttacccatgcccacggcacaggatagatgtgctatagggcaaagaactttgagggtcgagcagcaggggcccattcagtcccagggagcagagacccccccaaccccttcacaaaccccaacacccctgacttggcccccacagagagaggtcctacagctgtcataaattaaatttattctctggagaa

SEQ ID NO: 415171 - DNA, 669 bp, Homo sapiens
ccagaggcatccgccttcccatccacactgcctttagtggtacgtccgtcatctttttccctggaagtgactttcctcttttgcatcctggtggatgctaatcctgctccctttccctgcacttagtatctgtgcggctgtgtgttggatacatttagactcaggcctcattctaccaactccctacatctccatttctttttttttttgagacagagtcttgctctgtcacccaggctggagtgcaatgatgcaatctcagctcactgcaacttccgcctcctgggttcaagtgattcttctgcctcagcctcccaagtagctgggattacaggcacgccccaccatgcccggctaatttttgtatttttagtagagacggggtttccccatgttggccaagatggtctcaaactcctgacctcatgatccaccagcctcagcctcccaaagtgctgggaatacaggcgtgagccaccacgcccagctcctgtttttctgcatagaatgtgctccctctgacagcctatactttttccctctttatctcgttgaacgtctgtctttcctcaacaggagcatcaactccaggagaacagggatttctatcaatgtcattcactgctgcatccccagtgcctagaacagggctggcaggtggtaggcgcc

SEQ ID NO: 415172 - DNA, 367 bp, Homo sapiens
ctgaggcaggagaaccgcttgaacccaggaggctgaggttgcagtgagccgagatcgcaccactgcattccagcctaggtgacagagtaagactccgtctcaaaaaaaaaaaaaaaaggtggtaagtcgatggcaacatgaagttagggtttagggcattgttagaagaatgggatggagggtggtttgcatgagcctggaagaccggggactggtgacatctcttatatttggtatttgtgggtgtgaatactagggattgggcaaacttctttaaaaagccagatagtaaatacttcaggctttgccactcacatattgtttgttgcatatttttatttgtttggtttcataaatcctttaaaaa

SEQ ID NO: 415173 - DNA, 522 bp, Homo sapiens
gagaattacttgagtaatttcagctgtgtttcagttaaaagtaatacatttatgtctgaagtgatttgtaagtcttttagtttaaaatttttaattttaaaaagtcatttaaaattttttaggtatgagaaataataaacataaactttaggcattcaccctttctagttggtaagattcgagctgtctttatccctcttacttgtggttgatggataatttcatgacttacagatggaagaaaatagaatctttatatgtgattcttatattgacataaaatgagttatattcttttatacttaaaatattagtgcaagttggacttttattaatagaaattgatgttgctttaaaaattaaatgatctgaagaaattttcttctctaaaattaatttacatgtagttgaatatatccttgagacactttgagtgagtagaaaactgacttcaagggacaaaattattctcatagatgctaaattgaaggcctttgtaaatctggaggttaaaaagtataa

SEQ ID NO: 415174 - DNA, 485 bp, Homo sapiens
ctgacatgcctcaagtttgtatgtcacctgacgtaactttacttaaaatgcctcttacattatcttctggtaagaactgtttattctggtcaggatcagtataatatgaattcttttttccaaatgaatttcttttaacttttgatgaaaaagaagagtgatcatttattcaacatatctttattgcacttactgcaaaatataccacctgctgcagtgggggggattcaaagatatgtaagttttagttctttttctcaaaagtttataggttgttagggaaattaaagcatgaatataaatagttgtaatacagagtatctgtgaaaagctaaaagccctataggactttatatgtgtgagagagaatttcatctggcttgcaatgatatgcatctttacttgttttaaaaatatcatcactgaacatgagacctaaatgtattacttcaacagaaagctaattgttgacttaagccatttta

SEQ ID NO: 415175 - DNA, 3497 bp, Homo sapiens
attctcatccggggtcacgtcggtcttccgggtgtctttgacagggttttctacgccgctttttcggcgacttttgctcttccgctttttgccaccgcccccaaccttctatatccttgcagcccctaccttttcttgtgttgctcctcccctggcagccgtgaggggggttagatctcagccggagccggagctgggcctagctgtcccacgggccaccactacctcctttggttcgggagaaagctacgaccaagtacgcccagctcgggccttagaacttctgaacgggcagtgcgggtaggccctgcttagcccttcccggaggacacctgtgagtttagggggtttcggagaggaacgcagcagtgtaggcccaggtcggcggcggggcacgggaaacttttccgaaacggtagcgttttgttttgcgtgggaggttccagcagtatctcttggttattccaaatttatgggcggcatctgggctgctgtacattttgaagaatcttaggaccgcttactttgcttactcgttttctattcctcgcgtactgcctcgtccaccactccaggaccaaaagaggaagatagtcttgggacccttgcatggtgtttcaaagggtggtgaagaactaaggtagaagaatacatgttcacttccagtgaacaagagcatgttcccaaactcaattttgggtcgcccacccttcactccaaatcatcaacaacataataacttctttaccctgtcacctactgtttattcacaccagcagcttatagatgcacaattcaactttcagaatgcagacttgtctagagctgtgtcattacagcagctgacatatggaaatgtcagtccaatacagacctcagcttccccattatttcgaggaaggaagagattaagcgatgaaaaaaaccttcctcttgacggtaaacggcaacgtttccattcaccccaccaagagccaactgtagttaaccagatagtgcctttatcaggtgaacgaagatactcaatgccaccattgtttcatacacattatgtaccagatatagtcagatgtgttccaccttttcgagaaattgcatttttagaacctagagaaatcacactgcctgaggccaaagataagttgagtcagcagatactggagttatttgaaacatgtcagcagcaaataagtgatttaaagaagaaagaactctgtcgaacacagctgcagagagaaattcagctgttatttccacaaagcagactttttttggttgggtcctctttaaatggatttggtacccggagcagtgatggtgatttatgcctagttgttaaggaagaaccagtaaatcagaagactgaagcacggcatatactcaccttagtccataaacacttctgtactagactttcgggctacattgagagacctcagctgattcgagcaaaagtgccaattgtgaagttcagggataaagtcagttgtgtggagtttgacttgaatgtaaacaatattgttggaataagaaacacattccttctcagaacttatgcataccttgaaaatcgagttcgtccgttagtgctggtgattaagaagtgggcaagtcaccatcagataaatgatgccagtcgtggtactttaagcagctatagtcttgtattgatggttttgcactatttacaaaccctacctgaacccatccttccatccctccaaaaaatttacccagagtcttttagtcctgctatacagctgcaccttgtacatcaagctccatgtaatgttcctccttacctctcaaagaatgaatcaaaccttggggacctcttactgggctttcttaaatattatgctacagaatttgactggaatagtcaaatgatttcagttcgtgaagccaaagccattccaaggcctgatggtattgaatggagaaataaatacatctgtgtagaagaaccttttgatggaacaaatacagccagagcagtgcacgaaaagcagaaatttgatatgatcaaggatcaatttttaaagtcatggcacagattgaaaaacaagagagatttgaacagtatactacctgtaagagctgctgtcctgaaaagataactggcctctatttcttaataaattcttccaagaaataaagaacaatagtttcatcataatacattatgtttacctccatcatagttgcttttttcatagttcttgttttcatgttttatttttaaaaagacatataaagattgcatattttattatgacatttcctaataaacccctttgatttaaaaatgtatttttaaaaatgtttacattgatgatgagtaatattgcatgtgttttcaggtgatcagataaaatatattttgggaaattaactgaacaaataaaaagtttttgatataacttcaattaattgtaccacatgctaatcctgaagagatgtgtagaattttggaaagggtctaattcatacatgcttaaagtataacctacgttagatagtttgttgtcaaagtctgttctagtaaagtgaagattcaagtcagttgttcagttacttgaagcaaaacgaaatctttcatttcagtcaaatcactgcagtcatgaaatactgaacaattgccttaagtctttgcttgactcactgggatagactgaggctttgggtgtgtctgtattagcatttcattagtacttcacatgcttttgatgtactcttgagattgctttaaattttgtattgaaacaacaatacattttgcactgtagtaatgggagcactaactcttacaacagttagtgaatcgttttaaagaatcagttcagtgtagacattttgaaaagattgtttcctgtgctttacgatagcttagtgcaatgtgcacttctgttttacttgccattttcctgctctgttttctctgtgacatgaagcaacagaaactgagatcaaagttaagattatatcctgtttgtagtatcagatatttttctgtgtacaattataggattgtaatctaaactggaatttttaggcagtaagtcaccacaaaatgttttagataagacacaataaaattattataaataaaagcttaatgtttgtaaaaaatctcttttttagtatttcttttttcacatgaaagaagtggtggctgctaaaaaaaaagctacagtgtttattaagggtctttttgatttatgtaaatatttgtaaattggtcagtgcctgtaaatttaaatataaaaagtaaccttgaaaacagttttaactttttcaaaagaactatgtccaacattttttagacctgctgtagtacagttttgtacctctaacgtattttttttttgcagaccaaatgctaaaacttttgcttttctttgacttgtaaaaggtgcacattttcattttcttccttaagttcaaatttttgtatgatgtcaaatgcaataaaatttatatatggaaaaaaatga

SEQ ID NO: 415176 - DNA, 3453 bp, Homo sapiens
attctcatccggggtcacgtcggtcttccgggtgtctttgacagggttttctacgccgctttttcggcgacttttgctcttccgctttttgccaccgcccccaaccttctatatccttgcagcccctaccttttcttgtgttgctcctcccctggcagccgtgaggggggttagatctcagccggagccggagctgggcctagctgtcccacgggccaccactacctcctttggttcgggagaaagctacgaccaagtacgcccagctcgggccttagaacttctgaacgggcagtgcgggtaggccctgcttagcccttcccggaggacacctgtgagtttagggggtttcggagaggaacgcagcagtgtaggcccaggtcggcggcggggcacgggaaacttttccgaaacggtagcgttttgttttgcgtgggaggttccagcagtatctcttggttattccaaatttatgggcggcatctgggctgctgtacattttgaagaatcttaggaccgcttactttgcttactcgttttctattcctcgcgtactgcctcgtccaccactccaggaccaaaagaggaagatagtcttgggacccttgcatggtgtttcaaagggtggtgaagaactaaggtagaagaatacatgttcacttccagtgaacaagagcatgttcccaaactcaattttgggtcgcccacccttcactccaaatcatcaacaacataataacttctttaccctgtcacctactgtttattcacaccagcagcttatagatgcacaattcaactttcagaatgcagacttgtctagagctgtgtcattacagcagctgacatatggaaatgtcagtccaatacagacctcagcttccccattatttcgaggaaggaagagattaagcgatgaaaaaaaccttcctcttgacggtaaacggcaacgtttccattcaccccaccaagagccaactgtagttaaccagatagtgcctttatcaggtgaacgaagatactcaatgccaccattgtttcatacacattatgtaccagatatagtcagatgtgttccaccttttcgagaaattgcatttttagaacctagagaaatcacactgcctgaggccaaagataagttgagtcagcagatactggagttatttgaaacatgtcagcagcaaataagtgatttaaagaagaaagaactctgtcgaacacagctgcagagagaaattcagctgttatttccacaaagcagactttttttggttgggtcctctttaaatggatttggtacccggagcagtgatggtgatttatgcctagttgttaaggaagaaccagtaaatcagaagactgaagcacggcatatactcaccttagtccataaacacttctgtactagactttcgggctacattgagagacctcagctgattcgagcaaaagtgccaattgtgaagttcagggataaagtcagttgtgtggagtttgacttgaatgtaaacaatattgttggaataagaaacacattccttctcagaacttatgcataccttgaaaatcgagttcgtccgttagtgctggtgattaagaagtgggcaagtcaccatcagataaatgatgccagtcgtggtactttaagcagctatagtcttgtattgatggttttgcactatttacaaagagtcttttagtcctgctatacagctgcaccttgtacatcaagctccatgtaatgttcctccttacctctcaaagaatgaatcaaaccttggggacctcttactgggctttcttaaatattatgctacagaatttgactggaatagtcaaatgatttcagttcgtgaagccaaagccattccaaggcctgatggtattgaatggagaaataaatacatctgtgtagaagaaccttttgatggaacaaatacagccagagcagtgcacgaaaagcagaaatttgatatgatcaaggatcaatttttaaagtcatggcacagattgaaaaacaagagagatttgaacagtatactacctgtaagagctgctgtcctgaaaagataactggcctctatttcttaataaattcttccaagaaataaagaacaatagtttcatcataatacattatgtttacctccatcatagttgcttttttcatagttcttgttttcatgttttatttttaaaaagacatataaagattgcatattttattatgacatttcctaataaacccctttgatttaaaaatgtatttttaaaaatgtttacattgatgatgagtaatattgcatgtgttttcaggtgatcagataaaatatattttgggaaattaactgaacaaataaaaagtttttgatataacttcaattaattgtaccacatgctaatcctgaagagatgtgtagaattttggaaagggtctaattcatacatgcttaaagtataacctacgttagatagtttgttgtcaaagtctgttctagtaaagtgaagattcaagtcagttgttcagttacttgaagcaaaacgaaatctttcatttcagtcaaatcactgcagtcatgaaatactgaacaattgccttaagtctttgcttgactcactgggatagactgaggctttgggtgtgtctgtattagcatttcattagtacttcacatgcttttgatgtactcttgagattgctttaaattttgtattgaaacaacaatacattttgcactgtagtaatgggagcactaactcttacaacagttagtgaatcgttttaaagaatcagttcagtgtagacattttgaaaagattgtttcctgtgctttacgatagcttagtgcaatgtgcacttctgttttacttgccattttcctgctctgttttctctgtgacatgaagcaacagaaactgagatcaaagttaagattatatcctgtttgtagtatcagatatttttctgtgtacaattataggattgtaatctaaactggaatttttaggcagtaagtcaccacaaaatgttttagataagacacaataaaattattataaataaaagcttaatgtttgtaaaaaatctcttttttagtatttcttttttcacatgaaagaagtggtggctgctaaaaaaaaagctacagtgtttattaagggtctttttgatttatgtaaatatttgtaaattggtcagtgcctgtaaatttaaatataaaaagtaaccttgaaaacagttttaactttttcaaaagaactatgtccaacattttttagacctgctgtagtacagttttgtacctctaacgtattttttttttgcagaccaaatgctaaaacttttgcttttctttgacttgtaaaaggtgcacattttcattttcttccttaagttcaaatttttgtatgatgtcaaatgcaataaaatttatatatggaaaaaaatga

SEQ ID NO: 415177 - DNA, 3220 bp, Homo sapiens
tctttttctttagcaacaatattgtgttaatttagtacaggttgagtattcattatctaaaatgcttgggactagagttttttggattgtagatttttttttttgaatacttgcattatacttaacatttgaacatccctgatgcaaatctgaaatgctccaatgaacatttcctttgagtatcatgtcagcactcagaaagtttcagattttggatttcaggtttttggattagggatgctcaacctgtagtatgtttacctgaatttcctgttaactgatactcctgtgtataatactgtagtaattggtattcattaagctgacttgaggcagcctttttaagatgctgaggtttcttctgaactaccaatgattaattaagctcagtgtaattttaatatgccttattatgttttacatctttaaaaatacaaaaaattattgagtgttaatgtatatttttactattcatattattccactagcgaaaatgacttctagttactgcaagtcagaaagagatttattccaggaagaatgatatttttctaggctttgaaatcatataaagagaaagtttaaaaaaactcacattataaacagtggagagtacaagggttgtaattaaaactttttcgtgctgctagattatactcaagcacatcccactcatcctctagtgttattcacatatctaaatcatgatgtcatagcttttacacaaactgaggcaccatagatatgaaactatccttgagcagcttaaaatctagatagggctaaaattctgtttatttttgttggaggttgctttttgtacatttatgctgaaggggaaaatgacatagatggctatttcagaatttctttgaaaattgtgctttaagcttaaaatcaggaattgatttagaaatgtagatgtgaaagatagcattaaaggttgactttttctgttatttagaaaaataaattgaatatactttgagtatattgaaaaataactccaaaggaaagtatatcttgtatgttttctttttgttgagatactttaggaaaatgaaacattaaacttagaaagataatgaaaacacggcatatactcaccttagtccataaacacttctgtactagactttcgggctacattgagagacctcagctgattcgagcaaaagtgccaattgtgaagttcagggataaagtcagttgtgtggagtttgacttgaatgtaaacaatattgttggaataagaaacacattccttctcagaacttatgcataccttgaaaatcgagttcgtccgttagtgctggtgattaagaagtgggcaagtcaccatcagataaatgatgccagtcgtggtactttaagcagctatagtcttgtattgatggttttgcactatttacaaaccctacctgaacccatccttccatccctccaaaaaatttacccagagtcttttagtcctgctatacagctgcaccttgtacatcaagctccatgtaatgttcctccttacctctcaaagaatgaatcaaaccttggggacctcttactgggctttcttaaatattatgctacagaatttgactggaatagtcaaatgatttcagttcgtgaagccaaagccattccaaggcctgatggtattgaatggagaaataaatacatctgtgtagaagaaccttttgatggaacaaatacagccagagcagtgcacgaaaagcagaaatttgatatgatcaaggatcaatttttaaagtcatggcacagattgaaaaacaagagagatttgaacagtatactacctgtaagagctgctgtcctgaaaagataactggcctctatttcttaataaattcttccaagaaataaagaacaatagtttcatcataatacattatgtttacctccatcatagttgcttttttcatagttcttgttttcatgttttatttttaaaaagacatataaagattgcatattttattatgacatttcctaataaacccctttgatttaaaaatgtatttttaaaaatgtttacattgatgatgagtaatattgcatgtgttttcaggtgatcagataaaatatattttgggaaattaactgaacaaataaaaagtttttgatataacttcaattaattgtaccacatgctaatcctgaagagatgtgtagaattttggaaagggtctaattcatacatgcttaaagtataacctacgttagatagtttgttgtcaaagtctgttctagtaaagtgaagattcaagtcagttgttcagttacttgaagcaaaacgaaatctttcatttcagtcaaatcactgcagtcatgaaatactgaacaattgccttaagtctttgcttgactcactgggatagactgaggctttgggtgtgtctgtattagcatttcattagtacttcacatgcttttgatgtactcttgagattgctttaaattttgtattgaaacaacaatacattttgcactgtagtaatgggagcactaactcttacaacagttagtgaatcgttttaaagaatcagttcagtgtagacattttgaaaagattgtttcctgtgctttacgatagcttagtgcaatgtgcacttctgttttacttgccattttcctgctctgttttctctgtgacatgaagcaacagaaactgagatcaaagttaagattatatcctgtttgtagtatcagatatttttctgtgtacaattataggattgtaatctaaactggaatttttaggcagtaagtcaccacaaaatgttttagataagacacaataaaattattataaataaaagcttaatgtttgtaaaaaatctcttttttagtatttcttttttcacatgaaagaagtggtggctgctaaaaaaaaagctacagtgtttattaagggtctttttgatttatgtaaatatttgtaaattggtcagtgcctgtaaatttaaatataaaaagtaaccttgaaaacagttttaactttttcaaaagaactatgtccaacattttttagacctgctgtagtacagttttgtacctctaacgtattttttttttgcagaccaaatgctaaaacttttgcttttctttgacttgtaaaaggtgcacattttcattttcttccttaagttcaaatttttgtatgatgtcaaatgcaataaaatttatatatggaaaaaaatga

SEQ ID NO: 415178 - DNA, 3311 bp, Homo sapiens
attctcatccggggtcacgtcggtcttccgggtgtctttgacagggttttctacgccgctttttcggcgacttttgctcttccgctttttgccaccgcccccaaccttctatatccttgcagcccctaccttttcttgtgttgctcctcccctggcagccgtgaggggggttagatctcagccggagccggagctgggcctagctgtcccacgggccaccactacctcctttggttcgggagaaagctacgaccaagtacgcccagctcgggccttagaacttctgaacgggcagtgcgggaccaaaagaggaagatagtcttgggacccttgcatggtgtttcaaagggtggtgaagaactaaggggctccagagcttgatatatttctgggaatttggaatatgctaaactagatttctgccctagactaaacatctggctgtggactcaatgtagaagaatacatgttcacttccagtgaacaagagcatgttcccaaactcaattttgggtcgcccacccttcactccaaatcatcaacaacataataacttctttaccctgtcacctactgtttattcacaccagcagcttatagatgcacaattcaactttcagaatgcagacttgtctagagctgtgtcattacagcagctgacatatggaaatgtcagtccaatacagacctcagcttccccattatttcgaggaaggaagagattaagcgatgaaaaaaaccttcctcttgacggtaaacggcaacgtttccattcaccccaccaagagccaactgtagttaaccagatagtgcctttatcaggtgaacgaagatactcaatgccaccattgtttcatacacattatgtaccagatatagtcagatgtgttccaccttttcgagaaattgcatttttagaacctagagaaatcacactgcctgaggccaaagataagttgagtcagcagatactggagttatttgaaacatgtcagcagcaaataagtgatttaaagaagaaagaactctgtcgaacacagctgcagagagaaattcagctgttatttccacaaagcagactttttttggttgggtcctctttaaatggatttggtacccggagcagtgatggtgatttatgcctagttgttaaggaagaaccagtaaatcagaagactgaagcacggcatatactcaccttagtccataaacacttctgtactagactttcgggctacattgagagacctcagctgattcgagcaaaagtgccaattgtgaagttcagggataaagtcagttgtgtggagtttgacttgaatgtaaacaatattgttggaataagaaacacattccttctcagaacttatgcataccttgaaaatcgagttcgtccgttagtgctggtgattaagaagtgggcaagtcaccatcagataaatgatgccagtcgtggtactttaagcagctatagtcttgtattgatggttttgcactatttacaaaccctacctgaacccatccttccatccctccaaaaaatttacccagagtcttttagtcctgctatacagctgcaccttgtacatcaagctccatgtaatgttcctccttacctctcaaagaatgaatcaaaccttggggacctcttactgggctttcttaaatattatgctacagaatttgactggaatagtcaaatgatttcagttcgtgaagccaaagccattccaaggcctgatggtattgaatggagaaataaatacatctgtgtagaagaaccttttgatggaacaaatacagccagagcagtgcacgaaaagcagaaatttgatatgatcaaggatcaatttttaaagtcatggcacagattgaaaaacaagagagatttgaacagtatactacctgtaagagctgctgtcctgaaaagataactggcctctatttcttaataaattcttccaagaaataaagaacaatagtttcatcataatacattatgtttacctccatcatagttgcttttttcatagttcttgttttcatgttttatttttaaaaagacatataaagattgcatattttattatgacatttcctaataaacccctttgatttaaaaatgtatttttaaaaatgtttacattgatgatgagtaatattgcatgtgttttcaggtgatcagataaaatatattttgggaaattaactgaacaaataaaaagtttttgatataacttcaattaattgtaccacatgctaatcctgaagagatgtgtagaattttggaaagggtctaattcatacatgcttaaagtataacctacgttagatagtttgttgtcaaagtctgttctagtaaagtgaagattcaagtcagttgttcagttacttgaagcaaaacgaaatctttcatttcagtcaaatcactgcagtcatgaaatactgaacaattgccttaagtctttgcttgactcactgggatagactgaggctttgggtgtgtctgtattagcatttcattagtacttcacatgcttttgatgtactcttgagattgctttaaattttgtattgaaacaacaatacattttgcactgtagtaatgggagcactaactcttacaacagttagtgaatcgttttaaagaatcagttcagtgtagacattttgaaaagattgtttcctgtgctttacgatagcttagtgcaatgtgcacttctgttttacttgccattttcctgctctgttttctctgtgacatgaagcaacagaaactgagatcaaagttaagattatatcctgtttgtagtatcagatatttttctgtgtacaattataggattgtaatctaaactggaatttttaggcagtaagtcaccacaaaatgttttagataagacacaataaaattattataaataaaagcttaatgtttgtaaaaaatctcttttttagtatttcttttttcacatgaaagaagtggtggctgctaaaaaaaaagctacagtgtttattaagggtctttttgatttatgtaaatatttgtaaattggtcagtgcctgtaaatttaaatataaaaagtaaccttgaaaacagttttaactttttcaaaagaactatgtccaacattttttagacctgctgtagtacagttttgtacctctaacgtattttttttttgcagaccaaatgctaaaacttttgcttttctttgacttgtaaaaggtgcacattttcattttcttccttaagttcaaatttttgtatgatgtcaaatgcaataaaatttatatatggaaaaaaatga

SEQ ID NO: 415179 - DNA, 3222 bp, Homo sapiens
attctcatccggggtcacgtcggtcttccgggtgtctttgacagggttttctacgccgctttttcggcgacttttgctcttccgctttttgccaccgcccccaaccttctatatccttgcagcccctaccttttcttgtgttgctcctcccctggcagccgtgaggggggttagatctcagccggagccggagctgggcctagctgtcccacgggccaccactacctcctttggttcgggagaaagctacgaccaagtacgcccagctcgggccttagaacttctgaacgggcagtgcgggaccaaaagaggaagatagtcttgggacccttgcatggtgtttcaaagggtggtgaagaactaaggtagaagaatacatgttcacttccagtgaacaagagcatgttcccaaactcaattttgggtcgcccacccttcactccaaatcatcaacaacataataacttctttaccctgtcacctactgtttattcacaccagcagcttatagatgcacaattcaactttcagaatgcagacttgtctagagctgtgtcattacagcagctgacatatggaaatgtcagtccaatacagacctcagcttccccattatttcgaggaaggaagagattaagcgatgaaaaaaaccttcctcttgacggtaaacggcaacgtttccattcaccccaccaagagccaactgtagttaaccagatagtgcctttatcaggtgaacgaagatactcaatgccaccattgtttcatacacattatgtaccagatatagtcagatgtgttccaccttttcgagaaattgcatttttagaacctagagaaatcacactgcctgaggccaaagataagttgagtcagcagatactggagttatttgaaacatgtcagcagcaaataagtgatttaaagaagaaagaactctgtcgaacacagctgcagagagaaattcagctgttatttccacaaagcagactttttttggttgggtcctctttaaatggatttggtacccggagcagtgatggtgatttatgcctagttgttaaggaagaaccagtaaatcagaagactgaagcacggcatatactcaccttagtccataaacacttctgtactagactttcgggctacattgagagacctcagctgattcgagcaaaagtgccaattgtgaagttcagggataaagtcagttgtgtggagtttgacttgaatgtaaacaatattgttggaataagaaacacattccttctcagaacttatgcataccttgaaaatcgagttcgtccgttagtgctggtgattaagaagtgggcaagtcaccatcagataaatgatgccagtcgtggtactttaagcagctatagtcttgtattgatggttttgcactatttacaaaccctacctgaacccatccttccatccctccaaaaaatttacccagagtcttttagtcctgctatacagctgcaccttgtacatcaagctccatgtaatgttcctccttacctctcaaagaatgaatcaaaccttggggacctcttactgggctttcttaaatattatgctacagaatttgactggaatagtcaaatgatttcagttcgtgaagccaaagccattccaaggcctgatggtattgaatggagaaataaatacatctgtgtagaagaaccttttgatggaacaaatacagccagagcagtgcacgaaaagcagaaatttgatatgatcaaggatcaatttttaaagtcatggcacagattgaaaaacaagagagatttgaacagtatactacctgtaagagctgctgtcctgaaaagataactggcctctatttcttaataaattcttccaagaaataaagaacaatagtttcatcataatacattatgtttacctccatcatagttgcttttttcatagttcttgttttcatgttttatttttaaaaagacatataaagattgcatattttattatgacatttcctaataaacccctttgatttaaaaatgtatttttaaaaatgtttacattgatgatgagtaatattgcatgtgttttcaggtgatcagataaaatatattttgggaaattaactgaacaaataaaaagtttttgatataacttcaattaattgtaccacatgctaatcctgaagagatgtgtagaattttggaaagggtctaattcatacatgcttaaagtataacctacgttagatagtttgttgtcaaagtctgttctagtaaagtgaagattcaagtcagttgttcagttacttgaagcaaaacgaaatctttcatttcagtcaaatcactgcagtcatgaaatactgaacaattgccttaagtctttgcttgactcactgggatagactgaggctttgggtgtgtctgtattagcatttcattagtacttcacatgcttttgatgtactcttgagattgctttaaattttgtattgaaacaacaatacattttgcactgtagtaatgggagcactaactcttacaacagttagtgaatcgttttaaagaatcagttcagtgtagacattttgaaaagattgtttcctgtgctttacgatagcttagtgcaatgtgcacttctgttttacttgccattttcctgctctgttttctctgtgacatgaagcaacagaaactgagatcaaagttaagattatatcctgtttgtagtatcagatatttttctgtgtacaattataggattgtaatctaaactggaatttttaggcagtaagtcaccacaaaatgttttagataagacacaataaaattattataaataaaagcttaatgtttgtaaaaaatctcttttttagtatttcttttttcacatgaaagaagtggtggctgctaaaaaaaaagctacagtgtttattaagggtctttttgatttatgtaaatatttgtaaattggtcagtgcctgtaaatttaaatataaaaagtaaccttgaaaacagttttaactttttcaaaagaactatgtccaacattttttagacctgctgtagtacagttttgtacctctaacgtattttttttttgcagaccaaatgctaaaacttttgcttttctttgacttgtaaaaggtgcacattttcattttcttccttaagttcaaatttttgtatgatgtcaaatgcaataaaatttatatatggaaaaaaatga

SEQ ID NO: 415180 - DNA, 3055 bp, Homo sapiens
attatctgagttgcagctcatttttgaatttcttcgttgtccaatgtctttatagctttattgaaaagtagcccttttttataactagcactcagctcacttaatcgtatcttccttatgttatagtttggatcttcttagtaattctataaatagaacttttcctacaaagttttcactactgagatgaaacattggggtagttcaaatacaggagactaacctcaatatatacatgtagttttttctgtctccattattactattttttttaaggtgttgagaggcatttcttgtgctgaacatgaatatttttaagatccatataaagctaataaagtgaccttattgaaagaatcatattgtcattatctcttatgatatttatatatatttaattgctttttatttgttatcagaaagttgtatctttaattactaaggtatattgcttgttttcaggagattaagcgatgaaaaaaaccttcctcttgacggtaaacggcaacgtttccattcaccccaccaagagccaactgtagttaaccagatagtgcctttatcaggtgaacgaagatactcaatgccaccattgtttcatacacattatgtaccagatatagtcagatgtgttccaccttttcgagaaattgcatttttagaacctagagaaatcacactgcctgaggccaaagataagttgagtcagcagatactggagttatttgaaacatgtcagcagcaaataagtgatttaaagaagaaagaactctgtcgaacacagctgcagagagaaattcagctgttatttccacaaagcagactttttttggttgggtcctctttaaatggatttggtacccggagcagtgatggtgatttatgcctagttgttaaggaagaaccagtaaatcagaagactgaagcacggcatatactcaccttagtccataaacacttctgtactagactttcgggctacattgagagacctcagctgattcgagcaaaagtgccaattgtgaagttcagggataaagtcagttgtgtggagtttgacttgaatgtaaacaatattgttggaataagaaacacattccttctcagaacttatgcataccttgaaaatcgagttcgtccgttagtgctggtgattaagaagtgggcaagtcaccatcagataaatgatgccagtcgtggtactttaagcagctatagtcttgtattgatggttttgcactatttacaaaccctacctgaacccatccttccatccctccaaaaaatttacccagagtcttttagtcctgctatacagctgcaccttgtacatcaagctccatgtaatgttcctccttacctctcaaagaatgaatcaaaccttggggacctcttactgggctttcttaaatattatgctacagaatttgactggaatagtcaaatgatttcagttcgtgaagccaaagccattccaaggcctgatggtattgaatggagaaataaatacatctgtgtagaagaaccttttgatggaacaaatacagccagagcagtgcacgaaaagcagaaatttgatatgatcaaggatcaatttttaaagtcatggcacagattgaaaaacaagagagatttgaacagtatactacctgtaagagctgctgtcctgaaaagataactggcctctatttcttaataaattcttccaagaaataaagaacaatagtttcatcataatacattatgtttacctccatcatagttgcttttttcatagttcttgttttcatgttttatttttaaaaagacatataaagattgcatattttattatgacatttcctaataaacccctttgatttaaaaatgtatttttaaaaatgtttacattgatgatgagtaatattgcatgtgttttcaggtgatcagataaaatatattttgggaaattaactgaacaaataaaaagtttttgatataacttcaattaattgtaccacatgctaatcctgaagagatgtgtagaattttggaaagggtctaattcatacatgcttaaagtataacctacgttagatagtttgttgtcaaagtctgttctagtaaagtgaagattcaagtcagttgttcagttacttgaagcaaaacgaaatctttcatttcagtcaaatcactgcagtcatgaaatactgaacaattgccttaagtctttgcttgactcactgggatagactgaggctttgggtgtgtctgtattagcatttcattagtacttcacatgcttttgatgtactcttgagattgctttaaattttgtattgaaacaacaatacattttgcactgtagtaatgggagcactaactcttacaacagttagtgaatcgttttaaagaatcagttcagtgtagacattttgaaaagattgtttcctgtgctttacgatagcttagtgcaatgtgcacttctgttttacttgccattttcctgctctgttttctctgtgacatgaagcaacagaaactgagatcaaagttaagattatatcctgtttgtagtatcagatatttttctgtgtacaattataggattgtaatctaaactggaatttttaggcagtaagtcaccacaaaatgttttagataagacacaataaaattattataaataaaagcttaatgtttgtaaaaaatctcttttttagtatttcttttttcacatgaaagaagtggtggctgctaaaaaaaaagctacagtgtttattaagggtctttttgatttatgtaaatatttgtaaattggtcagtgcctgtaaatttaaatataaaaagtaaccttgaaaacagttttaactttttcaaaagaactatgtccaacattttttagacctgctgtagtacagttttgtacctctaacgtattttttttttgcagaccaaatgctaaaacttttgcttttctttgacttgtaaaaggtgcacattttcattttcttccttaagttcaaatttttgtatgatgtcaaatgcaataaaatttatatatggaaaaaaatga

SEQ ID NO: 415181 - DNA, 3108 bp, Homo sapiens
attatctgagttgcagctcatttttgaatttcttcgttgtccaatgtctttatagctttattgaaaagtgtttcttaattggtctttcctgctgatgagtcagaacataggtgtattcaaagagcccttttttataactagcactcagctcacttaatcgtatcttccttatgttatagtttggatcttcttagtaattctataaatagaacttttcctacaaagttttcactactgagatgaaacattggggtagttcaaatacaggagactaacctcaatatatacatgtagttttttctgtctccattattactattttttttaaggtgttgagaggcatttcttgtgctgaacatgaatatttttaagatccatataaagctaataaagtgaccttattgaaagaatcatattgtcattatctcttatgatatttatatatatttaattgctttttatttgttatcagaaagttgtatctttaattactaaggtatattgcttgttttcaggagattaagcgatgaaaaaaaccttcctcttgacggtaaacggcaacgtttccattcaccccaccaagagccaactgtagttaaccagatagtgcctttatcaggtgaacgaagatactcaatgccaccattgtttcatacacattatgtaccagatatagtcagatgtgttccaccttttcgagaaattgcatttttagaacctagagaaatcacactgcctgaggccaaagataagttgagtcagcagatactggagttatttgaaacatgtcagcagcaaataagtgatttaaagaagaaagaactctgtcgaacacagctgcagagagaaattcagctgttatttccacaaagcagactttttttggttgggtcctctttaaatggatttggtacccggagcagtgatggtgatttatgcctagttgttaaggaagaaccagtaaatcagaagactgaagcacggcatatactcaccttagtccataaacacttctgtactagactttcgggctacattgagagacctcagctgattcgagcaaaagtgccaattgtgaagttcagggataaagtcagttgtgtggagtttgacttgaatgtaaacaatattgttggaataagaaacacattccttctcagaacttatgcataccttgaaaatcgagttcgtccgttagtgctggtgattaagaagtgggcaagtcaccatcagataaatgatgccagtcgtggtactttaagcagctatagtcttgtattgatggttttgcactatttacaaaccctacctgaacccatccttccatccctccaaaaaatttacccagagtcttttagtcctgctatacagctgcaccttgtacatcaagctccatgtaatgttcctccttacctctcaaagaatgaatcaaaccttggggacctcttactgggctttcttaaatattatgctacagaatttgactggaatagtcaaatgatttcagttcgtgaagccaaagccattccaaggcctgatggtattgaatggagaaataaatacatctgtgtagaagaaccttttgatggaacaaatacagccagagcagtgcacgaaaagcagaaatttgatatgatcaaggatcaatttttaaagtcatggcacagattgaaaaacaagagagatttgaacagtatactacctgtaagagctgctgtcctgaaaagataactggcctctatttcttaataaattcttccaagaaataaagaacaatagtttcatcataatacattatgtttacctccatcatagttgcttttttcatagttcttgttttcatgttttatttttaaaaagacatataaagattgcatattttattatgacatttcctaataaacccctttgatttaaaaatgtatttttaaaaatgtttacattgatgatgagtaatattgcatgtgttttcaggtgatcagataaaatatattttgggaaattaactgaacaaataaaaagtttttgatataacttcaattaattgtaccacatgctaatcctgaagagatgtgtagaattttggaaagggtctaattcatacatgcttaaagtataacctacgttagatagtttgttgtcaaagtctgttctagtaaagtgaagattcaagtcagttgttcagttacttgaagcaaaacgaaatctttcatttcagtcaaatcactgcagtcatgaaatactgaacaattgccttaagtctttgcttgactcactgggatagactgaggctttgggtgtgtctgtattagcatttcattagtacttcacatgcttttgatgtactcttgagattgctttaaattttgtattgaaacaacaatacattttgcactgtagtaatgggagcactaactcttacaacagttagtgaatcgttttaaagaatcagttcagtgtagacattttgaaaagattgtttcctgtgctttacgatagcttagtgcaatgtgcacttctgttttacttgccattttcctgctctgttttctctgtgacatgaagcaacagaaactgagatcaaagttaagattatatcctgtttgtagtatcagatatttttctgtgtacaattataggattgtaatctaaactggaatttttaggcagtaagtcaccacaaaatgttttagataagacacaataaaattattataaataaaagcttaatgtttgtaaaaaatctcttttttagtatttcttttttcacatgaaagaagtggtggctgctaaaaaaaaagctacagtgtttattaagggtctttttgatttatgtaaatatttgtaaattggtcagtgcctgtaaatttaaatataaaaagtaaccttgaaaacagttttaactttttcaaaagaactatgtccaacattttttagacctgctgtagtacagttttgtacctctaacgtattttttttttgcagaccaaatgctaaaacttttgcttttctttgacttgtaaaaggtgcacattttcattttcttccttaagttcaaatttttgtatgatgtcaaatgcaataaaatttatatatggaaaaaaatga

SEQ ID NO: 415182 - DNA, 2247 bp, Homo sapiens
gtttgtttattaaaaattagcctttttttctttattcatttttaaagatgtttggcataaatagtgacatctctttagttgtgtttaagtatagtgtatcttattttatttgtatatgttgctacactaaaatcatatactgtcagttataggtgaatcaagtggcattttaataattgataatttttaaaaggtaactaaggtaagttttagacataagacacaaagtgaacagacacagtgtttaatatacacggagacagtgttctttgttttggtatggagctgggaaatgatgtaaactttcaaagaaactataacgtctcttaccatgttaagttttaattttactttcagttgaaaatcgagttcgtccgttagtgctggtgattaagaagtgggcaagtcaccatcagataaatgatgccagtcgtggtactttaagcagctatagtcttgtattgatggttttgcactatttacaaagagtcttttagtcctgctatacagctgcaccttgtacatcaagctccatgtaatgttcctccttacctctcaaagaatgaatcaaaccttggggacctcttactgggctttcttaaatattatgctacagaatttgactggaatagtcaaatgatttcagttcgtgaagccaaagccattccaaggcctgatggtattgaatggagaaataaatacatctgtgtagaagaaccttttgatggaacaaatacagccagagcagtgcacgaaaagcagaaatttgatatgatcaaggatcaatttttaaagtcatggcacagattgaaaaacaagagagatttgaacagtatactacctgtaagagctgctgtcctgaaaagataactggcctctatttcttaataaattcttccaagaaataaagaacaatagtttcatcataatacattatgtttacctccatcatagttgcttttttcatagttcttgttttcatgttttatttttaaaaagacatataaagattgcatattttattatgacatttcctaataaacccctttgatttaaaaatgtatttttaaaaatgtttacattgatgatgagtaatattgcatgtgttttcaggtgatcagataaaatatattttgggaaattaactgaacaaataaaaagtttttgatataacttcaattaattgtaccacatgctaatcctgaagagatgtgtagaattttggaaagggtctaattcatacatgcttaaagtataacctacgttagatagtttgttgtcaaagtctgttctagtaaagtgaagattcaagtcagttgttcagttacttgaagcaaaacgaaatctttcatttcagtcaaatcactgcagtcatgaaatactgaacaattgccttaagtctttgcttgactcactgggatagactgaggctttgggtgtgtctgtattagcatttcattagtacttcacatgcttttgatgtactcttgagattgctttaaattttgtattgaaacaacaatacattttgcactgtagtaatgggagcactaactcttacaacagttagtgaatcgttttaaagaatcagttcagtgtagacattttgaaaagattgtttcctgtgctttacgatagcttagtgcaatgtgcacttctgttttacttgccattttcctgctctgttttctctgtgacatgaagcaacagaaactgagatcaaagttaagattatatcctgtttgtagtatcagatatttttctgtgtacaattataggattgtaatctaaactggaatttttaggcagtaagtcaccacaaaatgttttagataagacacaataaaattattataaataaaagcttaatgtttgtaaaaaatctcttttttagtatttcttttttcacatgaaagaagtggtggctgctaaaaaaaaagctacagtgtttattaagggtctttttgatttatgtaaatatttgtaaattggtcagtgcctgtaaatttaaatataaaaagtaaccttgaaaacagttttaactttttcaaaagaactatgtccaacattttttagacctgctgtagtacagttttgtacctctaacgtattttttttttgcagaccaaatgctaaaacttttgcttttctttgacttgtaaaaggtgcacattttcattttcttccttaagttcaaatttttgtatgatgtcaaatgcaataaaatttatatatggaaaaaaatga

SEQ ID NO: 415183 - DNA, 3442 bp, Homo sapiens
attctcatccggggtcacgtcggtcttccgggtgtctttgacagggttttctacgccgctttttcggcgacttttgctcttccgctttttgccaccgcccccaaccttctatatccttgcagcccctaccttttcttgtgttgctcctcccctggcagccgtgaggggggttagatctcagccggagccggagctgggcctagctgtcccacgggccaccactacctcctttggttcgggagaaagctacgaccaagtacgcccagctcgggccttagaacttctgaacgggcagtgcgggtaggccctgcttagcccttcccggaggacacctgtgagtttagggggtttcggagaggaacgcagcagtgtaggcccaggtcggcggcggggcacgggaaacttttccgaaacggtagcgttttgttttgcgtgggaggttccagcagtatctcttggttattccaaatttatgggcggcatctgggctgctgtacattttgaagaatcttaggaccgcttactttgcttactcgttttctattcctcgcgtactgcctcgtccaccactccaggaccaaaagaggaagatagtcttgggacccttgcatggtgtttcaaagggtggtgaagaactaaggtagaagaatacatgttcacttccagtgaacaagagcatgttcccaaactcaattttgggtcgcccacccttcactccaaatcatcaacaacataataacttctttaccctgtcacctactgtttattcacaccagcagcttatagatgcacaattcaactttcagaatgcagacttgtctagagctgtgtcattacagcagctgacatatggaaatgtcagtccaatacagacctcagcttccccattatttcgaggaaggaagagattaagcgatgaaaaaaaccttcctcttgacggtaaacggcaacgtttccattcaccccaccaagagccaactgtagttaaccagatagtgcctttatcaggtgaacgaagatactcaatgccaccattgtttcatacacattatgtaccagatatagtcagatgtgttccaccttttcgagaaattgcatttttagaacctagagaaatcacactgcctgaggccaaagataagttgagtcagcagatactggagttatttgaaacatgtcagcagcaaataagtgatttaaagaagaaagaactctgtcgaacacagctgcagagagaaattcagctgttatttccacaaagcagactttttttggttgggtcctctttaaatggatttggtacccggagcagtgatggtgatttatgcctagttgttaaggaagaaccagtaaatcagaagactgaagcacggcatatactcaccttagtccataaacacttctgtactagactttcgggctacattgagagacctcagctgattcgagcaaaagtgccaattgtgaagttcagggataaagtcagttgtgtggagtttgacttgaatgtaaacaatattgttggaataagaaacacattccttctcagaacttatgcataccttgaaaatcgagttcgtccgttagtgctggtgattaagaagtgggcaagtcaccatcagataaatgatgccagtcgtggtactttaagcagctatagtcttgtattgatggttttgcactatttacaaaccctacctgaacccatccttccatccctccaaaaaatttacccagagtcttttagtcctgctatacagctgcaccttgtacatcaagctccatgtaatgttcctccttacctctcaaagaatgaatcaaaccttggggacctcttactgggctttcttaaatattatgctacagaatttgactggaatagtcaaatgatttcagttcgtgaagccaaagccattccaaggcctgatggtattgaatggagaaataaatacatctgtgtagaagaaccttttgatggaacaaatacagccagagcagtgcacgaaaagcagaaatttgatatgatcaaggatcaatttttaaagtcatggcacagattgaaaaacaagagagatttgaacagtatactacctgtaagagctgctgtcctgaaaagataactggcctctatttcttaataaattcttccaagaaataaagaacaatagtttcatcataatacattatgtttacctccatcatagttgcttttttcatagttcttgttttcatgttttatttttaaaaagacatataaagattgcatattttattatgacatttcctaataaacccctttgatttaaaaatgtatttttaaaaatgtttacattgatgatgagtaatattgcatgtgttttcaggtgatcagataaaatatattttgggaaattaactgaacaaataaaaagtttttgatataacttcaattaattgtaccacatgctaatcctgaagagatgtgtagaattttggaaagggtctaattcatacatgcttaaagtataacctacgttagatagtttgttgtcaaagtctgttctagtaaagtgaagattcaagtcagttgttcagttacttgaagcaaaacgaaatctttcatttcagtcaaatcactgcagtcatgaaatactgaacaattgccttaagtctttgcttgactcactgggatagactgaggctttgggtgtgtctgtattagcatttcattagtacttcacatgcttttgatgtactcttgagattgctttaaattttgtattgaaacaacaatacattttgcactgtagtaatgggagcactaactcttacaacagttagtgaatcgttttaaagaatcagttcagtgtagacattttgaaaagattgtttcctgtgctttacgatagcttagtgcaatgtgcacttctgttttacttgccattttcctgctctgttttctctgtgacatgaagcaacagaaactgagatcaaagttaagattatatcctgtttgtagtatcagatatttttctgtgtacaattataggattgtaatctaaactggaatttttaggcagtaagtcaccacaaaatgttttagataagacacaataaaattattataaataaaagcttaatgttttaaaaaaaaagctacagtgtttattaagggtctttttgatttatgtaaatatttgtaaattggtcagtgcctgtaaatttaaatataaaaagtaaccttgaaaacagttttaactttttcaaaagaactatgtccaacattttttagacctgctgtagtacagttttgtacctctaacgtattttttttttgcagaccaaatgctaaaacttttgcttttctttgacttgtaaaaggtgcacattttcattttcttccttaagttcaaatttttgtatgatgtcaaatgcaataaaatttatatatggaaaaaaatga

SEQ ID NO: 415184 - DNA, 1594 bp, Homo sapiens
attctcatccggggtcacgtcggtcttccgggtgtctttgacagggttttctacgccgctttttcggcgacttttgctcttccgctttttgccaccgcccccaaccttctatatccttgcagcccctaccttttcttgtgttgctcctcccctggcagccgtgaggggggttagatctcagccggagccggagctgggcctagctgtcccacgggccaccactacctcctttggttcgggagaaagctacgaccaagtacgcccagctcgggccttagaacttctgaacgggcagtgcgggtaggccctgcttagcccttcccggaggacacctgtgagtttagggggtttcggagaggaacgcagcagtgtaggcccaggtcggcggcggggcacgggaaacttttccgaaacggtagcgttttgttttgcgtgggaggttccagcagtatctcttggttattccaaatttatgggcggcatctgggctgctgtacattttgaagaatcttaggaccgcttactttgcttactcgttttctattcctcgcgtactgcctcgtccaccactccaggaccaaaagaggaagatagtcttgggacccttgcatggtgtttcaaagggtggtgaagaactaaggtagaagaatacatgttcacttccagtgaacaagagcatgttcccaaactcaattttgggtcgcccacccttcactccaaatcatcaacaacataataacttctttaccctgtcacctactgtttattcacaccagcagcttatagatgcacaattcaactttcagaatgcagacttgtctagagctgtgtcattacagcagctgacatatggaaatgtcagtccaatacagacctcagcttccccattatttcgaggaaggaagagattaagcgatgaaaaaaaccttcctcttgacggtaaacggcaacgtttccattcaccccaccaagagccaactgtagttaaccagatagtgcctttatcaggtgaacgaagatactcaatgccaccattgtttcatacacattatgtaccagatatagtcagatgtgttccaccttttcgagaaattgcatttttagaacctagagaaatcacactgcctgaggccaaagataaggtaataataatgtagattttagttttgccttttgggaatttagtataaataatgtattaatcaaaaatatttaatatcctggattaagtagaacgtgcctttttttgttgcaatgtttaaagtactattcagcctaattttctgtccaaacattactttgatttttgttagctattcttttatagaaatgcagccatcaggaaatcagattttccctgatatatgaaaattttattagaacccagacactttctgagtttagagaactgtcttgttacttgtttttactgaaaaaaaaaaaagttgtcatatagctattgtaatacagtgttagaacacattttattatgggatatttgtgttataacatgaggttttttgaatgtcaaaaatagagaatccaggagtcactgagaaaaacaatacattcaaagtgatataatcaagaaaga

SEQ ID NO: 415185 - DNA, 1688 bp, Homo sapiens
attctcatccggggtcacgtcggtcttccgggtgtctttgacagggttttctacgccgctttttcggcgacttttgctcttccgctttttgccaccgcccccaaccttctatatccttgcagcccctaccttttcttgtgttgctcctcccctggcagccgtgaggggggttagatctcagccggagccggagctgggcctagctgtcccacgggccaccactacctcctttggttcgggagaaagctacgaccaagtacgcccagctcgggccttagaacttctgaacgggcagtgcgggtaggccctgcttagcccttcccggaggacacctgtgagtttagggggtttcggagaggaacgcagcagtgtaggcccaggtcggcggcggggcacgggaaacttttccgaaacggtagcgttttgttttgcgtgggaggttccagcagtatctcttggttattccaaatttatgggcggcatctgggctgctgtacattttgaagaatcttaggaccgcttactttgcttactcgttttctattcctcgcgtactgcctcgtccaccactccaggaccaaaagaggaagatagtcttgggacccttgcatggtgtttcaaagggtggtgaagaactaaggtagaagaatacatgttcacttccagtgaacaagagcatgttcccaaactcaattttgggtcgcccacccttcactccaaatcatcaacaacataataacttctttaccctgtcacctactgtttattcacaccagcagcttatagatgcacaattcaactttcagaatgcagacttgtctagagctgtgtcattacagcagctgacatatggaaatgtcagtccaatacagacctcagcttccccattatttcgaggaaggaagagattaagcgatgaaaaaaaccttcctcttgacggtaaacggcaacgtttccattcaccccaccaagagccaactgtagttaaccagatagtgcctttatcaggtgaacgaagatactcaatgccaccattgtttcatacacattatgtaccagatatagtcagatgtgttccaccttttcgagaaattgcatttttagaacctagagaaatcacactgcctgaggccaaagataagttgagtcagcagatactggagttatttgaaacatgtcagcagcaaataagtgatttaaagaagaaagaactctgtcgaacacagctgcagagagaaattcagctgttatttccacaaagcagactttttttggttgggtcctctttaaatggatttggtacccggagcagtgatggtgatttatgcctagttgttaaggaagaaccagtaaatcagaagactgaagcacggcatatactcaccttagtccataaacacttctgtactagactttcgggctacattgagagacctcagctgattcgagcaaaagtgccaattgtgaagttcagggataaagtcagttgtgtggcagtttggcttgatgtaaccattgttggtagaaccttcctccaaacttgtctctgaaaccggtcgccgtgcgggataaaagggacccacaaatgcgcggatacacattttggttgcaaaccctaccccccccaatcagtcgacgtacggttccaaaagccggatatgtacccctttcatccgacatcctctggg

SEQ ID NO: 415186 - DNA, 1367 bp, Homo sapiens
attctcatccggggtcacgtcggtcttccgggtgtctttgacagggttttctacgccgctttttcggcgacttttgctcttccgctttttgccaccgcccccaaccttctatatccttgcagcccctaccttttcttgtgttgctcctcccctggcagccgtgaggggggttagatctcagccggagccggagctgggcctagctgtcccacgggccaccactacctcctttggttcgggagaaagctacgaccaagtacgcccagctcgggccttagaacttctgaacgggcagtgcgggtaggccctgcttagcccttcccggaggacacctgtgagtttagggggtttcggagaggaacgcagcagtgtaggcccaggtcggcggcggggcacgggaaacttttccgaaacggtagcgttttgttttgcgtgggaggttccagcagtatctcttggttattccaaatttatgggcggcatctgggctgctgtacattttgaagaatcttaggaccgcttactttgcttactcgttttctattcctcgcgtactgcctcgtccaccactccaggaccaaaagaggaagatagtcttgggacccttgcatggtgtttcaaagggtggtgaagaactaaggtagaagaatacatgttcacttccagtgaacaagagcatgttcccaaactcaattttgggtcgcccacccttcactccaaatcatcaacaacataataacttctttaccctgtcacctactgtttattcacaccagcagcttatagatgcacaattcaactttcagaatgcagacttgtctagagctgtgtcattacagcagctgacatatggaaatgtcagtccaatacagacctcagcttccccattatttcgaggaaggaagagattaagcgatgaaaaaaaccttcctcttgacggtaaacggcaacgtttccattcaccccaccaagagccaactgtagttaaccagatagtgcctttatcaggtgaacgaagatactcaatgccaccattgtttcatacacattatgtaccagatatagtcagatgtgttccaccttttcgagaaattgcatttttagaacctagagaaatcacactgcctgaggccaaagataagttgagtcagcagatactggagttatttgaaacatgtcagcagcaaataagtgatttaaagaagaaagaactctgtcgaacacagctgcagagagaaattcagctgttatttccacaaagcagactttttttggttgggtcctctttaaatggatttggtacccggagcagtgatggtgatttatgcctagttgttaaggaagaaccagtaagtaaggaaacattt

SEQ ID NO: 415187 - DNA, 1152 bp, Homo sapiens
attatctgagttgcagctcatttttgaatttcttcgttgtccaatgtctttatagctttattgaaaagtagcccttttttataactagcactcagctcacttaatcgtatcttccttatgttatagtttggatcttcttagtaattctataaatagaacttttcctacaaagttttcactactgagatgaaacattggggtagttcaaatacaggagactaacctcaatatatacatgtagttttttctgtctccattattactattttttttaaggtgttgagaggcatttcttgtgctgaacatgaatatttttaagatccatataaagctaataaagtgaccttattgaaagaatcatattgtcattatctcttatgatatttatatatatttaattgctttttatttgttatcagaaagttgtatctttaattactaaggtatattgcttgttttcaggagattaagcgatgaaaaaaaccttcctcttgacggtaaacggcaacgtttccattcaccccaccaagagccaactgtagttaaccagatagtgcctttatcaggtgaacgaagatactcaatgccaccattgtttcatacacattatgtaccagatatagtcagatgtgttccaccttttcgagaaattgcatttttagaacctagagaaatcacactgcctgaggccaaagataaggtaataataatgtagattttagttttgccttttgggaatttagtataaataatgtattaatcaaaaatatttaatatcctggattaagtagaacgtgcctttttttgttgcaatgtttaaagtactattcagcctaattttctgtccaaacattactttgatttttgttagctattcttttatagaaatgcagccatcaggaaatcagattttccctgatatatgaaaattttattagaacccagacactttctgagtttagagaactgtcttgttacttgtttttactgaaaaaaaaaaaagttgtcatatagctattgtaatacagtgttagaacacattttattatgggatatttgtgttataacatgaggttttttgaatgtcaaaaatagagaatccaggagtcactgagaaaaacaatacattcaaagtgatataatcaagaaaga

SEQ ID NO: 415188 - DNA, 327 bp, Homo sapiens
gtattactggagcctccaaccttagaagaatttgataatgtcctcacttgtattctttttcaaagacgttttcttaaattattttagcttagtaaatactattttttaaaaaatgtgcgttggaacactgtgaattctagaaacatttgcagctattcacattatcttttgtctttcagcgggctacattgagagacctcagctgattcgagcaaaagtgccaattgtgaagttcagggataaagtcaggtaaataattaatgagctttctttttttagttcctttagatcatttttagatactcatctgataaagataattaagaa

SEQ ID NO: 415189 - DNA, 740 bp, Homo sapiens
ggattgggcaaacttctttaaaaagccagatagtaaatacttcaggctttgccactcacatattgtttgttgcatatttttatttgtttggtttcataaatcctttaaaaatataaaaaaattcttttctcaggggccatactaataaagtgagcaagtgttaaacagtttgctgacccatggattatttttattacgaagtatctgtgactgtacttttctgtgacttgtatattttactttgtaaaatttatgtgtggtttttcagaccattctcttcctgtacttgagtaatagtagctttgttttgggaaatattaagaagataatacatactcccttttaaaatagtgtcagtataattgatttatgcttctccatatagcaattacttttacattgctgaacaaaacttttacttttttttgcggtggattcaagttgagtcagcagatactggagttatttgaaacatgtcagcagcaaataagtgatttaaagaagaaagaactctgtcgaacacagctgcagagagaaattcagctgttatttccacgtatgtttccctattttgcatgtcctttaggtatatgcattcctattttaaattttatcttttttttttttaataggcacagaaccatgcacctactttagattttaaatactcttattactttcttctgtttctttagaaagcagactttttttggttgggtcctctttaaatggatttggta

SEQ ID NO: 415190 - DNA, 641 bp, Homo sapiens
gttggaggttgctttttgtacatttatgctgaaggggaaaatgacatagatggctatttcagaatttctttgaaaattgtgctttaagcttaaaatcaggaattgatttagaaatgtagatgtgaaagatagcattaaaggttgactttttctgttatttagaaaaataaattgaatatactttgagtatattgaaaaataactccaaaggaaagtatatcttgtatgttttctttttgttgagatactttaggaaaatgaaacattaaacttagaaagataatgaaaaaacactttatttttaacttttcagtgtttttttcaggtaaatcagaagactgaagcacggcatatactcaccttagtccataaacacttctgtactagactttgtaagtctgacatgcctcaagtttgtatgtcacctgacgtaactttacttaaaatgcctcttacattatcttctggtaagaactgtttattctggtcaggatcagtataatatgaattcttttttccaaatgaatttcttttaacttttgatgaaaaagaagagtgatcatttattcaacatatctttattgcacttactgcaaaatataccacctgctgcagtgggggggattcaaagatatgtaagt

SEQ ID NO: 415191 - DNA, 533 bp, Homo sapiens
taggccttagtattgatacaataaaaataatataagagaaattatgaaaatagttaacatggttactgtttttcttcttatagctggaatagtcaaatgatttcagttcgtgaagccaaagccattccaaggcctgatggtattgaatggagaaataaatacatctgtgtagaaggtagttttctgtttaccatctacgtatcatcatggtactaagagaattacttgagtaatttcagctgtgtttcagttaaaagtaatacatttatgtctgaagtgatttgtaagtcttttagtttaaaatttttaattttaaaaagtcatttaaaattttttaggtatgagaaataataaacataaactttaggcattcaccctttctagttggtaagattcgagctgtctttatccctcttacttgtggttgatggataatttcatgacttacagatggaagaaaatagaatctttatatgtgattcttatattgacataaaatgagttatattcttttatacttaaaatattagtgc

SEQ ID NO: 415192 - DNA, 478 bp, Homo sapiens
gtgagaccttatctcaaaaaaagaaaaaatttgaaggaaaaaattattcaaaatttatcacctagagagaaccaactattaacattcttttaaactctcagtcttttgttctgcataaattttaggttttaagaatgatttttctttctctcccagtcatggcacagattgaaaaacaagagagatttgaacagtatactacctgtaagagctgctgtcctgaaaagataactggcctctatttcttaataaattcttccaagaaataaagaacaatagtttcatcataatacattatgtttacctccatcatagttgcttttttcatagttcttgttttcatgttttatttttaaaaagacatataaagattgcatattttattatgacatttcctaataaacccctttgatttaaaaatgtatttttaaaaatgtttacattgatgatgagtaatattgcatgtgttttcaggtga

SEQ ID NO: 415193 - DNA, 6159 bp, Homo sapiens
acgctcctgacaggcctcctcccaggcaccaggacactgggccatgtcttgagaagacccctgcagaaggcagggacagtcccacccgggagccaggggccttgccgtgtgcctgtggccagctcccagacctggaggacgagctctcgcttctagaccccttgccccgctacctaaagtcctgtcaggacctcattgtccccgagcagtgccgctgtgcggacacacggcctgggagcgagcagccccctctgggcggggcggcctccccagaggtgctggctcctgtcagcaaggaggctgctgaccttgctcccactggcccatccccgaggcccggccccgggctcctgctggatgtttgcactaaagacttggcagatgcacctgcggaggagctccaggagaaggggagccccgcggggcctccgccgtctcagggacagcctgccgccaggcccccgaaggaggtccccgccagccggctggctcagcagctccgtgaggagggctggaacctgcagacctccgaaagcctcacgctggccgaagtctacctcatgatgggcaagcccagcaagctgcagctggagtacgactggctggggcccggccgccaggacccccgccccggctccctacccaccgccctccacaagcagcgcctcctcagctgcctcctgaagctcatttccaccgaggtcaaccccaagctggctctggaagcaaacaccatctctacagcctcagtaaggcccgcccaggaggagcagtcgatgacgcccccagggaaggtggtgaccgtcagctctcgcagcccccgctgccctcggaaccaggcctccctccgcagcagcaagaccttcccgcccagctctgcaccctgctcctcaggtttgagaaaccctccaagacccctcttggtgcctggtccctccagcacaggaagcaatgactcagatggaggcctttttgctgtcccgacaaccttgccacccaacagccgacacgggaagctcttctctcccagtaaagaagcagagctgactttccgccagcatctgaactccatcagtatgcagtcggatttcttcctgccaaagccccggaagctgcggaaccggcacctgcggaagccactggtggtccagagaacactgctccctagaccatcggaaaaccagtcccacaacgtttgttccttctccatcctgtctaactcttccgtaactgggagaggttcgttccggcccatccagtcttctctgaccaaagcagctctgtctcggccgatcgtgcccaaggtccttccaccccaggccacgagtcacctggccagtgctatcgacttagcagctacaagtgccggcatcctttccgggaaccccctccctgccttggacaccgagggcttgtctggcatctctccactgtcttcagacgaggtgacgggtgccatctcggggcaggactctactggaactcaccaggatggagacaccctccccaccgtggggggctccgacccatttgtcagcatcccttcgaggcctgagcaggagccagtggcagacagtttccagggctcatctgttctctccttatctgagctgcccaaggcccctctccagaatggcctctccataccgctgtcctcgtcagagagctccagcacccggctgtctccaccagacgtctctgctctgctcgacatctccctgcccggcccacctgaggatgcgctgtcacagggcgagcctgccacacacattagcgactccatcattgagatcgccatcagctccggtcagtacggtgaaggagtccctctttctccagcaaaactgaatggcagtgacagttccaagagccttccctccccgtccagcagcccccagccacactggatcgcctctcccacccacgacccccagtggtaccccagtgactccaccgactcctcgctcagcagcctgtttgcaagcttcatctccccagagaagagccggaagatgttgccgactcccattgggaccaacagtggcacttccttgcttggccccagcttgttggatggaaactcgcgggactcatttgtgtccaggtccctggctgacgttgcagaggttgtggattcccagctggtgtgcatgatgaacgaaaacagcattgattacatttctcggttcaatgacctggcccaagagctgtccatcgctgagcctggccgccgagaagctctgtttgatggtggtggaggcggccccgctgtcagtgacctgtcccagtgaccacacgtcctggtggcggatgaagccctcttcgagctagagaaaaatagataagcccagcagccccagaagatggtctgaacagaggcatctccgcacccaagactgtgcaacgggcaggaacgtggtcacagagctgcttccccacgagcagcaggcaacggcgtccaaggagactaggatgagttcttggcaagggccagcgttagaaatcactgtggtactagagccgttcttcaccacgcctgggcccatgttagggtctgcataatgatcccatttcagcctgtgctctgcctcgattgttgtgttggacattccggtggcatttccttctgagacaagggagtatgtgtgccttggtgtagttgctgtgcactaggagctgtgatctccctctctgcagggaggccccagcccctgctgcttgctttctgccaaacctgtgctatgcatcagctgtgccctctgtggactgtaacgggcaggacagttgggtgtggcctgggctcatgcctggtggtgtcacatcccaaggcagcaagagcatggataccgatcacagggctgctgcggagtcgtggggccctgggctggtgcctcccctccctagaggttttgttcgtactcttaacagggagtgggggcaggaagagtcctgtactatgcaggttgtgtggactttacatgggaccctgctaagctggttgaaaatgtttttcttgtgttttaagaattaggagacatggaagaggaagaacaaagtcccctctgtagttggtttccttcctgtgtccctttgcaagcttccaggcgatctaaggtgtcatttctccctcctggggtgacccttaggcgctaatatgattacagcgaagactttcctgataagttctcaaactcgatgtgtgactgtttggcacttgagacaaacctgcctttgcagggaaagtgtctctcacgggcattggtgtgggcgtgcctgacatacgtgttcagtcccttgcatacctttgccttgagacttctgtgtctccttcccatttgggacacccaggtgagggcccagacatctggatgtggtcagacctcaccaaatatatgccttcgtggtggtctccctccttgcgccctcttgggtggccagcgttcctactgcagacggcccaacatccagtctttccccaggacagagctaacaagggcccctttgccttctcatcctcaggagttccaggcacatgagtcaccgtccatccacatccagtgtggcctggagctgctacagaggtgttgggcaggccatgcctgtgccgccatctctcccttcctgcctcatttcatcccccgcagcagccgggattgattgtgctttcctaacccccttggacctactctccctcctccccaccattcctcttcccccacatgtgtggcacgctgcagccctcaaggccagccctggcccctccactgcttctctccccatccacaatggagaaggtgaaaagaggagggaaaggcctttggtgtggacaagcatgtggacgccctccgtcctgcagtcttgccagcccaccacagccactgtagaccacaggcaggccgtgtactgcaccactgggaggacgtggagaggacagtgaacttccaggcaagagcttccttcttttgtctcacgagtttttcttagagctcttgcctgagctggcttccctccttcagacattgacatgagatcttaagcaaacagtcccaaacctcttaggggtgaaaaaagaaacatgccacttgattaggagagagacagcagtgtttgaactacagcatctttacactagcttgtgttttgtgctacgtataccagcttccaaaattagcatctcattgagccagagaagacaaggagatctccctctgggcatctggctttgctgcgtctctagagggttaggataccaggccgagttcaggccactgctagctttctcatactcccacaggctagaccagagatgccaagtcccaacagcactgagctgtgtgcactgtgccagggacaggagggtttgtgaactgcctgtcagggtacctgttagcccctgacaactcagtggggtgaagttttggaggtcagagtctgctttcgtaggctctttagacagcacctaccacttggttctccagcgtagactcctgggagcagccaactgcagccattgccatccagtggggagatgggttagggaggaggacgggctgactcctctcctgtaataaagctgacaagagttctagaggattctgcttctctagtaactagacaggtgatacgcatttgcttgccacattaagggaaaatggtgtcatttgttgcagaaaaacaatggatacattttcttctggcctaaatgaatatttatgtgcaaacataggcaactgttaaaggctggaattttcaaaagatccaaacagagacttcctgcatcttctgcctttccaacagaagcggtgatcgtctaagtatgagcctgtggcttcctttgtgcatttgagcatgctgtaattaagatgagatcagtttcttagaaaaagctttcctgaatccctctgacgttgcctgggatctttctgttgattcgtcttttctggagattgggacagagcatctgtggtccagggaagttagtcctctggcctcaattctgttgtggatgtgcagtgataagcgggcattgcgtgcctcgggggatgcctagttcgtggcttcctggctgttttgtccttctgtgtcttgtagctgtagggtgccagctcagggagtggggtgttggcggcgtttccgcggttggcctccttgctttgccgcacctccaggttctgggcatgagaggccgtggcctcatttctggtggataacctttttagtttaatagcatctttaattagatcacagcattgaattcaaaatttcttctgcaaagaaagttgtggggcataagacaccgggaatgagggaggaggaagacagttgtgttttctctttaaaccttgagctctagccgatgcatttgtcaggaaatacagcactttgtcttaagaaaacaaggaaggaggccgggcgcagtggctcacgcctgtaatcccagcactttgggaggccgaggcgggcggatcacctgaggtggggagtatgagaccaccctgactaacatggagagaccctgtctctactaaaagtacagaattagccgggcgtggtggcgcatgcccataatcccagctactgaggagacttgaggtaggagaatcacttgaacctcagcggcggaggttgcagtgagtcgagatcgcgccagtgcactccagcctgggcaagaagagcgaaactgggtctcaagttaaaaaaagaaagcaaggaaagagtaatttacaacgaaggaaaaaaacccacagcacacccttcgcggctgtcagcgctctcctgatgtcacagtggctgcgtgtccttggggtgggtgaggtgtggggagcccagcccctggccctgcctcccgcgccccgctccccttctctctcttactcggttaagccatagcgaggcctccgctcgtttcagatatgaatttgttttatagattataaatatgcatatacagtgtatgtataaagcagaatgcctgcctttcctggttattttttgtaccatattgtaaattatattatttattctttaccaattttgggaataaaaggtgttttggttatttaatataataagagctgttaaacttctgtttaaatttccagttcaacttgtaaatgtttttattgtgcataaatacatactaatgttgatctaaaaaaa

SEQ ID NO: 415194 - DNA, 6248 bp, Homo sapiens
acgctcctgacaggcctcctcccaggcaccaggacactgggccatgtcttgagaagacccctgcagaaggcagggacagtcccacccgggagccaggggccttgccgtgtgcctgtggccagctcccagacctggaggacgagctctcgcttctagaccccttgccccgctacctaaagtcctgtcaggacctcattgtccccgagcagtgccgctgtgcggacacacggcctgggagcgagcagccccctctgggcggggcggcctccccagaggtgctggctcctgtcagcaaggaggctgctgaccttgctcccactggcccatccccgaggcccggccccgggctcctgctggatgtttgcactaaagacttggcagatgcacctgcggaggagctccaggagaaggggagccccgcggggcctccgccgtctcagggacagcctgccgccaggcccccgaaggaggtccccgccagccggctggctcagcagctccgtgaggagggctggaacctgcagacctccgaaagcctcacgctggccgaagtctacctcatgatgggcaagcccagcaagctgcagctggagtacgactggctggggcccggccgccaggacccccgccccggctccctacccaccgccctccacaagcagcgcctcctcagctgcctcctgaagctcatttccaccgaggtcaaccccaagctggctctggaagcaaacaccatctctacagcctcagtaaggcccgcccaggaggagcagtcgatgacgcccccagggaaggtggtgaccgtcagctctcgcagcccccgctgccctcggaaccaggcctccctccgcagcagcaagaccttcccgcccagctctgcaccctgctcctcaggtttgagaaaccctccaagacccctcttggtgcctggtccctccagcacaggaagcaatgactcagatggaggcctttttgctgtcccgacaaccttgccacccaacagccgacacgggaagctcttctctcccagtaaagaagcagagctgactttccgccagcatctgaactccatcagtgtgagtgtgtggggccgggccgcccgcgtgcgagcgtccccgtggtctggagagtgcaccttcaggtgccggacgctgctcccttacagatgcagtcggatttcttcctgccaaagccccggaagctgcggaaccggcacctgcggaagccactggtggtccagagaacactgctccctagaccatcggaaaaccagtcccacaacgtttgttccttctccatcctgtctaactcttccgtaactgggagaggttcgttccggcccatccagtcttctctgaccaaagcagctctgtctcggccgatcgtgcccaaggtccttccaccccaggccacgagtcacctggccagtgctatcgacttagcagctacaagtgccggcatcctttccgggaaccccctccctgccttggacaccgagggcttgtctggcatctctccactgtcttcagacgaggtgacgggtgccatctcggggcaggactctactggaactcaccaggatggagacaccctccccaccgtggggggctccgacccatttgtcagcatcccttcgaggcctgagcaggagccagtggcagacagtttccagggctcatctgttctctccttatctgagctgcccaaggcccctctccagaatggcctctccataccgctgtcctcgtcagagagctccagcacccggctgtctccaccagacgtctctgctctgctcgacatctccctgcccggcccacctgaggatgcgctgtcacagggcgagcctgccacacacattagcgactccatcattgagatcgccatcagctccggtcagtacggtgaaggagtccctctttctccagcaaaactgaatggcagtgacagttccaagagccttccctccccgtccagcagcccccagccacactggatcgcctctcccacccacgacccccagtggtaccccagtgactccaccgactcctcgctcagcagcctgtttgcaagcttcatctccccagagaagagccggaagatgttgccgactcccattgggaccaacagtggcacttccttgcttggccccagcttgttggatggaaactcgcgggactcatttgtgtccaggtccctggctgacgttgcagaggttgtggattcccagctggtgtgcatgatgaacgaaaacagcattgattacatttctcggttcaatgacctggcccaagagctgtccatcgctgagcctggccgccgagaagctctgtttgatggtggtggaggcggccccgctgtcagtgacctgtcccagtgaccacacgtcctggtggcggatgaagccctcttcgagctagagaaaaatagataagcccagcagccccagaagatggtctgaacagaggcatctccgcacccaagactgtgcaacgggcaggaacgtggtcacagagctgcttccccacgagcagcaggcaacggcgtccaaggagactaggatgagttcttggcaagggccagcgttagaaatcactgtggtactagagccgttcttcaccacgcctgggcccatgttagggtctgcataatgatcccatttcagcctgtgctctgcctcgattgttgtgttggacattccggtggcatttccttctgagacaagggagtatgtgtgccttggtgtagttgctgtgcactaggagctgtgatctccctctctgcagggaggccccagcccctgctgcttgctttctgccaaacctgtgctatgcatcagctgtgccctctgtggactgtaacgggcaggacagttgggtgtggcctgggctcatgcctggtggtgtcacatcccaaggcagcaagagcatggataccgatcacagggctgctgcggagtcgtggggccctgggctggtgcctcccctccctagaggttttgttcgtactcttaacagggagtgggggcaggaagagtcctgtactatgcaggttgtgtggactttacatgggaccctgctaagctggttgaaaatgtttttcttgtgttttaagaattaggagacatggaagaggaagaacaaagtcccctctgtagttggtttccttcctgtgtccctttgcaagcttccaggcgatctaaggtgtcatttctccctcctggggtgacccttaggcgctaatatgattacagcgaagactttcctgataagttctcaaactcgatgtgtgactgtttggcacttgagacaaacctgcctttgcagggaaagtgtctctcacgggcattggtgtgggcgtgcctgacatacgtgttcagtcccttgcatacctttgccttgagacttctgtgtctccttcccatttgggacacccaggtgagggcccagacatctggatgtggtcagacctcaccaaatatatgccttcgtggtggtctccctccttgcgccctcttgggtggccagcgttcctactgcagacggcccaacatccagtctttccccaggacagagctaacaagggcccctttgccttctcatcctcaggagttccaggcacatgagtcaccgtccatccacatccagtgtggcctggagctgctacagaggtgttgggcaggccatgcctgtgccgccatctctcccttcctgcctcatttcatcccccgcagcagccgggattgattgtgctttcctaacccccttggacctactctccctcctccccaccattcctcttcccccacatgtgtggcacgctgcagccctcaaggccagccctggcccctccactgcttctctccccatccacaatggagaaggtgaaaagaggagggaaaggcctttggtgtggacaagcatgtggacgccctccgtcctgcagtcttgccagcccaccacagccactgtagaccacaggcaggccgtgtactgcaccactgggaggacgtggagaggacagtgaacttccaggcaagagcttccttcttttgtctcacgagtttttcttagagctcttgcctgagctggcttccctccttcagacattgacatgagatcttaagcaaacagtcccaaacctcttaggggtgaaaaaagaaacatgccacttgattaggagagagacagcagtgtttgaactacagcatctttacactagcttgtgttttgtgctacgtataccagcttccaaaattagcatctcattgagccagagaagacaaggagatctccctctgggcatctggctttgctgcgtctctagagggttaggataccaggccgagttcaggccactgctagctttctcatactcccacaggctagaccagagatgccaagtcccaacagcactgagctgtgtgcactgtgccagggacaggagggtttgtgaactgcctgtcagggtacctgttagcccctgacaactcagtggggtgaagttttggaggtcagagtctgctttcgtaggctctttagacagcacctaccacttggttctccagcgtagactcctgggagcagccaactgcagccattgccatccagtggggagatgggttagggaggaggacgggctgactcctctcctgtaataaagctgacaagagttctagaggattctgcttctctagtaactagacaggtgatacgcatttgcttgccacattaagggaaaatggtgtcatttgttgcagaaaaacaatggatacattttcttctggcctaaatgaatatttatgtgcaaacataggcaactgttaaaggctggaattttcaaaagatccaaacagagacttcctgcatcttctgcctttccaacagaagcggtgatcgtctaagtatgagcctgtggcttcctttgtgcatttgagcatgctgtaattaagatgagatcagtttcttagaaaaagctttcctgaatccctctgacgttgcctgggatctttctgttgattcgtcttttctggagattgggacagagcatctgtggtccagggaagttagtcctctggcctcaattctgttgtggatgtgcagtgataagcgggcattgcgtgcctcgggggatgcctagttcgtggcttcctggctgttttgtccttctgtgtcttgtagctgtagggtgccagctcagggagtggggtgttggcggcgtttccgcggttggcctccttgctttgccgcacctccaggttctgggcatgagaggccgtggcctcatttctggtggataacctttttagtttaatagcatctttaattagatcacagcattgaattcaaaatttcttctgcaaagaaagttgtggggcataagacaccgggaatgagggaggaggaagacagttgtgttttctctttaaaccttgagctctagccgatgcatttgtcaggaaatacagcactttgtcttaagaaaacaaggaaggaggccgggcgcagtggctcacgcctgtaatcccagcactttgggaggccgaggcgggcggatcacctgaggtggggagtatgagaccaccctgactaacatggagagaccctgtctctactaaaagtacagaattagccgggcgtggtggcgcatgcccataatcccagctactgaggagacttgaggtaggagaatcacttgaacctcagcggcggaggttgcagtgagtcgagatcgcgccagtgcactccagcctgggcaagaagagcgaaactgggtctcaagttaaaaaaagaaagcaaggaaagagtaatttacaacgaaggaaaaaaacccacagcacacccttcgcggctgtcagcgctctcctgatgtcacagtggctgcgtgtccttggggtgggtgaggtgtggggagcccagcccctggccctgcctcccgcgccccgctccccttctctctcttactcggttaagccatagcgaggcctccgctcgtttcagatatgaatttgttttatagattataaatatgcatatacagtgtatgtataaagcagaatgcctgcctttcctggttattttttgtaccatattgtaaattatattatttattctttaccaattttgggaataaaaggtgttttggttatttaatataataagagctgttaaacttctgtttaaatttccagttcaacttgtaaatgtttttattgtgcataaatacatactaatgttgatctaaaaaaa

SEQ ID NO: 415195 - DNA, 6143 bp, Homo sapiens
acgctcctgacaggcctcctcccaggcaccaggacactgggccatgtcttgagaagacccctgcagaaggcagggacagtcccacccgggagccaggggccttgccgtgtgcctgtggccagctcccagacctggaggacgagctctcgcttctagaccccttgccccgctacctaaagtcctgtcaggacctcattgtccccgagcagtgccgctgtgcggacacacggcctgggagcgagcagccccctctgggcggggcggcctccccagaggtgctggctcctgtcagcaaggaggctgctgaccttgctcccactggcccatccccgaggcccggccccgggctcctgctggatgtttgcactaaagacttggcagatgcacctgcggaggagctccaggagaaggggagccccgcggggcctccgccgtctcagggacagcctgccgccaggcccccgaaggaggtccccgccagccggctggctcagcagctccgtgaggagggctggaacctgcagacctccgaaagcctcacgctggccgaagtctacctcatgatgggcaagcccagcaagctgcagctggagtacgactggctggggcccggccgccaggacccccgccccggctccctacccaccgccctccacaagcagcgcctcctcagctgcctcctgaagctcatttccaccgaggtcaaccccaagctggctctggaagcaaacaccatctctacagcctcagtaaggcccgcccaggaggagcagtcgatgacgcccccagggaaggtggtgaccgtcagctctcgcagcccccgctgccctcggaaccaggcctccctccgcagcagcaagaccttcccgcccagctctgcaccctgctcctcaggtttgagaaaccctccaagacccctcttggtgcctggtccctccagcacaggaagcaatgactcagatggaggcctttttgctgtcccgacaaccttgccacccaacagccgacacgggaagctcttctctcccagtaaagaagcagagctgactttccgccagcatctgaactccatcagtgtgagtgtgtggggccgggccgcccgcgtgcgagcgtccccgtggtctggagagtgcaccttcaggtgccggacgctgctcccttacagatgcagtcggatttcttcctgccaaagccccggaagctgcggaaccggcacctgcggaagccactggtggtccagagaacactgctccctagaccatcggaaaaccagtcccacaacgtttgttccttctccatcctgtctaactcttccgtaactggtgctatcgacttagcagctacaagtgccggcatcctttccgggaaccccctccctgccttggacaccgagggcttgtctggcatctctccactgtcttcagacgaggtgacgggtgccatctcggggcaggactctactggaactcaccaggatggagacaccctccccaccgtggggggctccgacccatttgtcagcatcccttcgaggcctgagcaggagccagtggcagacagtttccagggctcatctgttctctccttatctgagctgcccaaggcccctctccagaatggcctctccataccgctgtcctcgtcagagagctccagcacccggctgtctccaccagacgtctctgctctgctcgacatctccctgcccggcccacctgaggatgcgctgtcacagggcgagcctgccacacacattagcgactccatcattgagatcgccatcagctccggtcagtacggtgaaggagtccctctttctccagcaaaactgaatggcagtgacagttccaagagccttccctccccgtccagcagcccccagccacactggatcgcctctcccacccacgacccccagtggtaccccagtgactccaccgactcctcgctcagcagcctgtttgcaagcttcatctccccagagaagagccggaagatgttgccgactcccattgggaccaacagtggcacttccttgcttggccccagcttgttggatggaaactcgcgggactcatttgtgtccaggtccctggctgacgttgcagaggttgtggattcccagctggtgtgcatgatgaacgaaaacagcattgattacatttctcggttcaatgacctggcccaagagctgtccatcgctgagcctggccgccgagaagctctgtttgatggtggtggaggcggccccgctgtcagtgacctgtcccagtgaccacacgtcctggtggcggatgaagccctcttcgagctagagaaaaatagataagcccagcagccccagaagatggtctgaacagaggcatctccgcacccaagactgtgcaacgggcaggaacgtggtcacagagctgcttccccacgagcagcaggcaacggcgtccaaggagactaggatgagttcttggcaagggccagcgttagaaatcactgtggtactagagccgttcttcaccacgcctgggcccatgttagggtctgcataatgatcccatttcagcctgtgctctgcctcgattgttgtgttggacattccggtggcatttccttctgagacaagggagtatgtgtgccttggtgtagttgctgtgcactaggagctgtgatctccctctctgcagggaggccccagcccctgctgcttgctttctgccaaacctgtgctatgcatcagctgtgccctctgtggactgtaacgggcaggacagttgggtgtggcctgggctcatgcctggtggtgtcacatcccaaggcagcaagagcatggataccgatcacagggctgctgcggagtcgtggggccctgggctggtgcctcccctccctagaggttttgttcgtactcttaacagggagtgggggcaggaagagtcctgtactatgcaggttgtgtggactttacatgggaccctgctaagctggttgaaaatgtttttcttgtgttttaagaattaggagacatggaagaggaagaacaaagtcccctctgtagttggtttccttcctgtgtccctttgcaagcttccaggcgatctaaggtgtcatttctccctcctggggtgacccttaggcgctaatatgattacagcgaagactttcctgataagttctcaaactcgatgtgtgactgtttggcacttgagacaaacctgcctttgcagggaaagtgtctctcacgggcattggtgtgggcgtgcctgacatacgtgttcagtcccttgcatacctttgccttgagacttctgtgtctccttcccatttgggacacccaggtgagggcccagacatctggatgtggtcagacctcaccaaatatatgccttcgtggtggtctccctccttgcgccctcttgggtggccagcgttcctactgcagacggcccaacatccagtctttccccaggacagagctaacaagggcccctttgccttctcatcctcaggagttccaggcacatgagtcaccgtccatccacatccagtgtggcctggagctgctacagaggtgttgggcaggccatgcctgtgccgccatctctcccttcctgcctcatttcatcccccgcagcagccgggattgattgtgctttcctaacccccttggacctactctccctcctccccaccattcctcttcccccacatgtgtggcacgctgcagccctcaaggccagccctggcccctccactgcttctctccccatccacaatggagaaggtgaaaagaggagggaaaggcctttggtgtggacaagcatgtggacgccctccgtcctgcagtcttgccagcccaccacagccactgtagaccacaggcaggccgtgtactgcaccactgggaggacgtggagaggacagtgaacttccaggcaagagcttccttcttttgtctcacgagtttttcttagagctcttgcctgagctggcttccctccttcagacattgacatgagatcttaagcaaacagtcccaaacctcttaggggtgaaaaaagaaacatgccacttgattaggagagagacagcagtgtttgaactacagcatctttacactagcttgtgttttgtgctacgtataccagcttccaaaattagcatctcattgagccagagaagacaaggagatctccctctgggcatctggctttgctgcgtctctagagggttaggataccaggccgagttcaggccactgctagctttctcatactcccacaggctagaccagagatgccaagtcccaacagcactgagctgtgtgcactgtgccagggacaggagggtttgtgaactgcctgtcagggtacctgttagcccctgacaactcagtggggtgaagttttggaggtcagagtctgctttcgtaggctctttagacagcacctaccacttggttctccagcgtagactcctgggagcagccaactgcagccattgccatccagtggggagatgggttagggaggaggacgggctgactcctctcctgtaataaagctgacaagagttctagaggattctgcttctctagtaactagacaggtgatacgcatttgcttgccacattaagggaaaatggtgtcatttgttgcagaaaaacaatggatacattttcttctggcctaaatgaatatttatgtgcaaacataggcaactgttaaaggctggaattttcaaaagatccaaacagagacttcctgcatcttctgcctttccaacagaagcggtgatcgtctaagtatgagcctgtggcttcctttgtgcatttgagcatgctgtaattaagatgagatcagtttcttagaaaaagctttcctgaatccctctgacgttgcctgggatctttctgttgattcgtcttttctggagattgggacagagcatctgtggtccagggaagttagtcctctggcctcaattctgttgtggatgtgcagtgataagcgggcattgcgtgcctcgggggatgcctagttcgtggcttcctggctgttttgtccttctgtgtcttgtagctgtagggtgccagctcagggagtggggtgttggcggcgtttccgcggttggcctccttgctttgccgcacctccaggttctgggcatgagaggccgtggcctcatttctggtggataacctttttagtttaatagcatctttaattagatcacagcattgaattcaaaatttcttctgcaaagaaagttgtggggcataagacaccgggaatgagggaggaggaagacagttgtgttttctctttaaaccttgagctctagccgatgcatttgtcaggaaatacagcactttgtcttaagaaaacaaggaaggaggccgggcgcagtggctcacgcctgtaatcccagcactttgggaggccgaggcgggcggatcacctgaggtggggagtatgagaccaccctgactaacatggagagaccctgtctctactaaaagtacagaattagccgggcgtggtggcgcatgcccataatcccagctactgaggagacttgaggtaggagaatcacttgaacctcagcggcggaggttgcagtgagtcgagatcgcgccagtgcactccagcctgggcaagaagagcgaaactgggtctcaagttaaaaaaagaaagcaaggaaagagtaatttacaacgaaggaaaaaaacccacagcacacccttcgcggctgtcagcgctctcctgatgtcacagtggctgcgtgtccttggggtgggtgaggtgtggggagcccagcccctggccctgcctcccgcgccccgctccccttctctctcttactcggttaagccatagcgaggcctccgctcgtttcagatatgaatttgttttatagattataaatatgcatatacagtgtatgtataaagcagaatgcctgcctttcctggttattttttgtaccatattgtaaattatattatttattctttaccaattttgggaataaaaggtgttttggttatttaatataataagagctgttaaacttctgtttaaatttccagttcaacttgtaaatgtttttattgtgcataaatacatactaatgttgatctaaaaaaa

SEQ ID NO: 415196 - DNA, 6084 bp, Homo sapiens
acgctcctgacaggcctcctcccaggcaccaggacactgggccatgtcttgagaagacccctgcagaaggcagggacagtcccacccgggagccaggggccttgccgtgtgcctgtggccagctcccagacctggaggacgagctctcgcttctagaccccttgccccgctacctaaagtcctgtcaggacctcattgtccccgagcagtgccgctgtgcggacacacggcctgggagcgagcagccccctctgggcggggcggcctccccagaggtgctggctcctgtcagcaaggaggctgctgaccttgctcccactggcccatccccgaggcccggccccgggctcctgctggatgtttgcactaaagacttggcagatgcacctgcggaggagctccaggagaaggggagccccgcggggcctccgccgtctcagggacagcctgccgccaggcccccgaaggaggtccccgccagccggctggctcagcagctccgtgaggagggctggaacctgcagacctccgaaagcctcacgctggccgaagtctacctcatgatgggcaagcccagcaagctgcagctggagtacgactggctggggcccggccgccaggacccccgccccggctccctacccaccgccctccacaagcagcgcctcctcagctgcctcctgaagctcatttccaccgaggtcaaccccaagctggctctggaagcaaacaccatctctacagcctcagtaaggcccgcccaggaggagcagtcgatgacgcccccagggaaggtggtgaccgtcagctctcgcagcccccgctgccctcggaaccaggcctccctccgcagcagcaagaccttcccgcccagctctgcaccctgctcctcaggtttgagaaaccctccaagacccctcttggtgcctggtccctccagcacaggaagcaatgactcagatggaggcctttttgctgtcccgacaaccttgccacccaacagccgacacgggaagctcttctctcccagtaaagaagcagagctgactttccgccagcatctgaactccatcagtagaacactgctccctagaccatcggaaaaccagtcccacaacgtttgttccttctccatcctgtctaactcttccgtaactgggagaggttcgttccggcccatccagtcttctctgaccaaagcagctctgtctcggccgatcgtgcccaaggtccttccaccccaggccacgagtcacctggccagtgctatcgacttagcagctacaagtgccggcatcctttccgggaaccccctccctgccttggacaccgagggcttgtctggcatctctccactgtcttcagacgaggtgacgggtgccatctcggggcaggactctactggaactcaccaggatggagacaccctccccaccgtggggggctccgacccatttgtcagcatcccttcgaggcctgagcaggagccagtggcagacagtttccagggctcatctgttctctccttatctgagctgcccaaggcccctctccagaatggcctctccataccgctgtcctcgtcagagagctccagcacccggctgtctccaccagacgtctctgctctgctcgacatctccctgcccggcccacctgaggatgcgctgtcacagggcgagcctgccacacacattagcgactccatcattgagatcgccatcagctccggtcagtacggtgaaggagtccctctttctccagcaaaactgaatggcagtgacagttccaagagccttccctccccgtccagcagcccccagccacactggatcgcctctcccacccacgacccccagtggtaccccagtgactccaccgactcctcgctcagcagcctgtttgcaagcttcatctccccagagaagagccggaagatgttgccgactcccattgggaccaacagtggcacttccttgcttggccccagcttgttggatggaaactcgcgggactcatttgtgtccaggtccctggctgacgttgcagaggttgtggattcccagctggtgtgcatgatgaacgaaaacagcattgattacatttctcggttcaatgacctggcccaagagctgtccatcgctgagcctggccgccgagaagctctgtttgatggtggtggaggcggccccgctgtcagtgacctgtcccagtgaccacacgtcctggtggcggatgaagccctcttcgagctagagaaaaatagataagcccagcagccccagaagatggtctgaacagaggcatctccgcacccaagactgtgcaacgggcaggaacgtggtcacagagctgcttccccacgagcagcaggcaacggcgtccaaggagactaggatgagttcttggcaagggccagcgttagaaatcactgtggtactagagccgttcttcaccacgcctgggcccatgttagggtctgcataatgatcccatttcagcctgtgctctgcctcgattgttgtgttggacattccggtggcatttccttctgagacaagggagtatgtgtgccttggtgtagttgctgtgcactaggagctgtgatctccctctctgcagggaggccccagcccctgctgcttgctttctgccaaacctgtgctatgcatcagctgtgccctctgtggactgtaacgggcaggacagttgggtgtggcctgggctcatgcctggtggtgtcacatcccaaggcagcaagagcatggataccgatcacagggctgctgcggagtcgtggggccctgggctggtgcctcccctccctagaggttttgttcgtactcttaacagggagtgggggcaggaagagtcctgtactatgcaggttgtgtggactttacatgggaccctgctaagctggttgaaaatgtttttcttgtgttttaagaattaggagacatggaagaggaagaacaaagtcccctctgtagttggtttccttcctgtgtccctttgcaagcttccaggcgatctaaggtgtcatttctccctcctggggtgacccttaggcgctaatatgattacagcgaagactttcctgataagttctcaaactcgatgtgtgactgtttggcacttgagacaaacctgcctttgcagggaaagtgtctctcacgggcattggtgtgggcgtgcctgacatacgtgttcagtcccttgcatacctttgccttgagacttctgtgtctccttcccatttgggacacccaggtgagggcccagacatctggatgtggtcagacctcaccaaatatatgccttcgtggtggtctccctccttgcgccctcttgggtggccagcgttcctactgcagacggcccaacatccagtctttccccaggacagagctaacaagggcccctttgccttctcatcctcaggagttccaggcacatgagtcaccgtccatccacatccagtgtggcctggagctgctacagaggtgttgggcaggccatgcctgtgccgccatctctcccttcctgcctcatttcatcccccgcagcagccgggattgattgtgctttcctaacccccttggacctactctccctcctccccaccattcctcttcccccacatgtgtggcacgctgcagccctcaaggccagccctggcccctccactgcttctctccccatccacaatggagaaggtgaaaagaggagggaaaggcctttggtgtggacaagcatgtggacgccctccgtcctgcagtcttgccagcccaccacagccactgtagaccacaggcaggccgtgtactgcaccactgggaggacgtggagaggacagtgaacttccaggcaagagcttccttcttttgtctcacgagtttttcttagagctcttgcctgagctggcttccctccttcagacattgacatgagatcttaagcaaacagtcccaaacctcttaggggtgaaaaaagaaacatgccacttgattaggagagagacagcagtgtttgaactacagcatctttacactagcttgtgttttgtgctacgtataccagcttccaaaattagcatctcattgagccagagaagacaaggagatctccctctgggcatctggctttgctgcgtctctagagggttaggataccaggccgagttcaggccactgctagctttctcatactcccacaggctagaccagagatgccaagtcccaacagcactgagctgtgtgcactgtgccagggacaggagggtttgtgaactgcctgtcagggtacctgttagcccctgacaactcagtggggtgaagttttggaggtcagagtctgctttcgtaggctctttagacagcacctaccacttggttctccagcgtagactcctgggagcagccaactgcagccattgccatccagtggggagatgggttagggaggaggacgggctgactcctctcctgtaataaagctgacaagagttctagaggattctgcttctctagtaactagacaggtgatacgcatttgcttgccacattaagggaaaatggtgtcatttgttgcagaaaaacaatggatacattttcttctggcctaaatgaatatttatgtgcaaacataggcaactgttaaaggctggaattttcaaaagatccaaacagagacttcctgcatcttctgcctttccaacagaagcggtgatcgtctaagtatgagcctgtggcttcctttgtgcatttgagcatgctgtaattaagatgagatcagtttcttagaaaaagctttcctgaatccctctgacgttgcctgggatctttctgttgattcgtcttttctggagattgggacagagcatctgtggtccagggaagttagtcctctggcctcaattctgttgtggatgtgcagtgataagcgggcattgcgtgcctcgggggatgcctagttcgtggcttcctggctgttttgtccttctgtgtcttgtagctgtagggtgccagctcagggagtggggtgttggcggcgtttccgcggttggcctccttgctttgccgcacctccaggttctgggcatgagaggccgtggcctcatttctggtggataacctttttagtttaatagcatctttaattagatcacagcattgaattcaaaatttcttctgcaaagaaagttgtggggcataagacaccgggaatgagggaggaggaagacagttgtgttttctctttaaaccttgagctctagccgatgcatttgtcaggaaatacagcactttgtcttaagaaaacaaggaaggaggccgggcgcagtggctcacgcctgtaatcccagcactttgggaggccgaggcgggcggatcacctgaggtggggagtatgagaccaccctgactaacatggagagaccctgtctctactaaaagtacagaattagccgggcgtggtggcgcatgcccataatcccagctactgaggagacttgaggtaggagaatcacttgaacctcagcggcggaggttgcagtgagtcgagatcgcgccagtgcactccagcctgggcaagaagagcgaaactgggtctcaagttaaaaaaagaaagcaaggaaagagtaatttacaacgaaggaaaaaaacccacagcacacccttcgcggctgtcagcgctctcctgatgtcacagtggctgcgtgtccttggggtgggtgaggtgtggggagcccagcccctggccctgcctcccgcgccccgctccccttctctctcttactcggttaagccatagcgaggcctccgctcgtttcagatatgaatttgttttatagattataaatatgcatatacagtgtatgtataaagcagaatgcctgcctttcctggttattttttgtaccatattgtaaattatattatttattctttaccaattttgggaataaaaggtgttttggttatttaatataataagagctgttaaacttctgtttaaatttccagttcaacttgtaaatgtttttattgtgcataaatacatactaatgttgatctaaaaaaa

SEQ ID NO: 415197 - DNA, 5988 bp, Homo sapiens
acgctcctgacaggcctcctcccaggcaccaggacactgggccatgtcttgagaagacccctgcagaaggcagggacagtcccacccgggagccaggggccttgccgtgtgcctgtggccagctcccagacctggaggacgagctctcgcttctagaccccttgccccgctacctaaagtcctgtcaggacctcattgtccccgagcagtgccgctgtgcggacacacggcctgggagcgagcagccccctctgggcggggcggcctccccagaggtgctggctcctgtcagcaaggaggctgctgaccttgctcccactggcccatccccgaggcccggccccgggctcctgctggatgtttgcactaaagacttggcagatgcacctgcggaggagctccaggagaaggggagccccgcggggcctccgccgtctcagggacagcctgccgccaggcccccgaaggaggtccccgccagccggctggctcagcagctccgtgaggagggctggaacctgcagacctccgaaagcctcacgctggccgaagtctacctcatgatgggcaagcccagcaagctgcagctggagtacgactggctggggcccggccgccaggacccccgccccggctccctacccaccgccctccacaagcagcgcctcctcagctgcctcctgaagctcatttccaccgaggtcaaccccaagctggctctggaagcaaacaccatctctacagcctcagtaaggcccgcccaggaggagcagtcgatgacgcccccagggaaggtggtgaccgtcagctctcgcagcccccgctgccctcggaaccaggcctccctccgcagcagcaagaccttcccgcccagctctgcaccctgctcctcaggtttgagaaaccctccaagacccctcttggtgcctggtccctccagcacaggaagcaatgactcagatggaggcctttttgctgtcccgacaaccttgccacccaacagccgacacgggaagctcttctctcccagtaaagaagcagagctgactttccgccagcatctgaactccatcagtatgcagtcggatttcttcctgccaaagccccggaagctgcggaaccggcacctgcggaagccactggtggtccagagaacactgctccctagaccatcggaaaaccagtcccacaacgtttgttccttctccatcctgtctaactcttccgtaactggtgctatcgacttagcagctacaagtgccggcatcctttccgggaaccccctccctgccttggacaccgagggcttgtctggcatctctccactgtcttcagacgaggtgacgggtgccatctcggggcaggactctactggaactcaccaggatggagacaccctccccaccgtggggggctcatctgttctctccttatctgagctgcccaaggcccctctccagaatggcctctccataccgctgtcctcgtcagagagctccagcacccggctgtctccaccagacgtctctgctctgctcgacatctccctgcccggcccacctgaggatgcgctgtcacagggcgagcctgccacacacattagcgactccatcattgagatcgccatcagctccggtcagtacggtgaaggagtccctctttctccagcaaaactgaatggcagtgacagttccaagagccttccctccccgtccagcagcccccagccacactggatcgcctctcccacccacgacccccagtggtaccccagtgactccaccgactcctcgctcagcagcctgtttgcaagcttcatctccccagagaagagccggaagatgttgccgactcccattgggaccaacagtggcacttccttgcttggccccagcttgttggatggaaactcgcgggactcatttgtgtccaggtccctggctgacgttgcagaggttgtggattcccagctggtgtgcatgatgaacgaaaacagcattgattacatttctcggttcaatgacctggcccaagagctgtccatcgctgagcctggccgccgagaagctctgtttgatggtggtggaggcggccccgctgtcagtgacctgtcccagtgaccacacgtcctggtggcggatgaagccctcttcgagctagagaaaaatagataagcccagcagccccagaagatggtctgaacagaggcatctccgcacccaagactgtgcaacgggcaggaacgtggtcacagagctgcttccccacgagcagcaggcaacggcgtccaaggagactaggatgagttcttggcaagggccagcgttagaaatcactgtggtactagagccgttcttcaccacgcctgggcccatgttagggtctgcataatgatcccatttcagcctgtgctctgcctcgattgttgtgttggacattccggtggcatttccttctgagacaagggagtatgtgtgccttggtgtagttgctgtgcactaggagctgtgatctccctctctgcagggaggccccagcccctgctgcttgctttctgccaaacctgtgctatgcatcagctgtgccctctgtggactgtaacgggcaggacagttgggtgtggcctgggctcatgcctggtggtgtcacatcccaaggcagcaagagcatggataccgatcacagggctgctgcggagtcgtggggccctgggctggtgcctcccctccctagaggttttgttcgtactcttaacagggagtgggggcaggaagagtcctgtactatgcaggttgtgtggactttacatgggaccctgctaagctggttgaaaatgtttttcttgtgttttaagaattaggagacatggaagaggaagaacaaagtcccctctgtagttggtttccttcctgtgtccctttgcaagcttccaggcgatctaaggtgtcatttctccctcctggggtgacccttaggcgctaatatgattacagcgaagactttcctgataagttctcaaactcgatgtgtgactgtttggcacttgagacaaacctgcctttgcagggaaagtgtctctcacgggcattggtgtgggcgtgcctgacatacgtgttcagtcccttgcatacctttgccttgagacttctgtgtctccttcccatttgggacacccaggtgagggcccagacatctggatgtggtcagacctcaccaaatatatgccttcgtggtggtctccctccttgcgccctcttgggtggccagcgttcctactgcagacggcccaacatccagtctttccccaggacagagctaacaagggcccctttgccttctcatcctcaggagttccaggcacatgagtcaccgtccatccacatccagtgtggcctggagctgctacagaggtgttgggcaggccatgcctgtgccgccatctctcccttcctgcctcatttcatcccccgcagcagccgggattgattgtgctttcctaacccccttggacctactctccctcctccccaccattcctcttcccccacatgtgtggcacgctgcagccctcaaggccagccctggcccctccactgcttctctccccatccacaatggagaaggtgaaaagaggagggaaaggcctttggtgtggacaagcatgtggacgccctccgtcctgcagtcttgccagcccaccacagccactgtagaccacaggcaggccgtgtactgcaccactgggaggacgtggagaggacagtgaacttccaggcaagagcttccttcttttgtctcacgagtttttcttagagctcttgcctgagctggcttccctccttcagacattgacatgagatcttaagcaaacagtcccaaacctcttaggggtgaaaaaagaaacatgccacttgattaggagagagacagcagtgtttgaactacagcatctttacactagcttgtgttttgtgctacgtataccagcttccaaaattagcatctcattgagccagagaagacaaggagatctccctctgggcatctggctttgctgcgtctctagagggttaggataccaggccgagttcaggccactgctagctttctcatactcccacaggctagaccagagatgccaagtcccaacagcactgagctgtgtgcactgtgccagggacaggagggtttgtgaactgcctgtcagggtacctgttagcccctgacaactcagtggggtgaagttttggaggtcagagtctgctttcgtaggctctttagacagcacctaccacttggttctccagcgtagactcctgggagcagccaactgcagccattgccatccagtggggagatgggttagggaggaggacgggctgactcctctcctgtaataaagctgacaagagttctagaggattctgcttctctagtaactagacaggtgatacgcatttgcttgccacattaagggaaaatggtgtcatttgttgcagaaaaacaatggatacattttcttctggcctaaatgaatatttatgtgcaaacataggcaactgttaaaggctggaattttcaaaagatccaaacagagacttcctgcatcttctgcctttccaacagaagcggtgatcgtctaagtatgagcctgtggcttcctttgtgcatttgagcatgctgtaattaagatgagatcagtttcttagaaaaagctttcctgaatccctctgacgttgcctgggatctttctgttgattcgtcttttctggagattgggacagagcatctgtggtccagggaagttagtcctctggcctcaattctgttgtggatgtgcagtgataagcgggcattgcgtgcctcgggggatgcctagttcgtggcttcctggctgttttgtccttctgtgtcttgtagctgtagggtgccagctcagggagtggggtgttggcggcgtttccgcggttggcctccttgctttgccgcacctccaggttctgggcatgagaggccgtggcctcatttctggtggataacctttttagtttaatagcatctttaattagatcacagcattgaattcaaaatttcttctgcaaagaaagttgtggggcataagacaccgggaatgagggaggaggaagacagttgtgttttctctttaaaccttgagctctagccgatgcatttgtcaggaaatacagcactttgtcttaagaaaacaaggaaggaggccgggcgcagtggctcacgcctgtaatcccagcactttgggaggccgaggcgggcggatcacctgaggtggggagtatgagaccaccctgactaacatggagagaccctgtctctactaaaagtacagaattagccgggcgtggtggcgcatgcccataatcccagctactgaggagacttgaggtaggagaatcacttgaacctcagcggcggaggttgcagtgagtcgagatcgcgccagtgcactccagcctgggcaagaagagcgaaactgggtctcaagttaaaaaaagaaagcaaggaaagagtaatttacaacgaaggaaaaaaacccacagcacacccttcgcggctgtcagcgctctcctgatgtcacagtggctgcgtgtccttggggtgggtgaggtgtggggagcccagcccctggccctgcctcccgcgccccgctccccttctctctcttactcggttaagccatagcgaggcctccgctcgtttcagatatgaatttgttttatagattataaatatgcatatacagtgtatgtataaagcagaatgcctgcctttcctggttattttttgtaccatattgtaaattatattatttattctttaccaattttgggaataaaaggtgttttggttatttaatataataagagctgttaaacttctgtttaaatttccagttcaacttgtaaatgtttttattgtgcataaatacatactaatgttgatctaaaaaaa

SEQ ID NO: 415198 - DNA, 5223 bp, Homo sapiens
ctcagcttgggggcttgtcacccttcaagagccatttccgcaggatgacagtggtgaccgcagccttccagtagctcctgggaggcacagtggtgggtgccagagcttgtgtcacgttgggggcctgtgtgacctctgactcctcatgttagcatttggaatgttcagtggcttccagcttggctcggctcccacactcccaacagtggctgtaaaggaagccccctgcggccacatcctgctgtgagggcatggcgggcgggctcgacatgtctgcttttgccctcgccctcgcagggagaggttcgttccggcccatccagtcttctctgaccaaagcagctctgtctcggccgatcgtgcccaaggtccttccaccccaggccacgagtcacctggccagtgctatcgacttagcagctacaagtgccggcatcctttccgggaaccccctccctgccttggacaccgagggcttgtctggcatctctccactgtcttcagacgaggtgacgggtgccatctcggggcaggactctactggaactcaccaggatggagacaccctccccaccgtggggggctccgacccatttgtcagcatcccttcgaggcctgagcaggagccagtggcagacagtttccagggctcatctgttctctccttatctgagctgcccaaggcccctctccagaatggcctctccataccgctgtcctcgtcagagagctccagcacccggctgtctccaccagacgtctctgctctgctcgacatctccctgcccggcccacctgaggatgcgctgtcacagggcgagcctgccacacacattagcgactccatcattgagatcgccatcagctccggtcagtacggtgaaggagtccctctttctccagcaaaactgaatggcagtgacagttccaagagccttccctccccgtccagcagcccccagccacactggatcgcctctcccacccacgacccccagtggtaccccagtgactccaccgactcctcgctcagcagcctgtttgcaagcttcatctccccagagaagagccggaagatgttgccgactcccattgggaccaacagtggcacttccttgcttggccccagcttgttggatggaaactcgcgggactcatttgtgtccaggtccctggctgacgttgcagaggttgtggattcccagctggtgtgcatgatgaacgaaaacagcattgattacatttctcggttcaatgacctggcccaagagctgtccatcgctgagcctggccgccgagaagctctgtttgatggtggtggaggcggccccgctgtcagtgacctgtcccagtgaccacacgtcctggtggcggatgaagccctcttcgagctagagaaaaatagataagcccagcagccccagaagatggtctgaacagaggcatctccgcacccaagactgtgcaacgggcaggaacgtggtcacagagctgcttccccacgagcagcaggcaacggcgtccaaggagactaggatgagttcttggcaagggccagcgttagaaatcactgtggtactagagccgttcttcaccacgcctgggcccatgttagggtctgcataatgatcccatttcagcctgtgctctgcctcgattgttgtgttggacattccggtggcatttccttctgagacaagggagtatgtgtgccttggtgtagttgctgtgcactaggagctgtgatctccctctctgcagggaggccccagcccctgctgcttgctttctgccaaacctgtgctatgcatcagctgtgccctctgtggactgtaacgggcaggacagttgggtgtggcctgggctcatgcctggtggtgtcacatcccaaggcagcaagagcatggataccgatcacagggctgctgcggagtcgtggggccctgggctggtgcctcccctccctagaggttttgttcgtactcttaacagggagtgggggcaggaagagtcctgtactatgcaggttgtgtggactttacatgggaccctgctaagctggttgaaaatgtttttcttgtgttttaagaattaggagacatggaagaggaagaacaaagtcccctctgtagttggtttccttcctgtgtccctttgcaagcttccaggcgatctaaggtgtcatttctccctcctggggtgacccttaggcgctaatatgattacagcgaagactttcctgataagttctcaaactcgatgtgtgactgtttggcacttgagacaaacctgcctttgcagggaaagtgtctctcacgggcattggtgtgggcgtgcctgacatacgtgttcagtcccttgcatacctttgccttgagacttctgtgtctccttcccatttgggacacccaggtgagggcccagacatctggatgtggtcagacctcaccaaatatatgccttcgtggtggtctccctccttgcgccctcttgggtggccagcgttcctactgcagacggcccaacatccagtctttccccaggacagagctaacaagggcccctttgccttctcatcctcaggagttccaggcacatgagtcaccgtccatccacatccagtgtggcctggagctgctacagaggtgttgggcaggccatgcctgtgccgccatctctcccttcctgcctcatttcatcccccgcagcagccgggattgattgtgctttcctaacccccttggacctactctccctcctccccaccattcctcttcccccacatgtgtggcacgctgcagccctcaaggccagccctggcccctccactgcttctctccccatccacaatggagaaggtgaaaagaggagggaaaggcctttggtgtggacaagcatgtggacgccctccgtcctgcagtcttgccagcccaccacagccactgtagaccacaggcaggccgtgtactgcaccactgggaggacgtggagaggacagtgaacttccaggcaagagcttccttcttttgtctcacgagtttttcttagagctcttgcctgagctggcttccctccttcagacattgacatgagatcttaagcaaacagtcccaaacctcttaggggtgaaaaaagaaacatgccacttgattaggagagagacagcagtgtttgaactacagcatctttacactagcttgtgttttgtgctacgtataccagcttccaaaattagcatctcattgagccagagaagacaaggagatctccctctgggcatctggctttgctgcgtctctagagggttaggataccaggccgagttcaggccactgctagctttctcatactcccacaggctagaccagagatgccaagtcccaacagcactgagctgtgtgcactgtgccagggacaggagggtttgtgaactgcctgtcagggtacctgttagcccctgacaactcagtggggtgaagttttggaggtcagagtctgctttcgtaggctctttagacagcacctaccacttggttctccagcgtagactcctgggagcagccaactgcagccattgccatccagtggggagatgggttagggaggaggacgggctgactcctctcctgtaataaagctgacaagagttctagaggattctgcttctctagtaactagacaggtgatacgcatttgcttgccacattaagggaaaatggtgtcatttgttgcagaaaaacaatggatacattttcttctggcctaaatgaatatttatgtgcaaacataggcaactgttaaaggctggaattttcaaaagatccaaacagagacttcctgcatcttctgcctttccaacagaagcggtgatcgtctaagtatgagcctgtggcttcctttgtgcatttgagcatgctgtaattaagatgagatcagtttcttagaaaaagctttcctgaatccctctgacgttgcctgggatctttctgttgattcgtcttttctggagattgggacagagcatctgtggtccagggaagttagtcctctggcctcaattctgttgtggatgtgcagtgataagcgggcattgcgtgcctcgggggatgcctagttcgtggcttcctggctgttttgtccttctgtgtcttgtagctgtagggtgccagctcagggagtggggtgttggcggcgtttccgcggttggcctccttgctttgccgcacctccaggttctgggcatgagaggccgtggcctcatttctggtggataacctttttagtttaatagcatctttaattagatcacagcattgaattcaaaatttcttctgcaaagaaagttgtggggcataagacaccgggaatgagggaggaggaagacagttgtgttttctctttaaaccttgagctctagccgatgcatttgtcaggaaatacagcactttgtcttaagaaaacaaggaaggaggccgggcgcagtggctcacgcctgtaatcccagcactttgggaggccgaggcgggcggatcacctgaggtggggagtatgagaccaccctgactaacatggagagaccctgtctctactaaaagtacagaattagccgggcgtggtggcgcatgcccataatcccagctactgaggagacttgaggtaggagaatcacttgaacctcagcggcggaggttgcagtgagtcgagatcgcgccagtgcactccagcctgggcaagaagagcgaaactgggtctcaagttaaaaaaagaaagcaaggaaagagtaatttacaacgaaggaaaaaaacccacagcacacccttcgcggctgtcagcgctctcctgatgtcacagtggctgcgtgtccttggggtgggtgaggtgtggggagcccagcccctggccctgcctcccgcgccccgctccccttctctctcttactcggttaagccatagcgaggcctccgctcgtttcagatatgaatttgttttatagattataaatatgcatatacagtgtatgtataaagcagaatgcctgcctttcctggttattttttgtaccatattgtaaattatattatttattctttaccaattttgggaataaaaggtgttttggttatttaatataataagagctgttaaacttctgtttaaatttccagttcaacttgtaaatgtttttattgtgcataaatacatactaatgttgatctaaaaaaa

SEQ ID NO: 415199 - DNA, 5717 bp, Homo sapiens
acgctcctgacaggcctcctcccaggcaccaggacactgggccatgtcttgagaagacccctgcagaaggcagggacagtcccacccgggagccaggggccttgccgtgtgcctgtggccagctcccagacctggaggacgagctctcgcttctagaccccttgccccgctacctaaagtcctgtcaggacctcattgtccccgagcagtgccgctgtgcggacacacggcctgggagcgagcagccccctctgggcggggcggcctccccagaggtgctggctcctgtcagcaaggaggctgctgaccttgctcccactggcccatccccgaggcccggccccgggctcctgctggatgtttgcactaaagacttggcagatgcacctgcggaggagctccaggagaaggggagccccgcggggcctccgccgtctcagggacagcctgccgccaggcccccgaaggaggtccccgccagccggctggctcagcagctccgtgaggagggctggaacctgcagacctccgaaagcctcacgctggccgaagtctacctcatgatgggcaagcccagcaagctgcagctggagtacgactggctggggcccggccgccaggacccccgccccggctccctacccaccgccctccacaagcagcgcctcctcagctgcctcctgaagctcatttccaccgaggtcaaccccaagctggctctggaagcaaacaccatctctacagcctcagtaaggcccgcccaggaggagcagtcgatgacgcccccagggaaggtggtgaccgtcagctctcgcagcccccgctgccctcggaaccaggcctccctccgcagcagcaagaccttcccgcccagctctgcaccctgctcctcaggtttgagaaaccctccaagacccctcttggtgcctggtccctccagcacaggaagcaatgactcagatggaggcctttttgctgtcccgacaaccttgccacccaacagccgacacgggaagctcttctctcccagtaaagaagcagagctgactttccgccagcatctgaactccatcagtgtgagtgtgtggggccgggccgcccgcgtgcgagcgtccccgtggtctggagagtgcaccttcaggtgccggacgctgctcccttacagatgcagtcggatttcttcctgccaaagccccggaagctgcggaaccggcacctgcggaagccactggtggtccagagaacactgctccctagaccatcggaaaaccagtcccacaacgtttgttccttctccatcctgtctaactcttccgtaactgggagaggttcgttccggcccatccagtcttctctgaccaaagcagctctgtctcggccgatcgtgcccaaggtccttccaccccaggccacgagtcacctggccagtgctatcgacttagcagctacaagtgccggcatcctttccgggaaccccctccctgccttggacaccgagggcttgtctggcatctctccactgtcttcagacgaggtgacgggtgccatctcggggcaggactctactggaactcaccaggatggagacaccctccccaccgtggggggctccgacccatttgtcagcatcccttcgaggcctgagcaggagccagtggcagacagtttccagggctcatctgttctctccttatctgagctgcccaaggcccctctccagaatggcctctccataccgctgtcctcgtcagagagctccagcacccggctgtctccaccagacgtctctgctctgctcgacatctccctgcccggcccacctgaggatgcgctgtcacagggcgagcctgccacacacattagcgactccatcattgagatcgccatcagctccggtcagtacggtgaaggagtccctctttctccagcaaaactgaatggcagtgacagttccaagagccttccctccccgtccagcagcccccagccacactggatcgcctctcccacccacgacccccagtggtaccccagtgactccaccgactcctcgctcagcagcctgtttgcaagcttcatctccccagagaagagccggaagatgttgccgactcccattgggaccaacagtggcacttccttgcttggccccagcttgttggatggaaactcgcgggactcatttgtgtccaggtccctggctgacgttgcagaggttgtggattcccagctggtgtgcatgatgaacgaaaacagcattgattacatttctcggttcaatgacctggcccaagagctgtccatcgctgagcctggccgccgagaagctctgtttgatggtggtggaggcggccccgctgtcagtgacctgtcccagtgaccacacgtcctggtggcggatgaagccctcttcgagctagagaaaaatagataagccctgggctggtgcctcccctccctagaggttttgttcgtactcttaacagggagtgggggcaggaagagtcctgtactatgcaggttgtgtggactttacatgggaccctgctaagctggttgaaaatgtttttcttgtgttttaagaattaggagacatggaagaggaagaacaaagtcccctctgtagttggtttccttcctgtgtccctttgcaagcttccaggcgatctaaggtgtcatttctccctcctggggtgacccttaggcgctaatatgattacagcgaagactttcctgataagttctcaaactcgatgtgtgactgtttggcacttgagacaaacctgcctttgcagggaaagtgtctctcacgggcattggtgtgggcgtgcctgacatacgtgttcagtcccttgcatacctttgccttgagacttctgtgtctccttcccatttgggacacccaggtgagggcccagacatctggatgtggtcagacctcaccaaatatatgccttcgtggtggtctccctccttgcgccctcttgggtggccagcgttcctactgcagacggcccaacatccagtctttccccaggacagagctaacaagggcccctttgccttctcatcctcaggagttccaggcacatgagtcaccgtccatccacatccagtgtggcctggagctgctacagaggtgttgggcaggccatgcctgtgccgccatctctcccttcctgcctcatttcatcccccgcagcagccgggattgattgtgctttcctaacccccttggacctactctccctcctccccaccattcctcttcccccacatgtgtggcacgctgcagccctcaaggccagccctggcccctccactgcttctctccccatccacaatggagaaggtgaaaagaggagggaaaggcctttggtgtggacaagcatgtggacgccctccgtcctgcagtcttgccagcccaccacagccactgtagaccacaggcaggccgtgtactgcaccactgggaggacgtggagaggacagtgaacttccaggcaagagcttccttcttttgtctcacgagtttttcttagagctcttgcctgagctggcttccctccttcagacattgacatgagatcttaagcaaacagtcccaaacctcttaggggtgaaaaaagaaacatgccacttgattaggagagagacagcagtgtttgaactacagcatctttacactagcttgtgttttgtgctacgtataccagcttccaaaattagcatctcattgagccagagaagacaaggagatctccctctgggcatctggctttgctgcgtctctagagggttaggataccaggccgagttcaggccactgctagctttctcatactcccacaggctagaccagagatgccaagtcccaacagcactgagctgtgtgcactgtgccagggacaggagggtttgtgaactgcctgtcagggtacctgttagcccctgacaactcagtggggtgaagttttggaggtcagagtctgctttcgtaggctctttagacagcacctaccacttggttctccagcgtagactcctgggagcagccaactgcagccattgccatccagtggggagatgggttagggaggaggacgggctgactcctctcctgtaataaagctgacaagagttctagaggattctgcttctctagtaactagacaggtgatacgcatttgcttgccacattaagggaaaatggtgtcatttgttgcagaaaaacaatggatacattttcttctggcctaaatgaatatttatgtgcaaacataggcaactgttaaaggctggaattttcaaaagatccaaacagagacttcctgcatcttctgcctttccaacagaagcggtgatcgtctaagtatgagcctgtggcttcctttgtgcatttgagcatgctgtaattaagatgagatcagtttcttagaaaaagctttcctgaatccctctgacgttgcctgggatctttctgttgattcgtcttttctggagattgggacagagcatctgtggtccagggaagttagtcctctggcctcaattctgttgtggatgtgcagtgataagcgggcattgcgtgcctcgggggatgcctagttcgtggcttcctggctgttttgtccttctgtgtcttgtagctgtagggtgccagctcagggagtggggtgttggcggcgtttccgcggttggcctccttgctttgccgcacctccaggttctgggcatgagaggccgtggcctcatttctggtggataacctttttagtttaatagcatctttaattagatcacagcattgaattcaaaatttcttctgcaaagaaagttgtggggcataagacaccgggaatgagggaggaggaagacagttgtgttttctctttaaaccttgagctctagccgatgcatttgtcaggaaatacagcactttgtcttaagaaaacaaggaaggaggccgggcgcagtggctcacgcctgtaatcccagcactttgggaggccgaggcgggcggatcacctgaggtggggagtatgagaccaccctgactaacatggagagaccctgtctctactaaaagtacagaattagccgggcgtggtggcgcatgcccataatcccagctactgaggagacttgaggtaggagaatcacttgaacctcagcggcggaggttgcagtgagtcgagatcgcgccagtgcactccagcctgggcaagaagagcgaaactgggtctcaagttaaaaaaagaaagcaaggaaagagtaatttacaacgaaggaaaaaaacccacagcacacccttcgcggctgtcagcgctctcctgatgtcacagtggctgcgtgtccttggggtgggtgaggtgtggggagcccagcccctggccctgcctcccgcgccccgctccccttctctctcttactcggttaagccatagcgaggcctccgctcgtttcagatatgaatttgttttatagattataaatatgcatatacagtgtatgtataaagcagaatgcctgcctttcctggttattttttgtaccatattgtaaattatattatttattctttaccaattttgggaataaaaggtgttttggttatttaatataataagagctgttaaacttctgtttaaatttccagttcaacttgtaaatgtttttattgtgcataaatacatactaatgttgatctaaaaaaa

SEQ ID NO: 415200 - DNA, 6299 bp, Homo sapiens
acgctcctgacaggcctcctcccaggcaccaggacactgggccatgtcttgagaagacccctgcagaaggcagggacagtcccacccgggagccaggggccttgccgtgtgcctgtggccagctcccagacctggaggacgagctctcgcttctagaccccttgccccgctacctaaagtcctgtcaggacctcattgtccccgagcagtgccgctgtgcggacacacggcctgggagcgagcagccccctctgggcggggcggcctccccagaggtgctggctcctgtcagcaaggaggctgctgaccttgctcccactggcccatccccgaggcccggccccgggctcctgctggatgtttgcactaaagacttggcagatgcacctgcggaggagctccaggagaaggggagccccgcggggcctccgccgtctcagggacagcctgccgccaggcccccgaaggaggtccccgccagccggctggctcagcagctccgtgaggagggctggaacctgcagacctccgaaagcctcacgctggccgaagtctacctcatgatgggcaagcccagcaagctgcagctggagtacgactggctggggcccggccgccaggacccccgccccggctccctacccaccgccctccacaagcagcgcctcctcagctgcctcctgaagctcatttccaccgaggtcaaccccaagctggctctggaagcaaacaccatctctacagcctcagtaaggcccgcccaggaggagcagtcgatgacgcccccagggaaggtggtgaccgtcagctctcgcagcccccgctgccctcggaaccaggcctccctccgcagcagcaagaccttcccgcccagctctgcaccctgctcctcaggtttgagaaaccctccaagacccctcttggtgcctggtccctccagcacaggaagcaatgactcagatggaggcctttttgctgtcccgacaaccttgccacccaacagccgacacgggaagctcttctctcccagtaaagaagcagagctgactttccgccagcatctgaactccatcagtgtgagtgtgtggggccgggccgcccgcgtgcgagcgtccccgtggtctggagagtgcaccttcaggtgccggacgctgctcccttacagatgcagtcggatttcttcctgccaaagccccggaagctgcggaaccggcacctgcggaagccactggtggtccagagaacactgctccctagaccatcggaaaaccagtcccacaacgtttgttccttctccatcctgtctaactcttccgtaactgggagaggttcgttccggcccatccagtcttctctgaccaaagcagctctgtctcggccgatcgtgcccaaggtccttccaccccaggccacgagtcacctggccagtgctatcgacttagcagctacaagtgccggcatcctttccgggaaccccctccctgccttggacaccgagggcttgtctggcatctctccactgtcttcagacgaggtgacgggtgccatctcggggcaggactctactggaactcaccaggatggagacaccctccccaccgtggggggctccgacccatttgtcagcatcccttcgaggcctgagcaggagccagtggcagacagtttccagggctcatctgttctctccttatctgagctgcccaaggcccctctccagaatggcctctccataccgctgtcctcgtcagagagctccagcacccggctgtctccaccagacgtctctgctctgctcgacatctccctgcccggcccacctgaggatgcgctgtcacagggcgagcctgccacacacattagcgactccatcattgagatcgccatcagctccggtcagtacggtgaaggagtccctctttctccagcaaaactgaatggcagtgacagttccaagagccttccctccccgtccagcagcccccagccacactggatcgcctctcccacccacgacccccagtggtaccccagtgactccaccgactcctcgctcagcagcctgtttgcaagcttcatctccccagagaagagccggaagatgttgccgactcccattgggaccaacagtggcacttccttgcttggccccagcttgttggatggaaactcgcgggactcatttgtgtccaggtccctggctgacgttgcagaggttgtggattcccagctggtgtgcatgatgaacgaaaacagcattgattacatttctcggttcaatgacctggcccaagagctgtccatcgctgagcctggccgccgagaagctctgtttgatggtggtggaggcggccccgctgtcagtgacctgtcccagtgaccacacgtcctggtggcggatgaagccctcttcgagctagagaaaaatagataagcccagcagccccagaagatggtctgaacagaggcatctccgcacccaagactgtgcaacgggcaggaacgtggtcacagagctgcttccccacgagcagcaggcaacggcgtccaaggagactaggatgagttcttggcaagggccagcgttagaaatcactgtggtactagagccgttcttcaccacgcctgggcccatgttagggtctgcataatgatcccatttcagcctgtgctctgcctcgattgttgtgttggacattccggtggcatttccttctgagacaagggagtatgtgtgccttggtgtagttgctgtgcactaggagctgtgatctccctctctgcagggaggccccagcccctgctgcttgctttctgccaaacctgtgctatgcatcagctgtgccctctgtggactgtaacgggcaggacagttgggtgtggcctgggctcatgcctggtggtgtcacatcccaaggcagcaagagcatggataccgatcacagggctgctgcggagtcgtggggccctgggctggtgcctcccctccctagaggttttgttcgtactcttaacagggagtgggggcaggaagagtcctgtactatgcaggttgtgtggactttacatgggaccctgctaagctggttgaaaatgtttttcttgtgttttaagaattaggagacatggaagaggaagaacaaagtcccctctgtagttggtttccttcctgtgtccctttgcaagcttccaggcgatctaaggtgtcatttctccctcctggggtgacccttaggcgctaatatgattacagcgaagactttcctgataagttctcaaactcgatgtgtgactgtttggcacttgagacaaacctgcctttgcagggaaagtgtctctcacgggcattggtgtgggcgtgcctgacatacgtgttcagtcccttgcatacctttgccttgagacttctgtgtctccttcccatttgggacacccaggtgagggcccagacatctggatgtggtcagacctcaccaaatatatgccttcgtggtggtctccctccttgcgccctcttgggtggccagcgttcctactgcagacggcccaacatccagtctttccccaggacagagctaacaagggcccctttgccttctcatcctcaggagttccaggcacatgagtcaccgtccatccacatccagtgtggcctggagctgctacagaggtgttgggcaggccatgcctgtgccgccatctctcccttcctgcctcatttcatcccccgcagcagccgggattgattgtgctttcctaacccccttggacctactctccctcctccccaccattcctcttcccccacatgtgtggcacgctgcagccctcaaggccagccctggcccctccactgcttctctccccatccacaatggagaaggtgaaaagaggagggaaaggcctttggtgtggacaagcatgtggacgccctccgtcctgcagtcttgccagcccaccacagccactgtagaccacaggcaggccgtgtactgcaccactgggaggacgtggagaggacagtgaacttccaggcaagagcttccttcttttgtctcacgagtttttcttagagctcttgcctgagctggcttccctccttcagacattgacatgagatcttaagcaaacagtcccaaacctcttaggggtgaaaaaagaaacatgccacttgattaggagagagacagcagtgtttgaactacagcatctttacactagcttgtgttttgtgctacgtataccagcttccaaaattagcatctcattgagccagagaagacaaggagatctccctctgggcatctggctttgctgcgtctctagagggttaggataccaggccgagttcaggccactgctagctttctcatactcccacaggctagaccagagatgccaagtcccaacagcactgagctgtgtgcactgtgccagggacaggagggtttgtgaactgcctgtcagggtacctgttagcccctgacaactcagtggggtgaagttttggaggtcagagtctgctttcgtaggctctttagacagcacctaccacttggttctccagcgtagactcctgggagcagccaactgcagccattgccatccagtggggagatgggttagggaggaggacgggctgactcctctcctgtaataaagctgacaagagttctagaggattctgcttctctagtaactagacaggtgatacgcatttgcttgccacattaagggaaaatggtgtcatttgttgcagaaaaacaatggatacattttcttctggcctaaatgaatatttatgtgcaaacataggcaactgttaaaggctggaattttcaaaagatccaaacagagacttcctgcatcttctgcctttccaacagaagcggtgatcgtctaagtatgagcctgtggcttcctttgtgcatttgagcatgctgtaattaagatgagatcagtttcttagaaaaagctttcctgaatccctctgacgttgcctgggatctttctgttgattcgtcttttctggagattgggacagagcatctgtggtccagggaagttagtcctctggcctcaattctgttgtggatgtgcagtgataagcgggcattgcgtgcctcgggggatgcctagttcgtggcttcctggctgttttgtccttctgtgtcttgtagctgtagggtgccagctcagggagtggggtgttggcggcgtttccgcggttggcctccttgctttgccgcacctccaggttctgggcatgagaggccgtggcctcatttctggtggataacctttttagtttaatagcatctttaattagatcacagcattgaattcaaaatttcttctgcaaagaaagttgtggggcataagacaccgggaatgagggaggaggaagacagttgtgttttctctttaaaccttgagctctagccgatgcatttgtcaggaaatacagcactttgtcttaagaaaacaaggaaggaggccgggcgcagtggctcacgcctgtaatcccagcactttgggaggccgaggcgggcggatcacctgaggtggggagtatgagaccaccctgactaacatggagagaccctgtctctactaaaagtacagaattagccgggcgtggtggcgcatgcccataatcccagctactgaggagacttgaggtaggagaatcacttgaacctcagcggcggaggttgcagtgagtcgagatcgcgccagtgcactccagcctgggcaagaagagcgaaactgggtctcaagttaaaaaaagaaagcaaggaaagagtaatttacaacgaaggaaaaaaacccacagcacacccttcgcggctgtcagcgctctcctgatgtcacagtggctgcgtgtccttggggtgggtgaggtgtggggagcccagcccctggccctgcctcccgcgccccgctccccttctctctcttactcggttaagccatagcgaggcctccgctcgtttcagatatgaatttgttttatagattataaatatgcatatacagtgtatgtataaagcagaatgcctgcctttcctggttattttttgtaccatattgtaaattatattatttattctttaccaattttgggaataaaaggtgttttggttatttaatataataagagctgttaaacttctgtttaaatttccagttcaacttgtaaatgtttttattgtgcataaatacatactaatgttgatctaaaaaaatatatttatggctacaatttcccatttttatttctaacacacttggctcta

SEQ ID NO: 415201 - DNA, 5033 bp, Homo sapiens
acgctcctgacaggcctcctcccaggcaccaggacactgggccatgtcttgagaagacccctgcagaaggcagggacagtcccacccgggagccaggggccttgccgtgtgcctgtggccagctcccagacctggaggacgagctctcgcttctagaccccttgccccgctacctaaagtcctgtcaggacctcattgtccccgagcagtgccgctgtgcggacacacggcctgggagcgagcagccccctctgggcggggcggcctccccagaggtgctggctcctgtcagcaaggaggctgctgaccttgctcccactggcccatccccgaggcccggccccgggctcctgctggatgtttgcactaaagacttggcagatgcacctgcggaggagctccaggagaaggggagccccgcggggcctccgccgtctcagggacagcctgccgccaggcccccgaaggaggtccccgccagccggctggctcagcagctccgtgaggagggctggaacctgcagacctccgaaagcctcacgctggccgaagtctacctcatgatgggcaagcccagcaagctgcagctggagtacgactggctggggcccggccgccaggacccccgccccggctccctacccaccgccctccacaagcagcgcctcctcagctgcctcctgaagctcatttccaccgaggtcaaccccaagctggctctggaagcaaacaccatctctacagcctcagtaaggcccgcccaggaggagcagtcgatgacgcccccagggaaggtggtgaccgtcagctctcgcagcccccgctgccctcggaaccaggcctccctccgcagcagcaagaccttcccgcccagctctgcaccctgctcctcaggtttgagaaaccctccaagacccctcttggtgcctggtccctccagcacaggaagcaatgactcagatggaggcctttttgctgtcccgacaaccttgccacccaacagccgacacgggaagctcttctctcccagtaaagaagcagagctgactttccgccagcatctgaactccatcagtgtgagtgtgtggggccgggccgcccgcgtgcgagcgtccccgtggtctggagagtgcaccttcaggtgccggacgctgctcccttacagatgcagtcggatttcttcctgccaaagccccggaagctgcggaaccggcacctgcggaagccactggtggtccagagaacactgctccctagaccatcggaaaaccagtcccacaacgtttgttccttctccatcctgtctaactcttccgtaactgggagaggttcgttccggcccatccagtcttctctgaccaaagcagctctgtctcggccgatcgtgcccaaggtccttccaccccaggccacgagtcacctggccagtgctatcgacttagcagctacaagtgccggcatcctttccgggaaccccctccctgccttggacaccgagggcttgtctggcatctctccactgtcttcagacgaggtgacgggtgccatctcggggcaggactctactggaactcaccaggatggagacaccctccccaccgtggggggctccgacccatttgtcagcatcccttcgaggcctgagcaggagccagtggcagacagtttccagggctcatctgttctctccttatctgagctgcccaaggcccctctccagaatggcctctccataccgctgtcctcgtcagagagctccagcacccggctgtctccaccagacgtctctgctctgctcgacatctccctgcccggcccacctgaggatgcgctgtcacagggcgagcctgccacacacattagcgactccatcattgagatcgccatcagctccggtcagtacggtgaaggagtccctctttctccagcaaaactgaatggcagtgacagttccaagagccttccctccccgtccagcagcccccagccacactggatcgcctctcccacccacgacccccagtggtaccccagtgactccaccgactcctcgctcagcagcctgtttgcaagcttcatctccccagagaagagccggaagatgttgccgactcccattgggaccaacagtggcacttccttgcttggccccagcttgttggatggaaactcgcgggactcatttgtgtccaggtccctggctgacgttgcagaggttgtggattcccagctggtgtgcatgatgaacgaaaacagcattgattacatttctcggttcaatgacctggcccaagagctgtccatcgctgagcctggccgccgagaagctctgtttgatggtggtggaggcggccccgctgtcagtgacctgtcccagtgaccacacgtcctggtggcggatgaagccctcttcgagctagagaaaaatagataagcccagcagccccagaagatggtctgaacagaggcatctccgcacccaagactgtgcaacgggcaggaacgtggtcacagagctgcttccccacgagcagcaggcaacggcgtccaaggagactaggatgagttcttggcaagggccagcgttagaaatcactgtggtactagagccgttcttcaccacgcctgggcccatgttagggtctgcataatgatcccatttcagcctgtgctctgcctcgattgttgtgttggacattccggtggcatttccttctgagacaagggagtatgtgtgccttggtgtagttgctgtgcactaggagctgtgatctccctctctgcagggaggccccagcccctgctgcttgctttctgccaaacctgtgctatgcatcagctgtgccctctgtggactgtaacgggcaggacagttgggtgtggcctgggctcatgcctggtggtgtcacatcccaaggcagcaagagcatggataccgatcacagggctgctgcggagtcgtggggccctgggctggtgcctcccctccctagaggttttgttcgtactcttaacagggagtgggggcaggaagagtcctgtactatgcaggttgtgtggactttacatgggaccctgctaagctggttgaaaatgtttttcttgtgttttaagaattaggagacatggaagaggaagaacaaagtcccctctgtagttggtttccttcctgtgtccctttgcaagcttccaggcgatctaaggtgtcatttctccctcctggggtgacccttaggcgctaatatgattacagcgaagactttcctgataagttctcaaactcgatgtgtgactgtttggcacttgagacaaacctgcctttgcagggaaagtgtctctcacgggcattggtgtgggcgtgcctgacatacgtgttcagtcccttgcatacctttgccttgagacttctgtgtctccttcccatttgggacacccaggtgagggcccagacatctggatgtggtcagacctcaccaaatatatgccttcgtggtggtctccctccttgcgccctcttgggtggccagcgttcctactgcagacggcccaacatccagtctttccccaggacagagctaacaagggcccctttgccttctcatcctcaggagttccaggcacatgagtcaccgtccatccacatccagtgtggcctggagctgctacagaggtgttgggcaggccatgcctgtgccgccatctctcccttcctgcctcatttcatcccccgcagcagccgggattgattgtgctttcctaacccccttggacctactctccctcctccccaccattcctcttcccccacatgtgtggcacgctgcagccctcaaggccagccctggcccctccactgcttctctccccatccacaatggagaaggtgaaaagaggagggaaaggcctttggtgtggacaagcatgtggacgccctccgtcctgcagtcttgccagcccaccacagccactgtagaccacaggcaggccgtgtactgcaccactgggaggacgtggagaggacagtgaacttccaggcaagagcttccttcttttgtctcacgagtttttcttagagctcttgcctgagctggcttccctccttcagacattgacatgagatcttaagcaaacagtcccaaacctcttaggggtgaaaaaagaaacatgccacttgattaggagagagacagcagtgtttgaactacagcatctttacactagcttgtgttttgtgctacgtataccagcttccaaaattagcatctcattgagccagagaagacaaggagatctccctctgggcatctggctttgctgcgtctctagagggttaggataccaggccgagttcaggccactgctagctttctcatactcccacaggctagaccagagatgccaagtcccaacagcactgagctgtgtgcactgtgccagggacaggagggtttgtgaactgcctgtcagggtacctgttagcccctgacaactcagtggggtgaagttttggaggtcagagtctgctttcgtaggctctttagacagcacctaccacttggttctccagcgtagactcctgggagcagccaactgcagccattgccatccagtggggagatgggttagggaggaggacgggctgactcctctcctgtaataaagctgacaagagttctagaggattctgcttctctagtaactagacaggtgatacgcatttgcttgccacattaagggaaaatggtgtcatttgttgcagaaaaacaatggatacattttcttctggcctaaatgaatatttatgtgcaaacataggcaactgttaaaggctggaattttcaaaagatccaaacagagacttcctgcatcttctgcctttccaacagaagcggtgatcgtctaagtatgagcctgtggcttcctttgtgcatttgagcatgctgtaattaagatgagatcagtttcttagcctatgctctcgctgatccctccgcctgcaatggcactcattctggtaatcgcctttcccgagt

SEQ ID NO: 415202 - DNA, 2281 bp, Homo sapiens
acgctcctgacaggcctcctcccaggcaccaggacactgggccatgtcttgagaagacccctgcagaaggcagggacagtcccacccgggagccaggggccttgccgtgtgcctgtggccagctcccagacctggaggacgagctctcgcttctagaccccttgccccgctacctaaagtcctgtcaggacctcattgtccccgagcagtgccgctgtgcggacacacggcctgggagcgagcagccccctctgggcggggcggcctccccagaggtgctggctcctgtcagcaaggaggctgctgaccttgctcccactggcccatccccgaggcccggccccgggctcctgctggatgtttgcactaaagacttggcagatgcacctgcggaggagctccaggagaaggggagccccgcggggcctccgccgtctcagggacagcctgccgccaggcccccgaaggaggtccccgccagccggctggctcagcagctccgtgaggagggctggaacctgcagacctccgaaagcctcacgctggccgaagtctacctcatgatgggcaagcccagcaagctgcagctggagtacgactggctggggcccggccgccaggacccccgccccggctccctacccaccgccctccacaagcagcgcctcctcagctgcctcctgaagctcatttccaccgaggtcaaccccaagctggctctggaagcaaacaccatctctacagcctcagtaaggcccgcccaggaggagcagtcgatgacgcccccagggaaggtggtgaccgtcagctctcgcagcccccgctgccctcggaaccaggcctccctccgcagcagcaagaccttcccgcccagctctgcaccctgctcctcaggtttgagaaaccctccaagacccctcttggtgcctggtccctccagcacaggaagcaatgactcagatggaggcctttttgctgtcccgacaaccttgccacccaacagccgacacgggaagctcttctctcccagtaaagaagcagagctgactttccgccagcatctgaactccatcagtgtgagtgtgtggggccgggccgcccgcgtgcgagcgtccccgtggtctggagagtgcaccttcaggtgccggacgctgctcccttacagatgcagtcggatttcttcctgccaaagccccggaagctgcggaaccggcacctgcggaagccactggtggtccaggtcagggtcttctcaagtctgaacgtgtggcctcgtggctgggccaaccaggacacagggcttcttccctctctcacattttcatggtgtaaaatgtgggaaattcctgccccttccttccctcttgtgagtagggtaaaaatacaagtaataacagtgaacttaatggtacccagaagtaaaggtaatctttcaataacatggaaatccacttgcaaaaaagacaattatagggattcaagtccaaagaatgtcccagattgggatgtatttatggaatctcaacacctatttataaacatttagtctgtgggagcagttgccagggcatgtgggtcagccagagcccaggcctctcatgagctccccaggagtccccgaggatgccgtatgcaagcctgggggacagccagggactcagaggcacctcagaagaagagcttggcattctgacgcataaaaatacagaaagtgaggtgggaagtctgaggtaattatggcctcagaaatgtatggatgtgtgttattttggattcatgcacaggtttccttttgttagactcttagaaatctctttctcccttgagattagtatatttacaaatgagacattgcatgaacggtcttaggaagaaagtgcctgctaaatcttaggtgttctttgttcaaactaagatcagggttgaaaactatggcccagggaccacttccagcctgactgttgttttgtttaatttaaaacaactttatagatagagaattcacatatcataatgtttgcccatttgaactttatgactcagtggtcacaaggtgtacgacgaccatcaccatggtctaatcccagaacgttaccacccagaaaggaaaccctgctcctatgaactcacgttgccttctcccgccagcccttggcaaccacggatccgctttctgtctctatggatttgtctgttctgggcatttcctataaatgggatcatacaatttgtgttcttttccacataatatttttgtaaataaagtttactggcacacagc

SEQ ID NO: 415203 - DNA, 1601 bp, Homo sapiens
agaggcggtgcggcacagaggagcgctcgcttcacaaggtgaccctagctcccaccgccaccgccgcggtcgcgctccagacgccctccagcagctccgcgccctcccaggcacccggcctttctttctccctcttgcaaccaagatccgtccggccgctggagacccagggagccggggttaggaactcacttggggctttcccctcccccaccggagagccccgggatggagagccgaaaggacatggttgtgtttctggatgggggtcagcttggcactctggttggcaagagagtctcaaatttgtccgaagccgtgggcagcccgctgccggagccgcccgagaaaatggtgccccgtggttgcctgagccctcgggccgtccctccggccacccgggagcgcggcgggggaggcccggaggaggagccggtagatggactcgcaggcagcgcggcggggccgggcgccgagccccaggtagctggggcggccatgctcggcccaggacccccggccccctcagtcgacagcctctccggacaggggcaacccagtagctcggacaccgagtcggatttctatgaagaaatcgaggtgagctgcaccccggactgcgccaccgggaacgccgagtaccagcacagcaaagggtccggctccgaggcgctggtcggcagtccgaacggagggagcgagacccccaagagcaacggcggcagtggtgggggcggctcgcaaggcaccctggcgtgcagcgccagtgaccagatgcgtcgttaccgcaccgccttcacccgagagcagattgcgcggctggagaaggaattctaccgggagaactacgtatccaggccgcggagatgtgagctggcggccgccctaaacctgccggaaaccaccatcaaggtgtggttccagaaccggcgcatgaaggacaagcggcagcgcctggccatgacgtggccgcacccggcggaccccgccttctacacttacatgatgagccatgcggcggccgcgggcggcctgccctaccccttcccatcgcacctgcccctgccctactactcgccggtgggcctgggcgccgcatccgccgcctccgccgccgcctcgcccttcagcggctcgctgcgcccgctcgacacgttccgcgtgctgtcgcagccctacccgcggcccgaactgctgtgcgccttccgccacccgccgctctaccccgggcccgcgcacggactgggcgcctctgccggcggcccctgctcctgcctcgcctgtcacagcggcccggccaacgggctggcgccccgggctgccgccgcctcggacttcacctgtgcctccacctcccgctcggactccttcctcaccttcgcgccctcggtgctcagcaaggcctcctccgtcgcgctggaccagagggaggaggtgcccctcactagataaggggccgggctggtggctgccggctccatgacgcccgtggggtcaccccccggcccgggactcagccagcctcgcctcctcgctcctcgctcctcgcccctaggacgccaagggggaaaggagagggcggaaaaggaccagcgggatcc

SEQ ID NO: 415204 - DNA, 1389 bp, Homo sapiens
gcccgtcacacataagagcaaggaaactctctgaatgcccagcatactacaatgcacttgacccagagtttacaaccctctagcacaaaggtgcatctcaactcatgtgcctgtcagaagtgcacgccctgccaacgggaggcagaaatctcacctatgctccagggcaggtgggaagggcggctgggaacccctgtacccaggatgccttagaggaagggaaggcctccccaaagacctctacctacccaatcaagggcaggcccttattttcccttcttgggttccccagaggccgcagtaccctagcagaaacagttactgaggtggctgacagggtgtcccttcccaaatcaccctcccaccttaggcctacagccccacttcaatggcgtttgtgtgtctgtgtctgtacacgcctgtgctctggactcgctgtgcagggtccggctccgaggcgctggtcggcagtccgaacggagggagcgagacccccaagagcaacggcggcagtggtgggggcggctcgcaaggcaccctggcgtgcagcgccagtgaccagatgcgtcgttaccgcaccgccttcacccgagagcagattgcgcggctggagaaggaattctaccgggagaactacgtatccaggccgcggagatgtgagctggcggccgccctaaacctgccggaaaccaccatcaaggtgtggttccagaaccggcgcatgaaggacaagcggcagcgcctggccatgacgtggccgcacccggcggaccccgccttctacacttacatgatgagccatgcggcggccgcgggcggcctgccctaccccttcccatcgcacctgcccctgccctactactcgccggtgggcctgggcgccgcatccgccgcctccgccgccgcctcgcccttcagcggctcgctgcgcccgctcgacacgttccgcgtgctgtcgcagccctacccgcggcccgaactgctgtgcgccttccgccacccgccgctctaccccgggcccgcgcacggactgggcgcctctgccggcggcccctgctcctgcctcgcctgtcacagcggcccggccaacgggctggcgccccgggctgccgccgcctcggacttcacctgtgcctccacctcccgctcggactccttcctcaccttcgcgccctcggtgctcagcaaggcctcctccgtcgcgctggaccagagggaggaggtgcccctcactagataaggggccgggctggtggctgccggctccatgacgcccgtggggtcaccccccggcccgggactcagccagcctcgcctcctcgctcctcgctcctcgcccctaggacgccaagggggaaaggagagggcggaaaaggaccagcgggatcc

SEQ ID NO: 415205 - DNA, 367 bp, Homo sapiens
tcaaactcacattctaacaaaaaaaaaactaaactcgaggggtgttttcacaatataattattatatataacagaataattataataatgatacattgtaacagaatacagtcctttaaaagataagagttttatatttttaccaattcagagtcatgttgaatgtgactaataattagctaataaatccaactaatatgtccctatgtaagactgattttaatcagtgcagaaacaggcaatcttctccatcagaaaaactgaaaatgtctggcagtattgccatttatcacaaaaaggaaaatcagatttctcatatgttgcttgagttgaagggcagttatcaagaagcactttaataggtaaa

SEQ ID NO: 415206 - DNA, 2515 bp, Homo sapiens
tattcatcaagtgccctctagctgttaagtcactctgatctctgactgcagctcctactgttggacacacctggccggtgcttcagttagatcaaaccattgctgaaactgaagaggacatgtcaaatattacagatccacagatgtgggattttgatgatctaaatttcactggcatgccacctgcagatgaagattacagcccctgtatgctagaaactgagacactcaacaagtatgttgtgatcatcgcctatgccctagtgttcctgctgagcctgctgggaaactccctggtgatgctggtcatcttatacagcagggtcggccgctccgtcactgatgtctacctgctgaacctggccttggccgacctactctttgccctgaccttgcccatctgggccgcctccaaggtgaatggctggatttttggcacattcctgtgcaaggtggtctcactcctgaaggaagtcaacttctacagtggcatcctgctgttggcctgcatcagtgtggaccgttacctggccattgtccatgccacacgcacactgacccagaagcgtcacttggtcaagtttgtttgtcttggctgctggggactgtctatgaatctgtccctgcccttcttccttttccgccaggcttaccatccaaacaattccagtccagtttgctatgaggtcctgggaaatgacacagcaaaatggcggatggtgttgcggatcctgcctcacacctttggcttcatcgtgccgctgtttgtcatgctgttctgctatggattcaccctgcgtacactgtttaaggcccacatggggcagaagcaccgagccatgagggtcatctttgctgtcgtcctcatcttcctgctttgctggctgccctacaacctggtcctgctggcagacaccctcatgaggacccaggtgatccaggagagctgtgagcgccgcaacaacatcggccgggccctggatgccactgagattctgggatttctccatagctgcctcaaccccatcatctacgccttcatcggccaaaattttcgccatggattcctcaagatcctggctatgcatggcctggtcagcaaggagttcttggcacgtcatcgtgttacctcctacacttcttcgtctgtcaatgtctcttccaacctctgaaaaccatcgatgaaggaatatctcttctcagaaggaaagaataaccaacaccctgaggttgtgtgtggaaggtgatctggctctggacaggcactatctgggttttggggggacgctataggatgtggggaagttaggaactggtgtcttcaggggccacaccaaccttctgaggagctgttgaggtacctccaaggaccggcctttgcacctccatggaaacgaagcaccatcattcccgttgaacgtcacatctttaacccactaactggctaattagcatggccacatctgagccccgaatctgacattagatgagagaacagggctgaagctgtgtcctcatgagggctggatgctctcgttgaccctcacaggagcatctcctcaactctgagtgttaagcgttgagccaccaagctggtggctctgtgtgctctgatccgagctcaggggggtggttttcccatctcaggtgtgttgcagtgtctgctggagacattgaggcaggcactgccaaaacatcaacctgccagctggccttgtgaggagctggaaacacatgttccccttgggggtggtggatgaacaaagagaaagagggtttggaagccagatctatgccacaagaaccccctttacccccatgaccaacatcgcagacacatgtgctggccacctgctgagccccaagtggaacgagacaagcagcccttagcccttcccctctgcagcttccaggctggcgtgcagcatcagcatccctagaaagccatgtgcagccaccagtccattgggcaggcagatgttcctaataaagcttctgttccgtgcttgtccctgtggaagtatcttggttgtgacagagtcaagggtgtgtgcagcattgttggctgttcctgcagtagaatgggggcagcacctcctaagaaggcacctctctgggttgaagggcagtgttccctggggctttaactcctgctagaacagtctcttgaggcacagaaactcctgttcatgcccatacccctggccaaggaagatccctttgtccacaagtaaaaggaaatgctcctccagggagtctcagcttcaccctgaggtgagcatcatcttctgggttaggccttgcctaggcatagccctgcctcaagctatgtgagctcaccagtccctccccaaatgctttccatgagttgcagttttttcctagtctgttttccctccttggagacagggccctgtcggtttattcactgtatgtccttggtgcctggagcctactaaatgctcaataaataatgatcacaggaatgaatgcatgctgaaaagaccactctttt

SEQ ID NO: 415207 - DNA, 476 bp, Homo sapiens
  misc_feature (232)..(232): n is a, c, g, or t
gtttattatattgtggctttaggacattaaacctcacttcaactgaaggtaatttgtaatttaagaaggagagggtagtagtggtattaggggcagtccttctatttgtctcataaacccaaatgtgaatgtgaaacaccctttgttgttatcattttgatttggtctggtcttttacaggtgttagtccagaagtgaatgaactattgatggaagcccagctgctccaggnatcccttcctgaaattcaggaactttaccagactttacttgcaaagccaagccctgctcagcagactgaccgaagctcaccagtgagacccagcagtgagaaggtgagtgtctgagaggcttctggggcaaggcacagtctggggtgggggtatgctttattttactcctcgaaacataaccagacagctggtgtgaggactgggcgattagactgaggatgacccattttgaatgctgactta

SEQ ID NO: 415208 - DNA, 344 bp, Homo sapiens
cagaatgatgagaaaaccgtatgtttctggaagttaggaaccagtcatgtttgtatcatgagggtgtgggcatttggacttcatagaatgttttcaatataattaagttttcatgaaatattggtaaaattaaaataatacatacaaagcagaactgtaagtcaataaatatgtatttaattcaaattttacaagtcaattattgtaaaaaaatttctatttgaagttgtgagaaaatataaatggaaaactcactacatttattcatcccattaatctaacatgtatattcataaacaactctttatttacccattcagtatttttgctgccttatataaatt

SEQ ID NO: 415209 - DNA, 1632 bp, Homo sapiens
ccaaccacaagcaccaaagcagaggggcaggcagcacaccacccagcagccagagcaccagcccagccatggtccttgaggtgagtgaccaccaagtgctaaatgacgccgaggttgccgccctcctggagaacttcagctcttcctatgactatggagaaaacgagagtgactcgtgctgtacctccccgccctgcccacaggacttcagcctgaacttcgaccgggccttcctgccagccctctacagcctcctctttctgctggggctgctgggcaacggcgcggtggcagccgtgctgctgagccggcggacagccctgagcagcaccgacaccttcctgctccacctagctgtagcagacacgctgctggtgctgacactgccgctctgggcagtggacgctgccgtccagtgggtctttggctctggcctctgcaaagtggcaggtgccctcttcaacatcaacttctacgcaggagccctcctgctggcctgcatcagctttgaccgctacctgaacatagttcatgccacccagctctaccgccgggggcccccggcccgcgtgaccctcacctgcctggctgtctgggggctctgcctgcttttcgccctcccagacttcatcttcctgtcggcccaccacgacgagcgcctcaacgccacccactgccaatacaacttcccacaggtgggccgcacggctctgcgggtgctgcagctggtggctggctttctgctgcccctgctggtcatggcctactgctatgcccacatcctggccgtgctgctggtttccaggggccagcggcgcctgcgggccatgcggctggtggtggtggtcgtggtggcctttgccctctgctggaccccctatcacctggtggtgctggtggacatcctcatggacctgggcgctttggcccgcaactgtggccgagaaagcagggtagacgtggccaagtcggtcacctcaggcctgggctacatgcactgctgcctcaacccgctgctctatgcctttgtaggggtcaagttccgggagcggatgtggatgctgctcttgcgcctgggctgccccaaccagagagggctccagaggcagccatcgtcttcccgccgggattcatcctggtctgagacctcagaggcctcctactcgggcttgtgaggccggaatccgggctcccctttcgcccacagtctgacttccccgcattccaggctcctccctccctctgccggctctggctctccccaatatcctcgctcccgggactcactggcagccccagcaccaccaggtctcccgggaagccaccctcccagctctgaggactgcaccattgctgctccttagctgccaagccccatcctgccgcccgaggtggctgcctggagccccactgcccttctcatttggaaactaaaacttcatcttccccaagtgcggggagtacaaggcatggcgtagagggtgctgccccatgaagccacagcccaggcctccagctcagcagtgactgtggccatggtccccaagacctctatatttgctcttttatttttatgtctaaaatcctgcttaaaacttttcaataaacaagatcgtcaggaaaaaaaaaaaa

SEQ ID NO: 415210 - DNA, 2354 bp, Homo sapiens
ggcaggaggtgatatttgacaggctgcgcgcgggcgagctgccgcggagcacccggcaggggctgacagcatggcctcgcccgacccgcccgccaccagctacgccccgtccgacgtgccctcgggggtcgcgctgttcctcaccatccctttcgccttcttcctgcccgagctgatatttgggttcttggtctggaccatggtagccgccacccacatagtataccccttgctgcaaggatgggtgatgtatgtctcgctcacctcgtttctcatctccttgatgttcctgttgtcttacttgtttggattttacaaaagatttgaatcctggagagttctggacagcctgtaccacgggaccactggcatcctgtacatgagcgctgccgtcctacaagtacatgccacgattgtttctgagaaactgctggacccaagaatttactacattaattcggcagcctcgttcttcgccttcatcgccacgctgctctacattctccatgccttcagcatctattaccactgatgcacaggcgccaggccaagggggaaatgctctttgaaagctccaattattggtccccaaaagcagcttccaacgtttgccatctggatgacaaacggaagatccactaaaacgtccacgggattaacagaacgtccttgcagactgagcgatgacaccacactttgtttggacatttaaattcactctgctgaataggaggaagcttttctttttcctgggaaaacaactgtctcttggaattatctgaccatgaacttgctcttctagacaactcacatcaaagccctcactccactaatggagaatcctagccccactaatgccaagtctgtttggggattttgcctcagctatgggcttccctagagtaggtctaggggaatactcagtctgatcttttttttgtttgttttattttgttttttttgagacggagtctcgctcttcctccaaggctggagtgcagtgacgcgatctccactcactgcaggctccgcctcccgggttcccgccattctcctgcctcagcctcccgagtagccgggactacaggcgcccaccaccatgcccggctaatttagttgtatttttagtagagatggggtttcaccgtattagccaggatggtctcgatctcctgacctcgtgatccgcccgcctcggcctcccaaagtgctgggattacaggcgtgagccaccgtgcccggcctgattctcttaaaattgaagaggtgctgccaaggccttcagatctaacgcagatgcatagaccttgttcctggtacttgttcagcctgtgctggggagccgtggtcccgagttccctgggaggctgacagggtcaagccaccctgcccaccaccctcccacttcccctcccctttcctctccagcattaggattcaagggaaatctgcatgaagccaattttgagggtagacgtgtggggaaaataaatcattatacagtaagacctggggcttgaggggtggggaatggggagggaagggcatagcctgctcctccatgagtctgacatctcggaaactgagcagctgccggacgcctgggtcaggaatccaagaccccacctcttaaggactggttcctcagaaagcaccctcagggaaaaaggtgaaaacattacatccgtggattctcctgccacaaccgcattggaagaaaaggctgccgcaacatctcagcgaggagtgaaggacccatgtcccaggaaccgcgctgcgccacctgcactcacccccctcacattctcttaagcacccggtggccctccgaggcctggcggaatggtggtgcccacggggttgggcaagggctcaccaggacctcaacgggcaaagttgtgcacactaaaatatcaaatcaaggtgcttggttttaaagtaaatgtttttctaaagaaagctgtgttcttctgttgacccagacgaatagggcacagccctgtaactgcacgtgccttctgtcattgggaatgaaataaattattacgagaaagggacttgtcctaactggtttgaggccttacagttttgtatctacatttttcccctcctggggtttgcggggacagggacagaactacaggagtcatgggaaagaaaattctggcttcactactgctcactgctcactttctgatcactctgatactttttttttttttttttttgcaacctgataccttgaaaagcttctatgtgtctctccttttgttgcctggcagctgtctaggatgatcactgattactatttactaagtagccacatgcaaataaaagttgtttggtaaaatgga

SEQ ID NO: 415211 - DNA, 2057 bp, Homo sapiens
ggcaggaggtgatatttgacaggctgcgcgcgggcgagctgccgcggagcacccggcaggggctgacagcatggcctcgcccgacccgcccgccaccagctacgccccgtccgacgtgccctcgggggtcgcgctgttcctcaccatccctttcgccttcttcctgcccgagctgatatttgggttcttggtctggaccatggtagccgccacccacatagtataccccttgctgcaaggatgggtgatgtatgtctcgctcacctcgtttctcatctccttgatgttcctgttgtcttacttgtttggattttacaaaagatttgaatcctggagagttctggacagcctgtaccacgggaccactggcatcctgtacatgagcgctgccgtcctacaagtacatgccacgattgtttctgagaaactgctggacccaagaatttactacattaattcggcagcctcgttcttcgccttcatcgccacgctgctctacattctccatgccttcagcatctattaccactgatgcacaggcgccaggccaagggggaaatgctctttgaaagctccaattattggtccccaaaagcagcttccaacgtttgccatctggatgacaaacggaagatccactaaaacgtccacgggattaacagaacgtccttgcagactgagcgatgacaccacactttgtttggacatttaaattcactctgctgaataggaggaagcttttctttttcctgggaaaacaactgtctcttggaattatctgaccatgaacttgctcttctagacaactcacatcaaagccctcactccactaatggagaatcctagccccactaatgccaagtctgtttggggattttgcctcagctatgggcttccctagagtaggtctaggggaatactcagtctgatcttttttttgtttgttttattttgttttttttgagacggagtctcgctcttcctccaaggctggagtgcagtgacgcgatctccactcactgcaggctccgcctcccgggttcccgccattctcctgcctcagcctcccgagtagccgggactacaggcgcccaccaccatgcccggctaatttagttgtatttttagtagagatggggtttcaccgtattagccaggatggtctcgatctcctgacctcgtgatccgcccgcctcggcctcccaaagtgctgggattacaggcgtgagccaccgtgcccggcctgattctcttaaaattgaagaggtgctgccaaggccttcagatctaacgcagatgcatagaccttgttcctggtacttgttcagcctgtgctggggagccgtggtcccgagttccctgggaggctgacagggtcaagccaccctgcccaccaccctcccacttcccctcccctttcctctccagcattaggattcaagggaaatctgcatgaagccaattttgagggtagacgtgtggggaaaataaatcattatacagtaagacctggggcttgaggggtggggaatggggagggaagggcatagcctgctcctccatgagtctgacatctcggaaactgagcagctgccggacgcctgggtcaggaatccaagaccccacctcttaaggactggttcctcagaaagcaccctcagggaaaaaggtgaaaacattacatccgtggattctcctgccacaaccgcattggaagaaaaggctgccgcaacatctcagcgaggagtgaaggacccatgtcccaggaaccgcgctgcgccacctgcactcacccccctcacattctcttaagcacccggtggccctccgaggcctggcggaatggtggtgcccacggggttgggcaagggctcaccaggacctcaacgggcaaagttgtgcacactaaaatatcaaatcaaggtgcttggttttaaagtaaatgtttttctaaagaaagctgtgttcttctgttgacccagacgaatagggcacagccctgtaactgcacgtgccttctgtcattgggaatgaaataaattattacgagaaaggga

SEQ ID NO: 415212 - DNA, 3130 bp, Homo sapiens
taaagaggtaatccaagtaaaatgaggtccttagagcaggccctgatccaataggactgtccttattagaagaggaaacttggacacagatacacacagagggagcaccgtgtgaagacacagagaggagatggccagctaccagccaagcagagagcccttactgtaaaccaaccctgccgcatcctgatctcagaattttggcttccagaactgtaaggaaacacatttctactgtttaagccacttggctgggagtacttggttatggcagcctgagcagactaaaccagcacctcaaagagttgttatagggtatgcttagtggtaactggttcctaaaggccttgctttctaaggctgactcctcaccctgcaaggatgcattctccccactggcagatatgcaaccaggaacaggcattaacacgctttattcccagagttttaatattttccattgcataaaatatttgttcatgaaaatgacaaaattgctattagattctatcaccacatctctgttgattttactttctgcaaacacatacaagtaatgtaggcatacagttaaaaatgaaaccttatcctgtagttccagctactagggaggctgaagcaagagaatggcatgaacctgggaggcggagcttgtcgtgagcccagatcaggccactacactccagccggggcaacagagcgcaactccgtctcaaaacaaacaaacaaaacaaaacaaaaaaaacttatagacaagtacaaaatgagaagaaaaagtccctttcccttcatgcctctacttcctgctgtattctcaaaggtaagcactgattacagtttacttatggatctttccaggaaaatattttatgcatttatcagaaaatgtaagtatatgcatcctttaaaattctgcataaatcaaactctgcagggtactatcttcccatcctcatttgatattttgtagatcttttcctattggctgtacagatcacctcattctgtctcctgggtcatacaatatagctcacataattctaagtctgaaggttggtccaaatggttccaagaatgcaggtaccaaaaagtagtctcttgaagaggccatcagagacctggctgtttgtatcttcctcctctgccatccacagtgtcatcttcacccaaggtggctggagaagctgttaggaatatgtggttttttaaaaattacattcataggaaaaggggagggaagagaagaagaaaacctctccccctaagctcatggctctttttagtcaggctgagccaactaaagtcatgtacttcccttagataggtaactgttgccaggaaaatgccctgtgtggattggcctggactaagcaggatcctcctctaaagagagagatgagatgaatgcctgacccaagtctgggatcttgggtgggaagcgtgtggatagtaggtcagaggtcagcagtgtctgtggtgtaggatgtaatcccatctccacagagctgcatacaagtgtgtttaagtgtgtgcaagtgattaactttgattagtagtttcaactctttacaatgaacatatttatcttttttaaaaaataaagccattttaaaagatcttgccataaaacaatcattccttaagtcaccacttaggatagacctagaatatttgtcctttctcaagagcaccagagagttttctggtaatccacgcaataaacagttataaaaggtaattgttgagatcaggggaagatggcagataggaggcagtgctaatgtgtagctcccacatggatggacaaaacaccatgtggagactcacactgtgaccctgttgtgctccaagaactatcataggaacgtactgggaaaaccaaaagaattcacggatcctttgaaagaagacgcacaccactgtaaattctgtggaacaggagaaaaactgtcttggaggaaggcatccttctattctactgatcagaaagctggacaaagtcccactgccaggctacacagttggtgccatttgcggaggtgacctttgacctttaacccacgcggccacccgcccgagctcttacccctgctgcccctcgcgcgtcccactccccgtccctgccggatccgcttccctgcgctgggcccagcgcgccgccagggaaggggccggagcctgggagcccgccccgccgtcgcccgtcctccgcccgcaggcccacccgcagcggtcacgtgaaggaccgagcgccgcgcgcccaggcggggcctccggcctgcacgaggagggcagagtccgttgcggctgccgccccgacgcccgcgcatccccgctcgccgcgcccgccgccgcgatgtccggggccggcctagccgcggtggtgagctgcctgcgcccgcagcccggcgaggagccgcagacccatgaggaccttctcctggcagctgcctatgttttggatgcccagtacaacagaaatgttccatttgaaactcacctcaggccatcagacgttactatttttataaccactagacaacgcaggttgccgcatacttctttatttgtgtagacctcgctcttgccctgtttgaagagtctgagttgcttcccctgcctttcttggccacctcaatagcagaagtactctgcctgactgcatactttggcagactggtacattttgcaaaagtcactcctcaaatggttttctggaaggatacaaaagacatctgcaccatggtaaccacagtggcgagtgttcattgtagtacctgtaagagtttatgaccgaaggcaggagccatgaagaaaaaagactcaatagatttgcttttgatgaaacaacaacacttccatacagtgaacgccataagcacaactgcaagcaaaccgcaaactgaagaacaaatagggcaaaatgtggcagtgcagacatttcagcatatcaagagcacttccaaattacaggaaaaaaaagatatctcaatagataattttgctgaagataagtgaaggcaactcataaggaaaaaatatgtaaaatggccgataggaaagatgtttaacgtcactaattaaaaattatagaataaaacgacaataaaataccatgtgtttgcctata

SEQ ID NO: 415213 - DNA, 3240 bp, Homo sapiens
  misc_feature (2405)..(2405): n is a, c, g, or t
  misc_feature (2446)..(2446): n is a, c, g, or t
  misc_feature (2712)..(2712): n is a, c, g, or t
taaagaggtaatccaagtaaaatgaggtccttagagcaggccctgatccaataggactgtccttattagaagaggaaacttggacacagatacacacagagggagcaccgtgtgaagacacagagaggagatggccagctaccagccaagcagagagcccttactgtaaaccaaccctgccgcatcctgatctcagaattttggcttccagaactgtaaggaaacacatttctactgtttaagccacttggctgggagtacttggttatggcagcctgagcagactaaaccagcacctcaaagagttgttatagggtatgcttagtggtaactggttcctaaaggccttgctttctaaggctgactcctcaccctgcaaggatgcattctccccactggcagatatgcaaccaggaacaggcattaacacgctttattcccagagttttaatattttccattgcataaaatatttgttcatgaaaatgacaaaattgctattagattctatcaccacatctctgttgattttactttctgcaaacacatacaagtaatgtaggcatacagttaaaaatgaaaccttatcctgtagttccagctactagggaggctgaagcaagagaatggcatgaacctgggaggcggagcttgtcgtgagcccagatcaggccactacactccagccggggcaacagagcgcaactccgtctcaaaacaaacaaacaaaacaaaacaaaaaaaacttatagacaagtacaaaatgagaagaaaaagtccctttcccttcatgcctctacttcctgctgtattctcaaaggtaagcactgattacagtttacttatggatctttccaggaaaatattttatgcatttatcagaaaatgtaagtatatgcatcctttaaaattctgcataaatcaaactctgcagggtactatcttcccatcctcatttgatattttgtagatcttttcctattggctgtacagatcacctcattctgtctcctgggtcatacaatatagctcacataattctaagtctgaaggttggtccaaatggttccaagaatgcaggtaccaaaaagtagtctcttgaagaggccatcagagacctggctgtttgtatcttcctcctctgccatccacagtgtcatcttcacccaaggtggctggagaagctgttaggaatatgtggttttttaaaaattacattcataggaaaaggggagggaagagaagaagaaaacctctccccctaagctcatggctctttttagtcaggctgagccaactaaagtcatgtacttcccttagataggtaactgttgccaggaaaatgccctgtgtggattggcctggactaagcaggatcctcctctaaagagagagatgagatgaatgcctgacccaagtctgggatcttgggtgggaagcgtgtggatagtaggtcagaggtcagcagtgtctgtggtgtaggatgtaatcccatctccacagagctgcatacaagtgtgtttaagtgtgtgcaagtgattaactttgattagtagtttcaactctttacaatgaacatatttatcttttttaaaaaataaagccattttaaaagatcttgccataaaacaatcattccttaagtcaccacttaggatagacctagaatatttgtcctttctcaagagcaccagagagttttctggtaatccacgcaataaacagttataaaaggtaattgttgagatcaggggaagatggcagataggaggcagtgctaatgtgtagctcccacatggatggacaaaacaccatgtggagactcacactgtgaccctgttgtgctccaagaactatcataggaacgtactgggaaaaccaaaagaattcacggatcctttgaaagaagacgcacaccactgtaaattctgtggaacaggagaaaaactgtcttggaggaaggcatccttctattctactgatcagaaagctggacaaagtcccactgccaggctacacagttggtgccatttgcggaggcccacccgcagcggtcacgtgaaggaccgagcgccgcgcgcccaggcggggcctccggcctgcacgaggagggcagagtccgttgcggctgccgccccgacgcccgcgcatccccgctcgccgcgcccgccgccgcgatgtccggggccggcctagccgcggtggtgagctgcctgcgcccgcagcccggcgaggagccgcagacccatgagaccttctgccagaaagtgggcctgttgtgcacgcttcagggcaagctgcagcccgaggactggacattgttggacgaactgctgcagggcctgcaaacactgctgctcatgattttgtggcaggcttcccgtggcctcttcctgcactaccangtggaggccctaaccctgcgtcgcatcagtagcttccgccngtacaagtatgacctggtggcagcgggcaaggctttggagggcatgttctgcaagctcaaccacctcctggaacacccgcaccagctgttcttcctctacctgctccccactctgtcccgcttcgtctccatcggcctctacatgcccgccaccagcttcttgctcctggtccttggtttcaaggctctgcaactgtggatgcagctgcatgaggccggagtgggccttgaggagctcaggggggtccctgaccctagtgtccccnctcccccagcacaggatggtaagcacacaggtcccagacaggggctggatggctctgaagctggtagccctgatctacctaatactgcagctgggctgcatcgccctcaccaacttctgactggacttcctgctggccgccactatggtgctgccgctgtgctcgccgagcctttgggccctggaccctctgtgctgccctgctggtgttgacaagcccggcagccacgctccttggcagcccattcctgtggcgggagctgcaggaggcaccactgtcactggccaagggctggcagctcttcctggcagcactggcccagggtgcgctggagcaccacacctaaggcgccctgctcttcccactgctgtccctgggcctctgcccttgctgactacttttctggaatgtgctcttctggaagtgagatctgcctgtccggggcaccaggctgggacagagactccccaaggaccccattctgcctccttctggggaaataaacaagtgcctgtttcagctgcttta

SEQ ID NO: 415214 - DNA, 2299 bp, Homo sapiens
ggcaggaggtgatatttgacaggctgcgcgcgggcgagctgccgcggagcacccggcaggggctgacagcatggcctcgcccgacccgcccgccaccagctacgccccgtccgacgtgccctcgggggtcgcgctgttcctcaccatccctttcgccttcttcctgcccgagctgatatttgggttcttggtctggaccatggtagccgccacccacatagtataccccttgctgcaaggatgggtgatgtatgtctcgctcacctcgtttctcatctccttgatgttcctgttgtcttacttgtttggattttacaaaagatttgaatcctggagagttctggacagcctgtaccacgggaccactggcatcctgtacatgagcgctgccgtcctacaagtacatgccacgattgtttctgagaaactgctggacccaagaatttactacattaattcggcagcctcgttcttcgccttcatcgccacgctgctctacattctccatgccttcagcatctattaccactgatgcacaggcgccaggccaagggggaaatgctctttgaaagctccaattattggtccccaaaagcagcttccaacgtttgccatctggatgacaaacggaagatccactaaaacgtccacgggattaacagaacgtccttgcagactgagcgatgacaccacactttgtttggacatttaaattcactctgctgaataggaggaagcttttctttttcctgggaaaacaactgtctcttggaattatctgaccatgaacttgctcttctagacaactcacatcaaagccctcactccactaatggagaatcctagccccactaatgccaagtctgtttggggattttgcctcagctatgggcttccctagagtaggtctaggggaatactcagtctgatcttttttttgtttgttttattttgttttttttgagacggagtctcgctcttcctccaaggctggagtgcagtgacgcgatctccactcactgcaggctccgcctcccgggttcccgccattctcctgcctcagcctcccgagtagccgggactacaggcgcccaccaccatgcccggctaatttagttgtatttttagtagagatggggtttcaccgtattagccaggatggtctcgatctcctgacctcgtgatccgcccgcctcggcctcccaaagtgctgggattacaggcgtgagccaccgtgcccggcctgattctcttaaaattgaagaggtgctgccaaggccttcagatctaacgcagatgcatagaccttgttcctggtacttgttcagcctgtgctggggagccgtggtcccgagttccctgggaggctgacagggtcaagccaccctgcccaccaccctcccacttcccctcccctttcctctccagcattaggattcaagggaaatctgcatgaagccaattttgagggtagacgtgtggggaaaataaatcattatacagtaagacctggggcttgaggggtggggaatggggagggaagggcatagcctgctcctccatgagtctgacatctcggaaatggttcctcagaaagcaccctcagggaaaaaggtgaaaacattacatccgtggattctcctgccacaaccgcattggaagaaaaggctgccgcaacatctcagcgaggagtgaaggacccatgtcccaggaaccgcgctgcgccacctgcactcacccccctcacattctcttaagcacccggtggccctccgaggcctggcggaatggtggtgcccacggggttgggcaagggctcaccaggacctcaacgggcaaagttgtgcacactaaaatatcaaatcaaggtgcttggttttaaagtaaatgtttttctaaagaaagctgtgttcttctgttgacccagacgaatagggcacagccctgtaactgcacgtgccttctgtcattgggaatgaaataaattattacgagaaagggacttgtcctaactggtttgaggccttacagttttgtatctacatttttcccctcctggggtttgcggggacagggacagaactacaggagtcatgggaaagaaaattctggcttcactactgctcactgctcactttctgatcactctgatactttttttttttttttttttgcaacctgataccttgaaaagcttctatgtgtctctccttttgttgcctggcagctgtctaggatgatcactgattactatttactaagtagccacatgcaaataaaagttgtttggtaaaatgga

SEQ ID NO: 415215 - DNA, 4610 bp, Homo sapiens
taaagaggtaatccaagtaaaatgaggtccttagagcaggccctgatccaataggactgtccttattagaagaggaaacttggacacagatacacacagagggagcaccgtgtgaagacacagagaggagatggccagctaccagccaagcagagagcccttactgtaaaccaaccctgccgcatcctgatctcagaattttggcttccagaactgtaaggaaacacatttctactgtttaagccacttggctgggagtacttggttatggcagcctgagcagactaaaccagcacctcaaagagttgttatagggtatgcttagtggtaactggttcctaaaggccttgctttctaaggctgactcctcaccctgcaaggatgcattctccccactggcagatatgcaaccaggaacaggcattaacacgctttattcccagagttttaatattttccattgcataaaatatttgttcatgaaaatgacaaaattgctattagattctatcaccacatctctgttgattttactttctgcaaacacatacaagtaatgtaggcatacagttaaaaatgaaaccttatcctgtagttccagctactagggaggctgaagcaagagaatggcatgaacctgggaggcggagcttgtcgtgagcccagatcaggccactacactccagccggggcaacagagcgcaactccgtctcaaaacaaacaaacaaaacaaaacaaaaaaaacttatagacaagtacaaaatgagaagaaaaagtccctttcccttcatgcctctacttcctgctgtattctcaaaggtaagcactgattacagtttacttatggatctttccaggaaaatattttatgcatttatcagaaaatgtaagtatatgcatcctttaaaattctgcataaatcaaactctgcagggtactatcttcccatcctcatttgatattttgtagatcttttcctattggctgtacagatcacctcattctgtctcctgggtcatacaatatagctcacataattctaagtctgaaggttggtccaaatggttccaagaatgcaggtaccaaaaagtagtctcttgaagaggccatcagagacctggctgtttgtatcttcctcctctgccatccacagtgtcatcttcacccaaggtggctggagaagctgttaggaatatgtggttttttaaaaattacattcataggaaaaggggagggaagagaagaagaaaacctctccccctaagctcatggctctttttagtcaggctgagccaactaaagtcatgtacttcccttagataggtaactgttgccaggaaaatgccctgtgtggattggcctggactaagcaggatcctcctctaaagagagagatgagatgaatgcctgacccaagtctgggatcttgggtgggaagcgtgtggatagtaggtcagaggtcagcagtgtctgtggtgtaggatgtaatcccatctccacagagctgcatacaagtgtgtttaagtgtgtgcaagtgattaactttgattagtagtttcaactctttacaatgaacatatttatcttttttaaaaaataaagccattttaaaagatcttgccataaaacaatcattccttaagtcaccacttaggatagacctagaatatttgtcctttctcaagagcaccagagagttttctggtaatccacgcaataaacagttataaaaggtaattgttgagatcaggggaagatggcagataggaggcagtgctaatgtgtagctcccacatggatggacaaaacaccatgtggagactcacactgtgaccctgttgtgctccaagaactatcataggaacgtactgggaaaaccaaaagaattcacggatcctttgaaagaagacgcacaccactgtaaattctgtggaacaggagaaaaactgtcttggaggaaggcatccttctattctactgatcagaaagctggacaaagtcccactgccaggctacacagttggtgccatttgcggaggtgacctttgacctttaacccacgcggccacccgcccgagctcttacccctgctgcccctcgcgcgtcccactccccgtccctgccggatccgcttccctgcgctgggcccagcgcgccgccagggaaggggccggagcctgggagcccgccccgccgtcgcccgtcctccgcccgcaggcccacccgcagcggtcacgtgaaggaccgagcgccgcgcgcccaggcggggcctccggcctgcacgaggagggcagagtccgttgcggctgccgccccgacgcccgcgcatccccgctcgccgcgcccgccgccgcgatgtccggggccggcctagccgcggtggtgagctgcctgcgcccgcagcccggcgaggagccgcagacccatgagatatttgggttcttggtctggaccatggtagccgccacccacatagtataccccttgctgcaaggatgggtgatgtatgtctcgctcacctcgtttctcatctccttgatgttcctgttgtcttacttgtttggattttacaaaagatttgaatcctggagagttctggacagcctgtaccacgggaccactggcatcctgtacatgagcgctgccgtcctacaagtacatgccacgattgtttctgagaaactgctggacccaagaatttactacattaattcggcagcctcgttcttcgccttcatcgccacgctgctctacattctccatgccttcagcatctattaccactgatgcacaggcgccaggccaagggggaaatgctctttgaaagctccaattattggtccccaaaagcagcttccaacgtttgccatctggatgacaaacggaagatccactaaaacgtccacgggattaacagaacgtccttgcagactgagcgatgacaccacactttgtttggacatttaaattcactctgctgaataggaggaagcttttctttttcctgggaaaacaactgtctcttggaattatctgaccatgaacttgctcttctagacaactcacatcaaagccctcactccactaatggagaatcctagccccactaatgccaagtctgtttggggattttgcctcagctatgggcttccctagagtaggtctaggggaatactcagtctgatcttttttttgtttgttttattttgttttttttgagacggagtctcgctcttcctccaaggctggagtgcagtgacgcgatctccactcactgcaggctccgcctcccgggttcccgccattctcctgcctcagcctcccgagtagccgggactacaggcgcccaccaccatgcccggctaatttagttgtatttttagtagagatggggtttcaccgtattagccaggatggtctcgatctcctgacctcgtgatccgcccgcctcggcctcccaaagtgctgggattacaggcgtgagccaccgtgcccggcctgattctcttaaaattgaagaggtgctgccaaggccttcagatctaacgcagatgcatagaccttgttcctggtacttgttcagcctgtgctggggagccgtggtcccgagttccctgggaggctgacagggtcaagccaccctgcccaccaccctcccacttcccctcccctttcctctccagcattaggattcaagggaaatctgcatgaagccaattttgagggtagacgtgtggggaaaataaatcattatacagtaagacctggggcttgaggggtggggaatggggagggaagggcatagcctgctcctccatgagtctgacatctcggaaactgagcagctgccggacgcctgggtcaggaatccaagaccccacctcttaaggactggttcctcagaaagcaccctcagggaaaaaggtgaaaacattacatccgtggattctcctgccacaaccgcattggaagaaaaggctgccgcaacatctcagcgaggagtgaaggacccatgtcccaggaaccgcgctgcgccacctgcactcacccccctcacattctcttaagcacccggtggccctccgaggcctggcggaatggtggtgcccacggggttgggcaagggctcaccaggacctcaacgggcaaagttgtgcacactaaaatatcaaatcaaggtgcttggttttaaagtaaatgtttttctaaagaaagctgtgttcttctgttgacccagacgaatagggcacagccctgtaactgcacgtgccttctgtcattgggaatgaaataaattattacgagaaagggacttgtcctaactggtttgaggccttacagttttgtatctacatttttcccctcctggggtttgcggggacagggacagaactacaggagtcatgggaaagaaaattctggcttcactactgctcactgctcactttctgatcactctgatactttttttttttttttttttgcaacctgataccttgaaaagcttctatgtgtctctccttttgttgcctggcagctgtctaggatgatcactgattactatttactaagtagccacatgcaaataaaagttgtttggtaaaatgga

SEQ ID NO: 415216 - DNA, 4807 bp, Homo sapiens
taaagaggtaatccaagtaaaatgaggtccttagagcaggccctgatccaataggactgtccttattagaagaggaaacttggacacagatacacacagagggagcaccgtgtgaagacacagagaggagatggccagctaccagccaagcagagagcccttactgtaaaccaaccctgccgcatcctgatctcagaattttggcttccagaactgtaaggaaacacatttctactgtttaagccacttggctgggagtacttggttatggcagcctgagcagactaaaccagcacctcaaagagttgttatagggtatgcttagtggtaactggttcctaaaggccttgctttctaaggctgactcctcaccctgcaaggatgcattctccccactggcagatatgcaaccaggaacaggcattaacacgctttattcccagagttttaatattttccattgcataaaatatttgttcatgaaaatgacaaaattgctattagattctatcaccacatctctgttgattttactttctgcaaacacatacaagtaatgtaggcatacagttaaaaatgaaaccttatcctgtagttccagctactagggaggctgaagcaagagaatggcatgaacctgggaggcggagcttgtcgtgagcccagatcaggccactacactccagccggggcaacagagcgcaactccgtctcaaaacaaacaaacaaaacaaaacaaaaaaaacttatagacaagtacaaaatgagaagaaaaagtccctttcccttcatgcctctacttcctgctgtattctcaaaggtaagcactgattacagtttacttatggatctttccaggaaaatattttatgcatttatcagaaaatgtaagtatatgcatcctttaaaattctgcataaatcaaactctgcagggtactatcttcccatcctcatttgatattttgtagatcttttcctattggctgtacagatcacctcattctgtctcctgggtcatacaatatagctcacataattctaagtctgaaggttggtccaaatggttccaagaatgcaggtaccaaaaagtagtctcttgaagaggccatcagagacctggctgtttgtatcttcctcctctgccatccacagtgtcatcttcacccaaggtggctggagaagctgttaggaatatgtggttttttaaaaattacattcataggaaaaggggagggaagagaagaagaaaacctctccccctaagctcatggctctttttagtcaggctgagccaactaaagtcatgtacttcccttagataggtaactgttgccaggaaaatgccctgtgtggattggcctggactaagcaggatcctcctctaaagagagagatgagatgaatgcctgacccaagtctgggatcttgggtgggaagcgtgtggatagtaggtcagaggtcagcagtgtctgtggtgtaggatgtaatcccatctccacagagctgcatacaagtgtgtttaagtgtgtgcaagtgattaactttgattagtagtttcaactctttacaatgaacatatttatcttttttaaaaaataaagccattttaaaagatcttgccataaaacaatcattccttaagtcaccacttaggatagacctagaatatttgtcctttctcaagagcaccagagagttttctggtaatccacgcaataaacagttataaaaggtaattgttgagatcaggggaagatggcagataggaggcagtgctaatgtgtagctcccacatggatggacaaaacaccatgtggagactcacactgtgaccctgttgtgctccaagaactatcataggaacgtactgggaaaaccaaaagaattcacggatcctttgaaagaagacgcacaccactgtaaattctgtggaacaggagaaaaactgtcttggaggaaggcatccttctattctactgatcagaaagctggacaaagtcccactgccaggctacacagttggtgccatttgcggaggtgacctttgacctttaacccacgcggccacccgcccgagctcttacccctgctgcccctcgcgcgtcccactccccgtccctgccggatccgcttccctgcgctgggcccagcgcgccgccagggaaggggccggagcctgggagcccgccccgccgtcgcccgtcctccgcccgcaggcccacccgcagcggtcacgtgaaggaccgagcgccgcgcgcccaggcggggcctccggcctgcacgaggagggcagagtccgttgcggctgccgccccgacgcccgcgcatccccgctcgccgcgcccgccgccgcgatgtccggggccggcctagccgcggtggtgagctgcctgcgcccgcagcccggcgaggagccgcagacccatgaggaccttctcctggcagctgcctatgttttggatgcccagtacaacagaaatgttccatttgaaactcacctcaggccatcagacgttactatttttataaccactagacaacgcaggttgccgcatacttctttatttgtgtagacctcgctcttgccctgtttgaagagtctgagttgcttcccctgcctttcttgatatttgggttcttggtctggaccatggtagccgccacccacatagtataccccttgctgcaaggatgggtgatgtatgtctcgctcacctcgtttctcatctccttgatgttcctgttgtcttacttgtttggattttacaaaagatttgaatcctggagagttctggacagcctgtaccacgggaccactggcatcctgtacatgagcgctgccgtcctacaagtacatgccacgattgtttctgagaaactgctggacccaagaatttactacattaattcggcagcctcgttcttcgccttcatcgccacgctgctctacattctccatgccttcagcatctattaccactgatgcacaggcgccaggccaagggggaaatgctctttgaaagctccaattattggtccccaaaagcagcttccaacgtttgccatctggatgacaaacggaagatccactaaaacgtccacgggattaacagaacgtccttgcagactgagcgatgacaccacactttgtttggacatttaaattcactctgctgaataggaggaagcttttctttttcctgggaaaacaactgtctcttggaattatctgaccatgaacttgctcttctagacaactcacatcaaagccctcactccactaatggagaatcctagccccactaatgccaagtctgtttggggattttgcctcagctatgggcttccctagagtaggtctaggggaatactcagtctgatcttttttttgtttgttttattttgttttttttgagacggagtctcgctcttcctccaaggctggagtgcagtgacgcgatctccactcactgcaggctccgcctcccgggttcccgccattctcctgcctcagcctcccgagtagccgggactacaggcgcccaccaccatgcccggctaatttagttgtatttttagtagagatggggtttcaccgtattagccaggatggtctcgatctcctgacctcgtgatccgcccgcctcggcctcccaaagtgctgggattacaggcgtgagccaccgtgcccggcctgattctcttaaaattgaagaggtgctgccaaggccttcagatctaacgcagatgcatagaccttgttcctggtacttgttcagcctgtgctggggagccgtggtcccgagttccctgggaggctgacagggtcaagccaccctgcccaccaccctcccacttcccctcccctttcctctccagcattaggattcaagggaaatctgcatgaagccaattttgagggtagacgtgtggggaaaataaatcattatacagtaagacctggggcttgaggggtggggaatggggagggaagggcatagcctgctcctccatgagtctgacatctcggaaactgagcagctgccggacgcctgggtcaggaatccaagaccccacctcttaaggactggttcctcagaaagcaccctcagggaaaaaggtgaaaacattacatccgtggattctcctgccacaaccgcattggaagaaaaggctgccgcaacatctcagcgaggagtgaaggacccatgtcccaggaaccgcgctgcgccacctgcactcacccccctcacattctcttaagcacccggtggccctccgaggcctggcggaatggtggtgcccacggggttgggcaagggctcaccaggacctcaacgggcaaagttgtgcacactaaaatatcaaatcaaggtgcttggttttaaagtaaatgtttttctaaagaaagctgtgttcttctgttgacccagacgaatagggcacagccctgtaactgcacgtgccttctgtcattgggaatgaaataaattattacgagaaagggacttgtcctaactggtttgaggccttacagttttgtatctacatttttcccctcctggggtttgcggggacagggacagaactacaggagtcatgggaaagaaaattctggcttcactactgctcactgctcactttctgatcactctgatactttttttttttttttttttgcaacctgataccttgaaaagcttctatgtgtctctccttttgttgcctggcagctgtctaggatgatcactgattactatttactaagtagccacatgcaaataaaagttgtttggtaaaatgga

SEQ ID NO: 415217 - DNA, 2404 bp, Homo sapiens
ggcaggaggtgatatttgacaggctgcgcgcgggcgagctgccgcggagcacccggcaggggctgacagcatggcctcgcccgacccgcccgccaccagctacgccccgtccgacgtgccctcgggggtcgcgctgttcctcaccatccctttcgccttcttcctgcccgagctgatatttgggttcttggtctggaccatggtagccgccacccacatagtataccccttgctgcaaggatgggtgatgtatgtctcgctcacctcgtttctcatctccttgatgttcctgttgtcttacttgtttggattttacaaaagatttgaatcctggagagttctggacagcctgtaccacgggaccactggcatcctgtacatgagcgctgccgtcctacaagtacatgccacgattgtttctgagaaactgctggacccaagaatttactacattaattcggcagcctcgttcttcgccttcatcgccacgctgctctacattctccatgccttcagcatctattaccactgatgcacaggcgccaggccaagggggaaatgctctttgaaagctccaattattggtccccaaaagcagcttccaacgtttgccatctggatgacaaacggaagatccactaaaacgtccacgggattaacagaacgtccttgcagactgagcgatgacaccacactttgtttggacatttaaattcactctgctgaataggaggaagcttttctttttcctgggaaaacaactgtctcttggaattatctgaccatgaacttgctcttctagacaactcacatcaaagccctcactccactaatggagaatcctagccccactaatgccaagtctgtttggggattttgcctcagctatgggcttccctagagtaggtctaggggaatactcagtctgatcttttttttgtttgttttattttgttttttttgagacggagtctcgctcttcctccaaggctggagtgcagtgacgcgatctccactcactgcaggctccgcctcccgggttcccgccattctcctgcctcagcctcccgagtagccgggactacaggcgcccaccaccatgcccggctaatttagttgtatttttagtagagatggggtttcaccgtattagccaggatggtctcgatctcctgacctcgtgatccgcccgcctcggcctcccaaagtgctgggattacaggcgtgagccaccgtgcccggcctgattctcttaaaattgaagaggtgctgccaaggccttcagatctaacgcagatgcatagaccttgttcctggtacttgttcagcctgtgctggggagccgtggtcccgagttccctgggaggctgacagggtcaagccaccctgcccaccaccctcccacttcccctcccctttcctctccagcattaggattcaagggaaatctgcatgaagccaattttgagggtagacgtgtggggaaaataaatcattatacagtaagacctggggcttgaggggtggggaatggggagggaagggcatagcctgctcctccatgagtctgacatctcggaaactgagcagctgccggacgcctgggtcaggaatccaagaccccacctcttaaggactggttcctcagaaagcaccctcagggaaaaaggtgaaaacattacatccgtggattctcctgccacaaccgcattggaagaaaaggctgccgcaacatctcagcgaggagtgaaggacccatgtcccaggaaccgcgctgcgccacctgcactcacccccctcacattctcttaagcacccggtggccctccgaggcctggcggaatggtggtgcccacggggttgggcaagggctcaccaggacctcaacgggcaaagttgtgcacactaaaatatcaaatcaaggtgcttggttttaaagtaaatgtttttctaaagaaagctgtgttcttctgttgacccagacgaatagggcacagccctgtaactgcacgtgccttctgtcattgggaatgaaataaattattacgagaaagggaaaaaaaaaaaaaaaaaaaaaaaaaaaaaaaaaaaaaaaaaaaaaaaaaaaaaagggggggggggtaaaaatattcggggggggccaccaattttttagcactcacccgttttgttgtaaaaaggggggccccaataaggaggacgtatataaaaacagagagacgggggcgtcgttaaaacagtgtggcgagtggaacgaagtgctttgtggcttctttggagaagaccatcttgtgtgggtgccaatatttggacccacccacagagaattacgccggggcaactaaactctgtgttggggtgaacgacccgtatgtcgcggtggagagtgggtcgctaattagag

SEQ ID NO: 415218 - DNA, 1560 bp, Homo sapiens
ccctgggtcaggaatccaagaccccacctcttaaggacggttcctcagaaagccccactaatgccaagtctgtttggggattttgcctcagctatgggcttccctagagtaggtctaggggaatactcagtctgatcttttttttgtttgttttattttgttttttttgagacggagtctcgctcttcctccaaggctggagtgcagtgacgcgatctccactcactgcaggctccgcctcccgggttcccgccattctcctgcctcagcctcccgagtagccgggactacaggcgcccaccaccatgcccggctaatttagttgtatttttagtagagatggggtttcaccgtattagccaggatggtctcgatctcctgacctcgtgatccgcccgcctcggcctcccaaagtgctgggattacaggcgtgagccaccgtgcccggcctgattctcttaaaattgaagaggtgctgccaaggccttcagatctaacgcagatgcatagaccttgttcctggtacttgttcagcctgtgctggggagccgtggtcccgagttccctgggaggctgacagggtcaagccaccctgcccaccaccctcccacttcccctcccctttcctctccagcattaggattcaagggaaatctgcatgaagccaattttgagggtagacgtgtggggaaaataaatcattatacagtaagacctggggcttgaggggtggggaatggggagggaagggcatagcctgctcctccatgagtctgacatctcggaaactgagcagctgccggacgcctgggtcaggaatccaagaccccacctcttaaggactggttcctcagaaagcaccctcagggaaaaaggtgaaaacattacatccgtggattctcctgccacaaccgcattggaagaaaaggctgccgcaacatctcagcgaggagtgaaggacccatgtcccaggaaccgcgctgcgccacctgcactcacccccctcacattctcttaagcacccggtggccctccgaggcctggcggaatggtggtgcccacggggttgggcaagggctcaccaggacctcaacgggcaaagttgtgcacactaaaatatcaaatcaaggtgcttggttttaaagtaaatgtttttctaaagaaagctgtgttcttctgttgacccagacgaatagggcacagccctgtaactgcacgtgccttctgtcattgggaatgaaataaattattacgagaaagggacttgtcctaactggtttgaggccttacagttttgtatctacatttttcccctcctggggtttgcggggacagggacagaactacaggagtcatgggaaagaaaattctggcttcactactgctcactgctcactttctgatcactctgatactttttttttttttttttttgcaacctgataccttgaaaagcttctatgtgtctctccttttgttgcctggcagctgtctaggatgatcactgattactatttactaagtagccacatgcaaataaaagttgtttggtaaaatgga

SEQ ID NO: 415219 - DNA, 1644 bp, Homo sapiens
ccctgtccctttccctctcccctcctgggacagactccaggggaggaagcgctgtctcttggaattatctgaccatgaacttgctcttctagacaactcacatcaaagccctcactccactaatggagaatcctagccccactaatgccaagtctgtttggggattttgcctcagctatgggcttccctagagtaggtctaggggaatactcagtctgatcttttttttgtttgttttattttgttttttttgagacggagtctcgctcttcctccaaggctggagtgcagtgacgcgatctccactcactgcaggctccgcctcccgggttcccgccattctcctgcctcagcctcccgagtagccgggactacaggcgcccaccaccatgcccggctaatttagttgtatttttagtagagatggggtttcaccgtattagccaggatggtctcgatctcctgacctcgtgatccgcccgcctcggcctcccaaagtgctgggattacaggcgtgagccaccgtgcccggcctgattctcttaaaattgaagaggtgctgccaaggccttcagatctaacgcagatgcatagaccttgttcctggtacttgttcagcctgtgctggggagccgtggtcccgagttccctgggaggctgacagggtcaagccaccctgcccaccaccctcccacttcccctcccctttcctctccagcattaggattcaagggaaatctgcatgaagccaattttgagggtagacgtgtggggaaaataaatcattatacagtaagacctggggcttgaggggtggggaatggggagggaagggcatagcctgctcctccatgagtctgacatctcggaaactgagcagctgccggacgcctgggtcaggaatccaagaccccacctcttaaggactggttcctcagaaagcaccctcagggaaaaaggtgaaaacattacatccgtggattctcctgccacaaccgcattggaagaaaaggctgccgcaacatctcagcgaggagtgaaggacccatgtcccaggaaccgcgctgcgccacctgcactcacccccctcacattctcttaagcacccggtggccctccgaggcctggcggaatggtggtgcccacggggttgggcaagggctcaccaggacctcaacgggcaaagttgtgcacactaaaatatcaaatcaaggtgcttggttttaaagtaaatgtttttctaaagaaagctgtgttcttctgttgacccagacgaatagggcacagccctgtaactgcacgtgccttctgtcattgggaatgaaataaattattacgagaaagggacttgtcctaactggtttgaggccttacagttttgtatctacatttttcccctcctggggtttgcggggacagggacagaactacaggagtcatgggaaagaaaattctggcttcactactgctcactgctcactttctgatcactctgatactttttttttttttttttttgcaacctgataccttgaaaagcttctatgtgtctctccttttgttgcctggcagctgtctaggatgatcactgattactatttactaagtagccacatgcaaataaaagttgtttggtaaaatgga

SEQ ID NO: 415220 - DNA, 1293 bp, Homo sapiens
gtcaggagttcaagaccagcctggccaacgtggtgaaagcctgtatctaatttagttgtatttttagtagagatggggtttcaccgtattagccaggatggtctcgatctcctgacctcgtgatccgcccgcctcggcctcccaaagtgctgggattacaggcgtgagccaccgtgcccggcctgattctcttaaaattgaagaggtgctgccaaggccttcagatctaacgcagatgcatagaccttgttcctggtacttgttcagcctgtgctggggagccgtggtcccgagttccctgggaggctgacagggtcaagccaccctgcccaccaccctcccacttcccctcccctttcctctccagcattaggattcaagggaaatctgcatgaagccaattttgagggtagacgtgtggggaaaataaatcattatacagtaagacctggggcttgaggggtggggaatggggagggaagggcatagcctgctcctccatgagtctgacatctcggaaactgagcagctgccggacgcctgggtcaggaatccaagaccccacctcttaaggactggttcctcagaaagcaccctcagggaaaaaggtgaaaacattacatccgtggattctcctgccacaaccgcattggaagaaaaggctgccgcaacatctcagcgaggagtgaaggacccatgtcccaggaaccgcgctgcgccacctgcactcacccccctcacattctcttaagcacccggtggccctccgaggcctggcggaatggtggtgcccacggggttgggcaagggctcaccaggacctcaacgggcaaagttgtgcacactaaaatatcaaatcaaggtgcttggttttaaagtaaatgtttttctaaagaaagctgtgttcttctgttgacccagacgaatagggcacagccctgtaactgcacgtgccttctgtcattgggaatgaaataaattattacgagaaagggacttgtcctaactggtttgaggccttacagttttgtatctacatttttcccctcctggggtttgcggggacagggacagaactacaggagtcatgggaaagaaaattctggcttcactactgctcactgctcactttctgatcactctgatactttttttttttttttttttgcaacctgataccttgaaaagcttctatgtgtctctccttttgttgcctggcagctgtctaggatgatcactgattactatttactaagtagccacatgcaaataaaagttgtttggtaaaatgga

SEQ ID NO: 415221 - DNA, 2190 bp, Homo sapiens
ggcaggaggtgatatttgacaggctgcgcgcgggcgagctgccgcggagcacccggcaggggctgacagcatggcctcgcccgacccgcccgccaccagctacgccccgtccgacgtgccctcgggggtcgcgctgttcctcaccatccctttcgccttcttcctgcccgagctgatatttgggttcttggtctggaccatggtagccgccacccacatagtataccccttgctgcaaggatgggtgatgtatgtctcgctcacctcgtttctcatctccttgatgttcctgttgtcttacttgtttggattttacaaaagatttgaatcctggagagttctggacagcctgtaccacgggaccactggcatcctgtacatgagcgctgccgtcctacaagtacatgccacgattgtttctgagaaactgctggacccaagaatttactacattaattcggcagcctcgttcttcgccttcatcgccacgctgctctacattctccatgccttcagcatctattaccactgatgcacaggcgccaggccaagggggaaatgctctttgaaagctccaattattggtccccaaaagcagcttccaacgtttgccatctggatgacaaacggaagatccactaaaacgtccacgggattaacagaacgtccttgcagactgagcgatgacaccacactttgtttggacatttaaattcactctgctgaataggaggaagcttttctttttcctgggaaaacaactgtctcttggaattatctgaccatgaacttgctcttctagacaactcacatcaaagccctcactccactaatggagaatcctagccccactaatgccaagtctgtttggggattttgcctcagctatgggcttccctagagtaggtctaggggaatactcagtctgatcttttttttgtttgttttattttgttttttttgagacggagtctcgctcttcctccaaggctggagtgcagtgacgcgatctccactcactgcaggctccgcctcccgggttcccgccattctcctgcctcagcctcccgagtagccgggactacaggcgcccaccaccatgcccggctaatttagttgtatttttagtagagatggggtttcaccgtattagccaggatggtctcgatctcctgacctcgtgatccgcccgcctcggcctcccaaagtgctgggattacaggcgtgagccaccgtgcccggcctgattctcttaaaattgaagaggtgctgccaaggccttcagatctaacgcagatgcatagaccttgttcctggtacttgttcagcctgtgctggggagccgtggtcccgagttccctgggaggctgacagggtcaagccaccctgcccaccaccctcccacttcccctcccctttcctctccagcattaggattcaagggaaatctgcatgaagccaattttgagggtagacgtgtggggaaaataaatcattatacagtaagacctggggcttgaggggtggggaatggggagggaagggcatagcctgctcctccatgagtctgacatctcggaaactgagcagctgccggacgcctgggtcaggaatccaagaccccacctcttaaggactggttcctcagaaagcaccctcagggaaaaaggtgaaaacattacatccgtggattctcctgccacaaccgcattggaagaaaaggctgccgcaacatctcagcgaggagtgaaggacccatgtcccaggaaccgcgctgcgccacctgcactcacccccctcacattctcttaagcacccggtggccctccgaggcctggcggaatggcgcatctctgtcacacccggggagaagatcatcctgaacttcacgtccctggacctgtaccgcagccgcctgtgctggtacgactatgtggaggtccgagatggcttctggaggaaggcgcccctccgaggccgcctctgcgggtccaaactccctgagcctatcgtctccactgacagccgcctctgggttgtattccgcagcagcagcaattgggttggaaagggcttctttgcagtctacgaagccatctgcgggggtgatgtgaaaaaggactatggccacattcaatcgcccaactacccagacgatagccggcccagcaaagtctgcatcagcggtgc

SEQ ID NO: 415222 - DNA, 3048 bp, Homo sapiens
taaagaggtaatccaagtaaaatgaggtccttagagcaggccctgatccaataggactgtccttattagaagaggaaacttggacacagatacacacagagggagcaccgtgtgaagacacagagaggagatggccagctaccagccaagcagagagcccttactgtaaaccaaccctgccgcatcctgatctcagaattttggcttccagaactgtaaggaaacacatttctactgtttaagccacttggctgggagtacttggttatggcagcctgagcagactaaaccagcacctcaaagagttgttatagggtatgcttagtggtaactggttcctaaaggccttgctttctaaggctgactcctcaccctgcaaggatgcattctccccactggcagatatgcaaccaggaacaggcattaacacgctttattcccagagttttaatattttccattgcataaaatatttgttcatgaaaatgacaaaattgctattagattctatcaccacatctctgttgattttactttctgcaaacacatacaagtaatgtaggcatacagttaaaaatgaaaccttatcctgtagttccagctactagggaggctgaagcaagagaatggcatgaacctgggaggcggagcttgtcgtgagcccagatcaggccactacactccagccggggcaacagagcgcaactccgtctcaaaacaaacaaacaaaacaaaacaaaaaaaacttatagacaagtacaaaatgagaagaaaaagtccctttcccttcatgcctctacttcctgctgtattctcaaaggtaagcactgattacagtttacttatggatctttccaggaaaatattttatgcatttatcagaaaatgtaagtatatgcatcctttaaaattctgcataaatcaaactctgcagggtactatcttcccatcctcatttgatattttgtagatcttttcctattggctgtacagatcacctcattctgtctcctgggtcatacaatatagctcacataattctaagtctgaaggttggtccaaatggttccaagaatgcaggtaccaaaaagtagtctcttgaagaggccatcagagacctggctgtttgtatcttcctcctctgccatccacagtgtcatcttcacccaaggtggctggagaagctgttaggaatatgtggttttttaaaaattacattcataggaaaaggggagggaagagaagaagaaaacctctccccctaagctcatggctctttttagtcaggctgagccaactaaagtcatgtacttcccttagataggtaactgttgccaggaaaatgccctgtgtggattggcctggactaagcaggatcctcctctaaagagagagatgagatgaatgcctgacccaagtctgggatcttgggtgggaagcgtgtggatagtaggtcagaggtcagcagtgtctgtggtgtaggatgtaatcccatctccacagagctgcatacaagtgtgtttaagtgtgtgcaagtgattaactttgattagtagtttcaactctttacaatgaacatatttatcttttttaaaaaataaagccattttaaaagatcttgccataaaacaatcattccttaagtcaccacttaggatagacctagaatatttgtcctttctcaagagcaccagagagttttctggtaatccacgcaataaacagttataaaaggtaattgttgagatcaggggaagatggcagataggaggcagtgctaatgtgtagctcccacatggatggacaaaacaccatgtggagactcacactgtgaccctgttgtgctccaagaactatcataggaacgtactgggaaaaccaaaagaattcacggatcctttgaaagaagacgcacaccactgtaaattctgtggaacaggagaaaaactgtcttggaggaaggcatccttctattctactgatcagaaagctggacaaagtcccactgccaggctacacagttggtgccatttgcggaggtgacctttgacctttaacccacgcggccacccgcccgagctcttacccctgctgcccctcgcgcgtcccactccccgtccctgccggatccgcttccctgcgctgggcccagcgcgccgccagggaaggggccggagcctgggagcccgccccgccgtcgcccgtcctccgcccgcaggcccacccgcagcggtcacgtgaaggaccgagcgccgcgcgcccaggcggggcctccggcctgcacgaggagggcagagtccgttgcggctgccgccccgacgcccgcgcatccccgctcgccgcgcccgccgccgcgatgtccggggccggcctagccgcggtggtgagctgcctgcgcccgcagcccggcgaggagccgcagacccatgagacgttactatttttataaccactagacaacgcaggttgccgcatacttctttatttgtgtagacctcgctcttgccctgtttgaagagtctgagttgcttcccctgcctttcttggccacctcaatagcagaagtactctgcctgactgcatactttggcagactggtacattttgcaaaagtcactcctcaaatggttttctggaaggatacaaaagacatctgcaccatggtaaccacagtggcgagtgttcattgtagtacctgtaagagtttatgaccgaaggcaggagccatgaagaaaaaagactcaatagatttgcttttgatgaaacaacaacacttccatacagtgaacgccataagcacaactgcaagcaaaccgcaaactgaagaacaaatagggcaaaatgtggcagtgcagacatttcagcatatcaagagcacttccaaattacaggaaaaaaaagatatctcaatagataattttgctgaagataagtgaaggcaactcataaggaaaaaatatgtaaaatggccgataggaaagatgtttaacgtcactaattaaaaattatagaataaaacgacaataaaataccatgtgtttgcctata

SEQ ID NO: 415223 - DNA, 785 bp, Homo sapiens
ggcaggaggtgatatttgacaggctgcgcgcgggcgagctgccgcggagcacccggcaggggctgacagcatggcctcgcccgacccgcccgccaccagctacgccccgtccgacgtgccctcgggggtcgcgctgttcctcaccatccctttcgccttcttcctgcccgagctgatatttgggttcttggtctggaccatggtagccgccacccacatagtatacccctcacattctcttaagcacccggtggccctccgaggcctggcggaatggtggtgcccacggggttgggcaagggctcaccaggacctcaacgggcaaagttgtgcacactaaaatatcaaatcaaggtgcttggttttaaagtaaatgtttttctaaagaaagctgtgttcttctgttgacccagacgaatagggcacagccctgtaactgcacgtgccttctgtcattgggaatgaaataaattattacgagaaagggacttgtcctaactggtttgaggccttacagttttgtatctacatttttcccctcctggggtttgcggggacagggacagaactacaggagtcatgggaaagaaaattctggcttcactactgctcactgctcactttctgatcactctgatactttttttttttttttttttgcaacctgataccttgaaaagcttctatgtgtctctccttttgttgcctggcagctgtctaggatgatcactgattactatttactaagtagccacatgcaaataaaagttgtttggtaaaatgga

SEQ ID NO: 415224 - DNA, 3319 bp, Homo sapiens
taaagaggtaatccaagtaaaatgaggtccttagagcaggccctgatccaataggactgtccttattagaagaggaaacttggacacagatacacacagagggagcaccgtgtgaagacacagagaggagatggccagctaccagccaagcagagagcccttactgtaaaccaaccctgccgcatcctgatctcagaattttggcttccagaactgtaaggaaacacatttctactgtttaagccacttggctgggagtacttggttatggcagcctgagcagactaaaccagcacctcaaagagttgttatagggtatgcttagtggtaactggttcctaaaggccttgctttctaaggctgactcctcaccctgcaaggatgcattctccccactggcagatatgcaaccaggaacaggcattaacacgctttattcccagagttttaatattttccattgcataaaatatttgttcatgaaaatgacaaaattgctattagattctatcaccacatctctgttgattttactttctgcaaacacatacaagtaatgtaggcatacagttaaaaatgaaaccttatcctgtagttccagctactagggaggctgaagcaagagaatggcatgaacctgggaggcggagcttgtcgtgagcccagatcaggccactacactccagccggggcaacagagcgcaactccgtctcaaaacaaacaaacaaaacaaaacaaaaaaaacttatagacaagtacaaaatgagaagaaaaagtccctttcccttcatgcctctacttcctgctgtattctcaaaggtaagcactgattacagtttacttatggatctttccaggaaaatattttatgcatttatcagaaaatgtaagtatatgcatcctttaaaattctgcataaatcaaactctgcagggtactatcttcccatcctcatttgatattttgtagatcttttcctattggctgtacagatcacctcattctgtctcctgggtcatacaatatagctcacataattctaagtctgaaggttggtccaaatggttccaagaatgcaggtaccaaaaagtagtctcttgaagaggccatcagagacctggctgtttgtatcttcctcctctgccatccacagtgtcatcttcacccaaggtggctggagaagctgttaggaatatgtggttttttaaaaattacattcataggaaaaggggagggaagagaagaagaaaacctctccccctaagctcatggctctttttagtcaggctgagccaactaaagtcatgtacttcccttagataggtaactgttgccaggaaaatgccctgtgtggattggcctggactaagcaggatcctcctctaaagagagagatgagatgaatgcctgacccaagtctgggatcttgggtgggaagcgtgtggatagtaggtcagaggtcagcagtgtctgtggtgtaggatgtaatcccatctccacagagctgcatacaagtgtgtttaagtgtgtgcaagtgattaactttgattagtagtttcaactctttacaatgaacatatttatcttttttaaaaaataaagccattttaaaagatcttgccataaaacaatcattccttaagtcaccacttaggatagacctagaatatttgtcctttctcaagagcaccagagagttttctggtaatccacgcaataaacagttataaaaggtaattgttgagatcaggggaagatggcagataggaggcagtgctaatgtgtagctcccacatggatggacaaaacaccatgtggagactcacactgtgaccctgttgtgctccaagaactatcataggaacgtactgggaaaaccaaaagaattcacggatcctttgaaagaagacgcacaccactgtaaattctgtggaacaggagaaaaactgtcttggaggaaggcatccttctattctactgatcagaaagctggacaaagtcccactgccaggctacacagttggtgccatttgcggaggtgacctttgacctttaacccacgcggccacccgcccgagctcttacccctgctgcccctcgcgcgtcccactccccgtccctgccggatccgcttccctgcgctgggcccagcgcgccgccagggaaggggccggagcctgggagcccgccccgccgtcgcccgtcctccgcccgcaggcccacccgcagcggtcacgtgaaggaccgagcgccgcgcgcccaggcggggcctccggcctgcacgaggagggcagagtccgttgcggctgccgccccgacgcccgcgcatccccgctcgccgcgcccgccgccgcgatgtccggggccggcctagccgcggtggtgagctgcctgcgcccgcagcccggcgaggagccgcagacccatgaggaccttctcctggcagctgcctatgttttggatgcccagtacaacagaaatgttccatttgaaactcacctcaggccatcagacgttactatttttataaccactagacaacgcaggttgccgcatacttctttatttgtgtagacctcgctcttgccctgtttgaagagtctgagttgcttcccctgcctttcttgatatttgggttcttggtctggaccatggtagccgccacccacatagtataccccttgctgcaaggatgggtgatgtatgtctcgctcacctcgtttctcatctccttgatgttcctgttgtcttacttgtttggattttacaaaagatttgaatcctggagagttctggacagcctgtaccacgggaccactggcatcctgtacatgagcgctgccgtcctacaagtacatgccacgattgtttctgagaaactgctggacccaagaatttactacattaattcggcagcctcgttcttcgccttcatcgccacgctgctctacattctcctgccacaaccgcattggaagaaaaggctgccgcaacatctcagcgaggagtgaaggacccatgtcccaggaaccgcgctgcgccacctgcactcacccccctcacattctcttaagcacccggtggccctccgaggcctggcggaatggtggtgcccacggggttgggcaagggctcaccaggacctcaacgggcaaagttgtgcacactaaaatatcaaatcaaggtgcttggttttaaagtaaatgtttttctaaagaaagctgtgttcttctgttgacccagacgaatagggcacagccctgtaactgcacgtgccttctgtcattgggaatgaaataaattattacgagaaaggga

SEQ ID NO: 415225 - DNA, 3412 bp, Homo sapiens
taaagaggtaatccaagtaaaatgaggtccttagagcaggccctgatccaataggactgtccttattagaagaggaaacttggacacagatacacacagagggagcaccgtgtgaagacacagagaggagatggccagctaccagccaagcagagagcccttactgtaaaccaaccctgccgcatcctgatctcagaattttggcttccagaactgtaaggaaacacatttctactgtttaagccacttggctgggagtacttggttatggcagcctgagcagactaaaccagcacctcaaagagttgttatagggtatgcttagtggtaactggttcctaaaggccttgctttctaaggctgactcctcaccctgcaaggatgcattctccccactggcagatatgcaaccaggaacaggcattaacacgctttattcccagagttttaatattttccattgcataaaatatttgttcatgaaaatgacaaaattgctattagattctatcaccacatctctgttgattttactttctgcaaacacatacaagtaatgtaggcatacagttaaaaatgaaaccttatcctgtagttccagctactagggaggctgaagcaagagaatggcatgaacctgggaggcggagcttgtcgtgagcccagatcaggccactacactccagccggggcaacagagcgcaactccgtctcaaaacaaacaaacaaaacaaaacaaaaaaaacttatagacaagtacaaaatgagaagaaaaagtccctttcccttcatgcctctacttcctgctgtattctcaaaggtaagcactgattacagtttacttatggatctttccaggaaaatattttatgcatttatcagaaaatgtaagtatatgcatcctttaaaattctgcataaatcaaactctgcagggtactatcttcccatcctcatttgatattttgtagatcttttcctattggctgtacagatcacctcattctgtctcctgggtcatacaatatagctcacataattctaagtctgaaggttggtccaaatggttccaagaatgcaggtaccaaaaagtagtctcttgaagaggccatcagagacctggctgtttgtatcttcctcctctgccatccacagtgtcatcttcacccaaggtggctggagaagctgttaggaatatgtggttttttaaaaattacattcataggaaaaggggagggaagagaagaagaaaacctctccccctaagctcatggctctttttagtcaggctgagccaactaaagtcatgtacttcccttagataggtaactgttgccaggaaaatgccctgtgtggattggcctggactaagcaggatcctcctctaaagagagagatgagatgaatgcctgacccaagtctgggatcttgggtgggaagcgtgtggatagtaggtcagaggtcagcagtgtctgtggtgtaggatgtaatcccatctccacagagctgcatacaagtgtgtttaagtgtgtgcaagtgattaactttgattagtagtttcaactctttacaatgaacatatttatcttttttaaaaaataaagccattttaaaagatcttgccataaaacaatcattccttaagtcaccacttaggatagacctagaatatttgtcctttctcaagagcaccagagagttttctggtaatccacgcaataaacagttataaaaggtaattgttgagatcaggggaagatggcagataggaggcagtgctaatgtgtagctcccacatggatggacaaaacaccatgtggagactcacactgtgaccctgttgtgctccaagaactatcataggaacgtactgggaaaaccaaaagaattcacggatcctttgaaagaagacgcacaccactgtaaattctgtggaacaggagaaaaactgtcttggaggaaggcatccttctattctactgatcagaaagctggacaaagtcccactgccaggctacacagttggtgccatttgcggaggtgacctttgacctttaacccacgcggccacccgcccgagctcttacccctgctgcccctcgcgcgtcccactccccgtccctgccggatccgcttccctgcgctgggcccagcgcgccgccagggaaggggccggagcctgggagcccgccccgccgtcgcccgtcctccgcccgcaggcccacccgcagcggtcacgtgaaggaccgagcgccgcgcgcccaggcggggcctccggcctgcacgaggagggcagagtccgttgcggctgccgccccgacgcccgcgcatccccgctcgccgcgcccgccgccgcgatgtccggggccggcctagccgcggtggtgagctgcctgcgcccgcagcccggcgaggagccgcagacccatgaggaccttctcctggcagctgcctatgttttggatgcccagtacaacagaaatgttccatttgaaactcacctcaggccatcagacgttactatttttataaccactagacaacgcaggttgccgcatacttctttatttgtgtagacctcgctcttgccctgtttgaagagtctgagttgcttcccctgcctttcttggccacctcaatagcagaagtactctgcctgactgcatactttggcagactggtacattttgcaaaagtcactcctcaaatggttttctggaaggatacaaaagacatctgcaccatggtaaccacagtggcgagtgttcattgtagtacctgtaagagtttatgaccgaaggcaggagccatgaagaaaaaagactcaatagatttgcttttgatgaaacaacaacacttccatacagtgaacgccataagcacaactgcaagcaaaccgcaaactgaagaacaaatagggcaaaatgtggcagtgcagacatttcagcatatcaagagcacttccaaattacaggaaaaaaaagatatctcaatagataattttgctgaagataagtgaaggcaactcataaggaaaaaatatgtaaaatggccgataggaaagatgtttaacgtcactaattaaaaattatagaataaaacgacaataaaataccatgtgtttgcctataaaacaatcttagcaagattgaaaacaaactttttgtaatttccaatttttagtttagattcaggtggtacatgtgcaggtttgttacatgggtatatttcgtgatggtgaggtttggggtacaactgatcccatcactcaggtagtgagcctagaatccagcaggtagtttttcaacccttcccctcctctgtcccttcccctcaggaatccccagtgtctactgttgccatctttgtgtccatgagtacccagtgtttagctcctacttataagtgacaac

SEQ ID NO: 415226 - DNA, 1842 bp, Homo sapiens
  misc_feature (1007)..(1007): n is a, c, g, or t
  misc_feature (1048)..(1048): n is a, c, g, or t
  misc_feature (1314)..(1314): n is a, c, g, or t
cccgggtcttacaggagcagcctgtgggcaccgcggcggtagttggaggcgggagagggtccgtagccgcgccgccctgccccgccatgggcctcctgtcggacccggttcgccggcgcgcgctcgcccgcctagtgctgcgcctcaacgcgccgttgtgcgtgctgagctacgtggcgggcatcgcctggttcttggcgctggttttcccgccgctgacccagcgcacttacatgtcggagaacgccatgggctccaccatggtggaggagcagtttgcgggcggagaccgtgcccgggcttttgcccgggacttcgccgcccaccgcaagaagtcgggggctctgccagtggcctggcttgaacggacgatgcggtcagtagggctggaggtctacacgcagagtttctcccggaaactgcccttcccagatgagacccacgagcgctatatggtgtcgggcaccaacgtgtacggcatcctgcgggccccgcgtgctgccagcaccgagtcgcttgtgctcaccgtgccctgtggctctgactctaccaacagccaggctgtggggctgctgctggcactggctgcccacttccgggggcagatttattgggccaaagatatcgtcttcctggtaacagaacatgaccttctgggcactgaggcttggcttgaagcctaccacgatgtcaatgtcactggcatgcagtcgtctcccctgcagggccgagctggggccattcaggcagccgtggccctggagctgagcagtgatgtggtcaccagcctcgatgtggccgtggaggggcttaacgggcagctgcccaaccttgacctgctcaatctcttccagaccttctgccagaaagtgggcctgttgtgcacgcttcagggcaagctgcagcccgaggactggacattgttggacgaactgctgcagggcctgcaaacactgctgctcatgattttgtggcaggcttcccgtggcctcttcctgcactaccangtggaggccctaaccctgcgtcgcatcagtagcttccgccngtacaagtatgacctggtggcagcgggcaaggctttggagggcatgttctgcaagctcaaccacctcctggaacacccgcaccagctgttcttcctctacctgctccccactctgtcccgcttcgtctccatcggcctctacatgcccgccaccagcttcttgctcctggtccttggtttcaaggctctgcaactgtggatgcagctgcatgaggccggagtgggccttgaggagctcaggggggtccctgaccctagtgtccccnctcccccagcacaggatggtaagcacacaggtcccagacaggggctggatggctctgaagctggtagccctgatctacctaatactgcagctgggctgcatcgccctcaccaacttctgactggacttcctgctggccgccactatggtgctgccgctgtgctcgccgagcctttgggccctggaccctctgtgctgccctgctggtgttgacaagcccggcagccacgctccttggcagcccattcctgtggcgggagctgcaggaggcaccactgtcactggccaagggctggcagctcttcctggcagcactggcccagggtgcgctggagcaccacacctaaggcgccctgctcttcccactgctgtccctgggcctctgcccttgctgactacttttctggaatgtgctcttctggaagtgagatctgcctgtccggggcaccaggctgggacagagactccccaaggaccccattctgcctccttctggggaaataaacaagtgcctgtttcagctgcttta

SEQ ID NO: 415227 - DNA, 1907 bp, Homo sapiens
  misc_feature (1007)..(1007): n is a, c, g, or t
  misc_feature (1048)..(1048): n is a, c, g, or t
  misc_feature (1314)..(1314): n is a, c, g, or t
cccgggtcttacaggagcagcctgtgggcaccgcggcggtagttggaggcgggagagggtccgtagccgcgccgccctgccccgccatgggcctcctgtcggacccggttcgccggcgcgcgctcgcccgcctagtgctgcgcctcaacgcgccgttgtgcgtgctgagctacgtggcgggcatcgcctggttcttggcgctggttttcccgccgctgacccagcgcacttacatgtcggagaacgccatgggctccaccatggtggaggagcagtttgcgggcggagaccgtgcccgggcttttgcccgggacttcgccgcccaccgcaagaagtcgggggctctgccagtggcctggcttgaacggacgatgcggtcagtagggctggaggtctacacgcagagtttctcccggaaactgcccttcccagatgagacccacgagcgctatatggtgtcgggcaccaacgtgtacggcatcctgcgggccccgcgtgctgccagcaccgagtcgcttgtgctcaccgtgccctgtggctctgactctaccaacagccaggctgtggggctgctgctggcactggctgcccacttccgggggcagatttattgggccaaagatatcgtcttcctggtaacagaacatgaccttctgggcactgaggcttggcttgaagcctaccacgatgtcaatgtcactggcatgcagtcgtctcccctgcagggccgagctggggccattcaggcagccgtggccctggagctgagcagtgatgtggtcaccagcctcgatgtggccgtggaggggcttaacgggcagctgcccaaccttgacctgctcaatctcttccagaccttctgccagaaagtgggcctgttgtgcacgcttcagggcaagctgcagcccgaggactggacattgttggacgaactgctgcagggcctgcaaacactgctgctcatgattttgtggcaggcttcccgtggcctcttcctgcactaccangtggaggccctaaccctgcgtcgcatcagtagcttccgccngtacaagtatgacctggtggcagcgggcaaggctttggagggcatgttctgcaagctcaaccacctcctggaacacccgcaccagctgttcttcctctacctgctccccactctgtcccgcttcgtctccatcggcctctacatgcccgccaccagcttcttgctcctggtccttggtttcaaggctctgcaactgtggatgcagctgcatgaggccggagtgggccttgaggagctcaggggggtccctgaccctagtgtccccnctcccccagcacaggatggtaagcacacaggtcccagacaggggctggatggctctgaagctggtagccctgatctacctaatactgcagctgggctgcatcgccctcaccaacttctgactggacttcctgctggccgccactatggtgctgccgctgtgctcgccgagcctttgggccctggaccctctgtgctgccctgctggtgttgacaagcccggcagccacgctccttggcagcccattcctgtggcgggagctgcaggaggcaccactgtcactggccaagggctggcagctcttcctggcagcactggcccagggtgcgctggagcaccacacctaaggcgccctgctcttcccactgctgtccctgggcctctgcccttgctgactacttttctggaatgtgctcttctggaagtgagatctgcctgtccggggcaccaggctgggacagagactccccaaggaccccattctgcctccttctggggaaataaacaagtgcctgtttcagctgctttaaaaaaaaatagaaaaaaaaaatgccctggaaaatactgtgttagcaaaaagatttaaagattggt

SEQ ID NO: 415228 - DNA, 484 bp, Homo sapiens
agagtgagctggtaccgatattgaagagtgtggacaggtatgatatcatcacggtgcttggttttaaagtaaatgtttttctaaagaaagctgtgttcttctgttgacccagacgaatagggcacagccctgtaactgcacgtgccttctgtcattgggaatgaaataaattattacgagaaagggacttgtcctaactggtttgaggccttacagttttgtatctacatttttcccctcctggggtttgcggggacagggacagaactacaggagtcatgggaaagaaaattctggcttcactactgctcactgctcactttctgatcactctgatactttttttttttttttttttgcaacctgataccttgaaaagcttctatgtgtctctccttttgttgcctggcagctgtctaggatgatcactgattactatttactaagtagccacatgcaaataaaagttgtttggtaaaatgga

SEQ ID NO: 415229 - DNA, 498 bp, Homo sapiens
caggggttgctgccctcaggccacgcaggaggcgaggaggcagggtcatgcgtggcctcctgggcagtggggctgagggtacctgaggggtgggcaggagctggcgctgctgtctctaacagtcactctccacctccttccagttcttcgccttcatcgccacgctgctctacattctccatgccttcagcatctattaccactgatgcacaggcgccaggccaagggggaaatgctctttgaaagctccaattattggtccccaaaagcagcttccaacgtttgccatctggatgacaaacggaagatccactaaaacgtccacgggattaacagaacgtccttgcagactgagcgatgacaccacactttgtttggacatttaaattcactctgctgaataggaggaagcttttctttttcctgggaaaacaactgtctcttggaattatctgaccatgaacttgctcttctagacaactcacatcaaagccctca

SEQ ID NO: 415230 - DNA, 269 bp, Homo sapiens
ggccccactaggagcccacactacgctctcctggggggtcccctaggacggggagggaactaataattactgggccctccccagcggcagccgtggctcctacattagctggtttaattctccaaacaggtcttggaggaaggcatccttctattctactgatcagaaagctggacaaagtcccactgccaggctacacagttggtgccatttgcggaggtgacctttgacctttaacccacgcggccacccgcccgagctcttacccc

SEQ ID NO: 415231 - DNA, 2549 bp, Homo sapiens
ggcggcagcagccacccgatgtcttcggcgcccgagaagcagcagccaccgcacggcggcggcggcggcggcggcgggggaggcggcgcggccatggaccccgcgtcgtccggcccgtccaaggccaagaagaccaacgccggcatccggcgcccggagaagccgccctattcctacatcgcgctcatcgtcatggccatccagagttcacccaccaagcgcctgacgctgagcgagatctaccagttcctgcagagccgcttccccttcttccggggctcctaccagggctggaagaactccgtgcgccacaacctctcgctcaacgagtgcttcatcaagctacccaagggccttgggcggcccggcaagggccactactggaccatcgacccggccagcgagttcatgttcgaggagggctcctttcggcggcggccgcgcggcttccgaaggaaatgccaggcgctcaagcccatgtacagcatgatgaacgggctcggcttcaaccacctcccggacacctacggcttccagggctcggccggcggcctctcgtgcccgcccaacagcctggcgctggagggcggcctgggcatgatgaacggccacttgccgggcaacgtggacggcatggccctgcccagccactcggtgccccacctgccttccaacggcggccactcgtacatgggcggctgcggcggcgcggcggccggcgagtacccgcaccacgacagctcggtgcccgcctccccgctgctgcccaccggcgccggtggggtcatggagccgcacgccgtctactcgggctcggcggcggcctggccgccctcggcgtccgcggcgctcaacagcggcgcctcttatatcaagcagcagcccctgtccccctgtaaccccgcggccaaccccctgtccggcagcctctccacgcactccctggagcagccgtatctgcaccagaacagccacaacgccccagccgagctgcaaggcatcccgcggtatcactcgcagtcgcccagcatgtgtgaccgaaaggagtttgtcttctctttcaacgccatggcgtcctcttccatgcactcggccggcgggggctcctactaccaccagcaggtcacctaccaagacatcaagccttgcgtgatgtgaggctgccgccgcaggccctcctggtgcaggcaggcgggtcacagggaccctggaccggcacaagaaactgctttcttctcgaggtataaccgtcggcagaagaaaagggttccacctctccccaaccggagtttttggcaaggagtccccaatgcaaagacacagcgctgcggttggcacctccttcctcactccctcaaaattgttaagaaatgttagtggtgggtctgatctgactgcagccatcggtaaataaaagtttttgatcctgttgaacccgcctgagacggtgctgtgcaggggaaagcccccgcacccacacaggaattctgctgaggtcccccctccttccggccaatggcagaagtgggggaaaatttttagaagaaaagcaaacatgtgagaccaatcattatcaaatacttttattttttggttgagtatttatctttttattttttattttttttttgaaagaatgtcttggaatgcgcaagtctccctttagagccgtcttttgcagggagcgggaagtgacaagagctcagatctccctcccgatctccctccccacctccgaagtctcctccgtggaccacaggtggatctttgtgcgaacaacttgcatttcggaagccactgtccgtctttaaacagaaagtcaaaggagccacgaagcaagcggccgtccgggcgtccgcctccgtccccttccatgttcctcctcttccttcgcttcagcctcttctgttatgttttgtcttgaattttatttagactttttcagtgggtatttttctgtctcccaacctctactgtaaactttctggtccgagaacgagccgaacacagcgcgacgcagggactaggacggcccggtgaccgcgcggattcaggattgcggggacgcagaaaggttaaggcacttttaaaaactatagcaaggctcctgtttatttattctactttctttccctaataatcaaaacaccgcgtaggctcctccgtttatcagtattaatggtgtaactttgttggcaatatttgccgtgtagaattttttttagatatccattgtaaatttgaaacaaagaccgatctgtgtaaaaacaaatttccatatgttttatataaatatatatataatatgaaggactaccctccttttttttttttgtattttggctgctagagtgcagcatttgtgacacgtatttgaaatttgaaatttccttctgcactgtataaaaggaccatttgaggatgttttgccttttgtgtattttttcctaaaaaaagaacaaaaataaaaatgtataacatttgtacatggcctttaaaattgtatcaactagaaataaaattgcatgagtattttattgggactgaga

SEQ ID NO: 415232 - DNA, 1412 bp, Homo sapiens
gaccgcgacaaaagcgacttcctctttccagtgcatttaaggcgcagcctggaagtgccagggagcactggaggccacccagtcatgggggacaccttcatccgtcacatcgccctgctgggctttgagaagcgcttcgtacccagccagcactatgtgtacatgttcctggtgaaatggcaggacctgtcggagaaggtggtctaccggcgcttcaccgagatctacgagttccataaaaccttaaaagaaatgttccctattgaggcaggggcgatcaatccagagaacaggatcatcccccacctcccagctcccaagtggtttgacgggcagcgggccgccgagaaccgccagggcacacttaccgagtactgcagcacgctcatgagcctgcccaccaagatctcccgctgtccccacctcctcgacttcttcaaggtgcgccctgatgacctcaagctccccacggacaaccagacaaaaaagccagagacatacttgatgcccaaagatggcaagagtaccgcgacagacatcaccggccccatcatcctgcagacgtaccgcgccattgccaactacgagaagacctcgggctccgagatggctctgtccacgggggacgtggtggaggtcgtagagaagagcgagagcggttggtggttctgtcagatgaaagcaaagcgaggctggatcccagcgtccttcctcgagcccctggacagtcctgacgagacggaagaccctgagcccaactatgcaggtgagccatacgtcgccatcaaggcctacactgctgtggagggggacgaggtgtccctgctcgagggtgaagctgttgaggtcattcacaagctcctggacggctggtgggtcatcaggaaagacgacgtcacaggctacttcccgtccatgtacctgcaaaagtcagggcaagacgtgtcccaggcccaacgccagatcaagcggggggcgccgccccgcaggtcgtccatccgcaacgcgcacagcatccaccagcggtcgcggaagcgcctcagccaggacgcctatcgccgcaacagcgtccgttttctgcagcagcgacgccgccaggcgcggccgggaccgcagagccccgggagcccgctcgaggaggagcggcagacgcagcgctctaaaccgcagccggcggtgcccccgcggccgagcgccgacctcatcctgaaccgctgcagcgagagcaccaagcggaagctggcgtctgccgtctgaggctggagcgcagtccccagctagcgtctcggcccttgccgccccgtgcctgtacatacgtgttctatagagcctggcgtctggacgccgagggcagccccgacccctgtccagcgcggctcccgccaccctcaataaatgttgcttggagtgga

SEQ ID NO: 415233 - DNA, 1474 bp, Homo sapiens
gaccgcgacaaaagcgacttcctctttccagtgcatttaaggcgcagcctggaagtgccagggagcactggaggccacccagtcatgggggacaccttcatccgtcacatcgccctgctgggctttgagaagcgcttcgtacccagccagcactatgtgtacatgttcctggtgaaatggcaggacctgtcggagaaggtggtctaccggcgcttcaccgagatctacgagttccataaaaccttaaaagaaatgttccctattgaggcaggggcgatcaatccagagaacaggatcatcccccacctcccagctcccaagtggtttgacgggcagcgggccgccgagaaccgccagggcacacttaccgagtactgcagcacgctcatgagcctgcccaccaagatctcccgctgtccccacctcctcgacttcttcaaggtgcgccctgatgacctcaagctccccacggacaaccagacaaaaaagccagagacatacttgatgcccaaagatggcaagagtaccgcgacagacatcaccggccccatcatcctgcagacgtaccgcgccattgccaactacgagaagacctcgggctccgagatggctctgtccacgggggacgtggtggaggtcgtagagaagagcgagagcggttggtggttctgtcagatgaaagcaaagcgaggctggatcccagcgtccttcctcgagcccctggacagtcctgacgagacggaagaccctgagcccaactatgcaggtgagccatacgtcgccatcaaggcctacactgctgtggagggggacgaggtgtccctgctcgagggtgaagctgttgaggtcattcacaagctcctggacggctggtgggtcatcaggaaagacgacgtcacaggctacttcccgtccatgtacctgcaaaagtcagggcaagacgtgtcccaggcccaacgccagatcaagcggggggcgccgccccgcaggtcgtccatccgcaacgcgcacagcatccaccagcggtcgcggaagcgcctcagccaggacgcctatcgccgcaacagcgtccgttttctgcagcagcgacgccgccaggcgcggccgggaccgcagagccccgggagcccgctcgaggaggagcggcagacgcagcgctctaaaccgcagccggcggtgcccccgcggccgagcgccgacctcatcctgaaccgctgcagcgagagcaccaagcggaagctggcgtctgccgtctgaggctggagcgcagtccccagctagcgtctcggcccttgccgccccgtgcctgtacatacgtgttctatagagcctggcgtctggacgccgagggcagccccgacccctgtccagcgcggctcccgccaccctcaataaatgttgcttggagtggaaaaaaaaaaaaaagacaaagaagtataacaaacaagagcacacaagaacagacgaggggggg

SEQ ID NO: 415234 - DNA, 1425 bp, Homo sapiens
aatcatgcgaaccgtttcgtgaacgccacccagtcatgggggacaccttcatccgtcacatcgccctgctgggctttgagaagcgcttcgtacccagccagcactatgtgtacatgttcctggtgaaatggcaggacctgtcggagaaggtggtctaccggcgcttcaccgagatctacgagttccataaaaccttaaaagaaatgttccctattgaggcaggggcgatcaatccagagaacaggatcatcccccacctcccagctcccaagtggtttgacgggcagcgggccgccgagaaccgccagggcacacttaccgagtactgcagcacgctcatgagcctgcccaccaagatctcccgctgtccccacctcctcgacttcttcaaggtgcgccctgatgacctcaagctccccacggacaaccagacaaaaaagccagagacatacttgatgcccaaagatggcaagagtaccgcgacagacatcaccggccccatcatcctgcagacgtaccgcgccattgccaactacgagaagacctcgggctccgagatggctctgtccacgggggacgtggtggaggtcgtagagaagagcgagagcggttggtggttctgtcagatgaaagcaaagcgaggctggatcccagcgtccttcctcgagcccctggacagtcctgacgagacggaagaccctgagcccaactatgcaggtgagccatacgtcgccatcaaggcctacactgctgtggagggggacgaggtgtccctgctcgagggtgaagctgttgaggtcattcacaagctcctggacggctggtgggtcatcaggaaagacgacgtcacaggctacttcccgtccatgtacctgcaaaagtcagggcaagacgtgtcccaggcccaacgccagatcaagcggggggcgccgccccgcaggtcgtccatccgcaacgcgcacagcatccaccagcggtcgcggaagcgcctcagccaggacgcctatcgccgcaacagcgtccgttttctgcagcagcgacgccgccaggcgcggccgggaccgcagagccccgggagcccgctcgaggaggagcggcagacgcagcgctctaaaccgcagccggcggtgcccccgcggccgagcgccgacctcatcctgaaccgctgcagcgagagcaccaagcggaagctggcgtctgccgtctgaggctggagcgcagtccccagctagcgtctcggcccttgccgccccgtgcctgtacatacgtgttctatagagcctggcgtctggacgccgagggcagccccgacccctgtccagcgcggctcccgccaccctcaataaatgttgcttggagtggaaaaaaaaaaaaaagacaaagaagtataacaaacaagagcacacaagaacagacgaggggggg

SEQ ID NO: 415235 - DNA, 1482 bp, Homo sapiens
gaccgcgacaaaagcgacttcctctttccagtgcatttaaggcgcagcctggaagtgccagggagcactggaggccacccagtcatgggggacaccttcatccgtcacatcgccctgctgggctttgagaagcgcttcgtacccagccagcactatgtgtacatgttcctggtgaaatggcaggacctgtcggagaaggtggtctaccggcgcttcaccgagatctacgagttccataaaaccttaaaagaaatgttccctattgaggcaggggcgatcaatccagagaacaggatcatcccccacctcccagctcccaagtggtttgacgggcagcgggccgccgagaaccgccagggcacacttaccgagtactgcagcacgctcatgagcctgcccaccaagatctcccgctgtccccacctcctcgacttcttcaaggtgcgccctgatgacctcaagctccccacggacaaccagacaaaaaagccagagacatacttgatgcccaaagatggcaagagtaccgcgacagacatcaccggccccatcatcctgcagacgtaccgcgccattgccaactacgagaagacctcgggctccgagatggctctgtccacgggggacgtggtggaggtcgtagagaagagcgagagcggttggtggttctgtcagatgaaagcaaagcgaggctggatcccagcgtccttcctcgagcccctggacagtcctgacgagacggaagaccctgagcccaactatgcaggtgagccatacgtcgccatcaaggcctacactgctgtggagggggacgaggtgtccctgctcgagggtgaagctgttgaggtcattcacaagctcctggacggctggtgggtcatcaggaaagacgacgtcacaggctacttcccgtccatgtacctgcaaaagtcagggcaagacgtgtcccaggcccaacgccagatcaagcggggggcgccgccccgcaggtcgtccatccgcaacgcgcacagcatccaccagcggtcgcggaagcgcctcagccaggacgcctatcgccgcaacagcgtccgttttctgcagcagcgacgccgccaggcgcggccgggaccgcagagccccgggagcccgctcgaggaggagcggcagacgcagcgctctaaaccgcagccggcggtgcccccgcggccgagcgccgacctcatcctgaaccgctgcagcgagagcaccaagcggaagctggcgtctgccgtctgaggctggagcgcagtccccagctagcgtctcggcccttgccgccccgtgcctgtacatacgtgttctatagagcctggcgtctggacgccgagggcagccccgacccctgtccagcgcggctcccgccaccctcaataaatgttgcttggagtggaaccgaggctctgcaggaatgcagggagggccgggctccgccccagggttatttctaagttgaaaacagga

SEQ ID NO: 415236 - DNA, 2453 bp, Homo sapiens
gaccgcgacaaaagcgacttcctctttccagtgcatttaaggcgcagcctggaagtgccagggagcactggaggccacccagtcatgggggacaccttcatccgtcacatcgccctgctgggctttgagaagcgcttcgtacccagccagcactatgtgtacatgttcctggtgaaatggcaggacctgtcggagaaggtggtctaccggcgcttcaccgagatctacgagttccataaaaccttaaaagaaatgttccctattgaggcaggggcgatcaatccagagaacaggatcatcccccacctcccagctcccaagtggtttgacgggcagcgggccgccgagaaccgccagggcacacttaccgagtactgcagcacgctcatgagcctgcccaccaagatctcccgctgtccccacctcctcgacttcttcaaggtgcgccctgatgacctcaagctccccacggacaaccagacaaaaaagccagagacatacttgatgcccaaagatggcaagagtaccgcgacagacatcaccggccccatcatcctgcagacgtaccgcgccattgccaactacgagaagacctcgggctccgagatggctctgtccacgggggacgtggtggaggtcgtagagaagagcgagagcggttggtggttctgtcagatgaaagcaaagcgaggctggatcccagcgtccttcctcgagcccctggacagtcctgacgagacggaagaccctgagcccaactatgcaggtgagccatacgtcgccatcaaggcctacactgctgtggagggggacgaggtgtccctgctcgagggtgaagctgttgaggtcattcacaagctcctggacggctggtgggtcatcaggaaagacgacgtcacaggctacttcccgtccatgtacctgcaaaagtcagggcaagacgtgtcccaggcccaacgccagatcaagcggggggcgccgccccgcaggtcgtccatccgcaacgcgcacagcatccaccagcggtcgcggaagcgcctcagccaggacgcctatcgccgcaacagcgtccgttttctgcagcagcgacgccgccaggcgcggccgggaccgcagagccccgggagcccgctcgaggaggagcggcagacgcagcgctctaaaccgcagccggcggtgcccccgcggccgagcgccgacctcatcctgaaccgctgcagcgagagcaccaagcggaagctggcgtctgccgtctgaggctggagcgcagtccccagctagcgtctcggcccttgccgccccgtgcctgtacatacgtgttctatagagcctggcgtctggacgccgagggcagccccgacccctgtccagcgcggctcccgccaccctcaataaatgttgcttggagtggaaacaaaaagaaacaaccaccaaaaaaaaacaaaaaaaaaaaaaaaaacaaacacaaaaaaaaaaacaacaacaaacaacgaccacaagggcgggggggagctagccacaagagatactcccaggcgggggggcgcacacagagagaagctcacaccacaccaccctatctgcgagcacaagagagcgggagcgcacaaaaagacgcgcccagcgtcacaagagcaccacagcggaccgcacgccccgtctatacaaacacgcgtcacctgatggcgtgggcaacaactcagcacgcacggagtgggcgaccgccctctaccgtcattgccggatcacaccactagccactacttattaatgttgtgagggggagaaggacaattatgatgatagagacgacaatctaagtcctgaagaagacactatcaagagtacggctgtatcgcgctgtcagttactactatttcaacctcccccctacctcctcacctttactaattactcagcacctgtaccaaaccaaaaccaccacgccacaccaatcaacactctatcttcactccatccacacacaaccgacacaaaacataactgccactaccctctacacatcacacccaacctcactatttagtcctgttcctccacaacatactaacaatttactcaccaattctccaccccacatacctacgaactccatcatccatcactcacaacgtttccagcctcagcacaatcccatagcacacagagccaccaccaggacgtcacacccactcagacccgacgccacagaacacgctaggagaatcgcagagagtagatcacgcacgcacggcgccgacccccaccaaagcagatcacaacggccagcagcacgtaccaccgtacttcacacgctcccgaccgagagcacgagcgacacgcctagccaataacccagcctccgcgaacagcagctcagcacccagagtcaccccgcgcacaccatgccaagagaacacccacacggccatcacagacaaggcagcgtcact

SEQ ID NO: 415237 - DNA, 1876 bp, Homo sapiens
gaccgcgacaaaagcgacttcctctttccagtgcatttaaggcgcagcctggaagtgccagggagcactggaggccacccagtcatgggggacaccttcatccgtcacatcgccctgctgggctttgagaagcgcttcgtacccagccagcactatgtgtacatgttcctggtgaaatggcaggacctgtcggagaaggtggtctaccggcgcttcaccgagatctacgagttccataaaaccttaaaagaaatgttccctattgaggcaggggcgatcaatccagagaacaggatcatcccccacctcccagctcccaagtggtttgacgggcagcgggccgccgagaaccgccagggcacacttaccgagtactgcagcacgctcatgagcctgcccaccaagatctcccgctgtccccacctcctcgacttcttcaaggtgcgccctgatgacctcaagctccccacggacaaccagacaaaaaagccagagacatacttgatgcccaaagatggcaagagtaccgcgacagacatcaccggccccatcatcctgcagacgtaccgcgccattgccaactacgagaagacctcgggctccgagatggctctgtccacgggggacgtggtggaggtcgtagagaagagcgagagcggtcagacctcccaccttacggggctccttcccctggtgctcaggaacccacagccacaagccccctgccaaggctcaggcagccttgcccctgggaggactccggctctgttaggggccctaaatgtcctccccacactgtgggtcgccttctgtcttagtgtgcaccctgtggtggctgtgggcatctgtgcatggcaggccggggcggggcatgtctgcgtgttctgtctggatggggtatgggaccgtctgttcattatgaagtgggctcagagctgtgattctgtgagcatgtgtgcatgcatgcatgtgacctcattgtccagtgtggtgaaggtgacatttccaaatctgagcattggacatcagtgtgtctgtgtccctgtgtcctcaccatccctgatggctgcagggagccgctgggccctgcccctcagtcacattcccgcacctctggcacaggttggtggttctgtcagatgaaagcaaagcgaggctggatcccagcgtccttcctcgagcccctggacagtcctgacgagacggaagaccctgagcccaactatgcaggtgagccatacgtcgccatcaaggcctacactgctgtggagggggacgaggtgtccctgctcgagggtgaagctgttgaggtcattcacaagctcctggacggctggtgggtcatcaggaaagacgacgtcacaggctacttcccgtccatgtacctgcaaaagtcagggcaagacgtgtcccaggcccaacgccagatcaagcggggggcgccgccccgcaggtcgtccatccgcaacgcgcacagcatccaccagcggtcgcggaagcgcctcagccaggacgcctatcgccgcaacagcgtccgttttctgcagcagcgacgccgccaggcgcggccgggaccgcagagccccgggagcccgctcgaggaggagcggcagacgcagcgctctaaaccgcagccggcggtgcccccgcggccgagcgccgacctcatcctgaaccgctgcagcgagagcaccaagcggaagctggcgtctgccgtctgaggctggagcgcagtccccagctagcgtctcggcccttgccgccccgtgcctgtacatacgtgttctatagagcctggcgtctggacgccgagggcagccccgacccctgtccagcgcggctcccgccaccctcaataaatgttgcttggagtgga

SEQ ID NO: 415238 - DNA, 1395 bp, Homo sapiens
  misc_feature (137)..(137): n is a, c, g, or t
gtcgatctccaggatctccgggagccgctgtgccaccgtgcttgaaaaaatgctgccggtaacttcctttacttttatccgggcacacagaagcatcgccgctcatctcctgaatcaaacccctgctggggctctcnggtctggtgcagagccacgcaggtcgctgtgggcgggctccaggcgcagtaggggtcccgcgccagcacacagtcctcgcaggtgccgtgcttcccacagaaggccagcggggcctggaccacgcccgagttagagccagcatagacaaacctgttgcccttctttgaagacagcagcagggtctggactggctcaaagtcctggaagtgctgggtctcctcgatgatgtgaacaagcgggctcccggccgggagcccgctgtccccacctcctcgacttcttcaaggtgcgccctgatgacctcaagctccccacggacaaccagacaaaaaagccagagacatacttgatgcccaaagatggcaagagtaccgcgacagacatcaccggccccatcatcctgcagacgtaccgcgccattgccaactacgagaagacctcgggctccgagatggctctgtccacgggggacgtggtggaggtcgtagagaagagcgagagcggttggtggttctgtcagatgaaagcaaagcgaggctggatcccagcgtccttcctcgagcccctggacagtcctgacgagacggaagaccctgagcccaactatgcaggtgagccatacgtcgccatcaaggcctacactgctgtggagggggacgaggtgtccctgctcgagggtgaagctgttgaggtcattcacaagctcctggacggctggtgggtcatcaggaaagacgacgtcacaggctacttcccgtccatgtacctgcaaaagtcagggcaagacgtgtcccaggcccaacgccagatcaagcggggggcgccgccccgcaggtcgtccatccgcaacgcgcacagcatccaccagcggtcgcggaagcgcctcagccaggacgcctatcgccgcaacagcgtccgttttctgcagcagcgacgccgccaggcgcggccgggaccgcagagccccgggagcccgctcgaggaggagcggcagacgcagcgctctaaaccgcagccggcggtgcccccgcggccgagcgccgacctcatcctgaaccgctgcagcgagagcaccaagcggaagctggcgtctgccgtctgaggctggagcgcagtccccagctagcgtctcggcccttgccgccccgtgcctgtacatacgtgttctatagagcctggcgtctggacgccgagggcagccccgacccctgtccagcgcggctcccgccaccctcaataaatgttgcttggagtgga

SEQ ID NO: 415239 - DNA, 1374 bp, Homo sapiens
gaccgcgacaaaagcgacttcctctttccagtgcatttaaggcgcagcctggaagtgccagggagcactggaggccacccagtcatgggggacaccttcatccgtcacatcgccctgctgggctttgagaagcgcttcgtacccagccagcactatgtgtacatgttcctggtgaaatggcaggacctgtcggagaaggtggtctaccggcgcttcaccgagatctacgagttccataaaaccttaaaagaaatgttccctattgaggcaggggcgatcaatccagagaacaggatcatcccccacctcccagctcccaagtggtttgacgggcagcgggccgccgagaaccgccagggcacacttaccgagtactgcagcacgctcatgagcctgcccaccaagatctcccgctgtccccacctcctcgacttcttcaaggtgcgccctgatgacctcaagctccccacggacaaccagacaaaaaagccagagacatacttgatgcccaaagatggcaagagtaccgcgacagacatcaccggccccatcatcctgcagacgtaccgcgccattgccaactacgagaagacctcgggctccgagatggctctgtccacgggggacgtggtggaggtcgtagagaagagcgagagcggttggtggttctgtcagatgaaagcaaagcgaggctggatcccagcgtccttcctcgagcccctggacagtcctgacgagacggaagaccctgagcccaactatgcaggtgagccatacgtcgccatcaaggcctacactgctgtggagggggacgaggtgtccctgctcgagggtgaagctgttgaggaaagacgacgtcacaggctacttcccgtccatgtacctgcaaaagtcagggcaagacgtgtcccaggcccaacgccagatcaagcggggggcgccgccccgcaggtcgtccatccgcaacgcgcacagcatccaccagcggtcgcggaagcgcctcagccaggacgcctatcgccgcaacagcgtccgttttctgcagcagcgacgccgccaggcgcggccgggaccgcagagccccgggagcccgctcgaggaggagcggcagacgcagcgctctaaaccgcagccggcggtgcccccgcggccgagcgccgacctcatcctgaaccgctgcagcgagagcaccaagcggaagctggcgtctgccgtctgaggctggagcgcagtccccagctagcgtctcggcccttgccgccccgtgcctgtacatacgtgttctatagagcctggcgtctggacgccgagggcagccccgacccctgtccagcgcggctcccgccaccctcaataaatgttgcttggagtgga

SEQ ID NO: 415240 - DNA, 2168 bp, Homo sapiens
gaccgcgacaaaagcgacttcctctttccagtgcatttaaggcgcagcctggaagtgccagggagcactggaggccacccagtcatgggggacaccttcatccgtcacatcgccctgctgggctttgagaagcgcttcgtacccagccagcactatgtgtacatgttcctggtgaaatggcaggacctgtcggagaaggtggtctaccggcgcttcaccgagatctacgagttccataaaaccttaaaagaaatgttccctattgaggcaggggcgatcaatccagagaacaggatcatcccccacctcccagctcccaagtggtttgacgggcagcgggccgccgagaaccgccagggcacacttaccgagtactgcagcacgctcatgagcctgcccaccaagatctcccgctgtccccacctcctcgacttcttcaaggtgcgccctgatgacctcaagctccccacggacaaccagacaaaaaagccagagacatacttgatgcccaaagatggcaagagtaccgcgacagacatcaccggccccatcatcctgcagacgtaccgcgccattgccaactacgagaagacctcgggctccgagatggctctgtccacgggggacgtggtggaggtcgtagagaagagcgagagcggtcagacctcccaccttacggggctccttcccctggtgctcaggaacccacagccacaagccccctgccaaggctcaggcagccttgcccctgggaggactccggctctgttaggggccctaaatgtcctccccacactgtgggtcgccttctgtcttagtgtgcaccctgtggtggctgtgggcatctgtgcatggcaggccggggcggggcatgtctgcgtgttctgtctggatggggtatgggaccgtctgttcattatgaagtgggctcagagctgtgattctgtgagcatgtgtgcatgcatgcatgtgacctcattgtccagtgtggtgaaggtgacatttccaaatctgagcattggacatcagtgtgtctgtgtccctgtgtcctcaccatccctgatggctgcagggagccgctgggccctgcccctcagtcacattcccgcacctctggcacaggttggtggttctgtcagatgaaagcaaagcgaggctggatcccagcgtccttcctcgagcccctggacagtcctgacgagacggaagaccctgagcccaactatgcaggtgagccatacgtcgccatcaaggcctacactgctgtggagggggacgaggtgtccctgctcgagggtgaagctgttgaggtcattcacaagctcctggacggctggtgggtcatcaggaaagacgacgtcacaggctacttcccgtccatgtacctgcaaaagtcagggcaagacgtgtcccaggcccaacgccagatcaagcggggggcgccgccccgcaggtacagccgcggggtccccggggctgggcggggtcgagcggggcgcaccacgggttcgctctgtctaggccatagcttggcagtgccggggcgggggctctcagcctggcaggagaggcaggaccctcacgggggaaaggggctggacgcgcctggccgcggtgtggggctggcacgggggcggaaggaaagcggcgatgccccccacttcctcggaccaggggtgcccatctgagtccctgggggcaggggcgccctcgggctttgacgacgccccgtcccgctgggccaggtcgtccatccgcaacgcgcacagcatccaccagcggtcgcggaagcgcctcagccaggacgcctatcgccgcaacagcgtccgttttctgcagcagcgacgccgccaggcgcggccgggaccgcagagccccgggagcccgctcgaggaggagcggcagacgcagcgctctaaaccgcagccggcggtgcccccgcggccgagcgccgacctcatcctgaaccgctgcagcgagagcaccaagcggaagctggcgtctgccgtctgaggctggagcgcagtccccagctagcgtctcggcccttgccgccccgtgcctgtacatacgtgttctatagagcctggcgtctggacgccgagggcagccccgacccctgtccagcgcggctcccgccaccctcaataaatgttgcttggagtgga

SEQ ID NO: 415241 - DNA, 1666 bp, Homo sapiens
gaccgcgacaaaagcgacttcctctttccagtgcatttaaggcgcagcctggaagtgccagggagcactggaggccacccagtcatgggggacaccttcatccgtcacatcgccctgctgggctttgagaagcgcttcgtacccagccagcactatgtgtacatgttcctggtgaaatggcaggacctgtcggagaaggtggtctaccggcgcttcaccgagatctacgagttccataaaaccttaaaagaaatgttccctattgaggcaggggcgatcaatccagagaacaggatcatcccccacctcccagctcccaagtggtttgacgggcagcgggccgccgagaaccgccagggcacacttaccgagtactgcagcacgctcatgagcctgcccaccaagatctcccgctgtccccacctcctcgacttcttcaaggtgcgccctgatgacctcaagctccccacggacaaccagacaaaaaagccagagacatacttgatgcccaaagatggcaagagtaccgcgacagacatcaccggccccatcatcctgcagacgtaccgcgccattgccaactacgagaagacctcgggctccgagatggctctgtccacgggggacgtggtggaggtcgtagagaagagcgagagcggttggtggttctgtcagatgaaagcaaagcgaggctggatcccagcgtccttcctcgagcccctggacagtcctgacgagacggaagaccctgagcccaactatgcaggtgagccatacgtcgccatcaaggcctacactgctgtggagggggacgaggtgtccctgctcgagggtgaagctgttgaggaaagacgacgtcacaggctacttcccgtccatgtacctgcaaaagtcagggcaagacgtgtcccaggcccaacgccagatcaagcggggggcgccgccccgcaggtacagccgcggggtccccggggctgggcggggtcgagcggggcgcaccacgggttcgctctgtctaggccatagcttggcagtgccggggcgggggctctcagcctggcaggagaggcaggaccctcacgggggaaaggggctggacgcgcctggccgcggtgtggggctggcacgggggcggaaggaaagcggcgatgccccccacttcctcggaccaggggtgcccatctgagtccctgggggcaggggcgccctcgggctttgacgacgccccgtcccgctgggccaggtcgtccatccgcaacgcgcacagcatccaccagcggtcgcggaagcgcctcagccaggacgcctatcgccgcaacagcgtccgttttctgcagcagcgacgccgccaggcgcggccgggaccgcagagccccgggagcccgctcgaggaggagcggcagacgcagcgctctaaaccgcagccggcggtgcccccgcggccgagcgccgacctcatcctgaaccgctgcagcgagagcaccaagcggaagctggcgtctgccgtctgaggctggagcgcagtccccagctagcgtctcggcccttgccgccccgtgcctgtacatacgtgttctatagagcctggcgtctggacgccgagggcagccccgacccctgtccagcgcggctcccgccaccctcaataaatgttgcttggagtgga

SEQ ID NO: 415242 - DNA, 1556 bp, Homo sapiens
gaccgcgacaaaagcgacttcctctttccagtgcatttaaggcgcagcctggaagtgccagggagcactggaggccacccagtcatgggggacaccttcatccgtcacatcgccctgctgggctttgagaagcgcttcgtacccagccagcactatgtgtacatgttcctggtgaaatggcaggacctgtcggagaaggtggtctaccggcgcttcaccgagatctacgagttccataaaaccttaaaagaaatgttccctattgaggcaggggcgatcaatccagagaacaggatcatcccccacctcccagctcccaagtggtttgacgggcagcgggccgccgagaaccgccagggcacacttaccgagtactgcagcacgctcatgagcctgcccaccaagatctcccgctgtccccacctcctcgacttcttcaaggtgcgccctgatgacctcaagctccccacggacaaccagacaaaaaagccagagacatacttgatgcccaaagatggcaagagtaccgcgacagacatcaccggccccatcatcctgcagacgtaccgcgccattgccaactacgagaagacctcgggctccgagatggctctgtccacgggggacgtggtggaggtcgtagagaagagcgagagcggtcagacctcccaccttacggggctccttcccctggtgctcaggaacccacagccacaagccccctgccaaggctcaggcagccttgcccctgggaggactccggctctgttaggggccctaaatgtcctccccacactgtgggtcgccttctgtcttagtgtgcaccctgtggtggctgtgggcatctgtgcatggcaggccggggcggggcatgtctgcgtgttctgtctggatggggtatgggaccgtctgttcattatgaagtgggctcagagctgtgattctgtgagcatgtgtgcatgcatgcatgtgacctcattgtccagtgtggtgaaggtgacatttccaaatctgagcattggacatcagtgtgtctgtgtccctgtgtcctcaccatccctgatggctgcagggagccgctgggccctgcccctcagtcacattcccgcacctctggcacaggttggtggttctgtcagatgaaagcaaagcgaggctggatcccagcgtccttcctcgagcccctggacagtcctgacgagacggaagaccctgagcccaactatgcagcgacgccgccaggcgcggccgggaccgcagagccccgggagcccgctcgaggaggagcggcagacgcagcgctctaaaccgcagccggcggtgcccccgcggccgagcgccgacctcatcctgaaccgctgcagcgagagcaccaagcggaagctggcgtctgccgtctgaggctggagcgcagtccccagctagcgtctcggcccttgccgccccgtgcctgtacatacgtgttctatagagcctggcgtctggacgccgagggcagccccgacccctgtccagcgcggctcccgccaccctcaataaatgttgcttggagtgga

SEQ ID NO: 415243 - DNA, 1359 bp, Homo sapiens
gaccgcgacaaaagcgacttcctctttccagtgcatttaaggcgcagcctggaagtgccagggagcactggaggccacccagtcatgggggacaccttcatccgtcacatcgccctgctgggctttgagaagcgcttcgtacccagccagcactatgtgtacatgttcctggtgaaatggcaggacctgtcggagaaggtggtctaccggcgcttcaccgagatctacgagttccataaaaccttaaaagaaatgttccctattgaggcaggggcgatcaatccagagaacaggatcatcccccacctcccagctcccaagtggtttgacgggcagcgggccgccgagaaccgccagggcacacttaccgagtactgcagcacgctcatgagcctgcccaccaagatctcccgctgtccccacctcctcgacttcttcaaggtgcgccctgatgacctcaagctccccacggacaaccagacaaaaaagccagagacatacttgatgcccaaagatggcaagagtaccgcgacagacatcaccggccccatcatcctgcagacgtaccgcgccattgccaactacgagaagacctcgggctccgagatggctctgtccacgggggacgtggtggaggtcgtagagaagagcgagagcggttggtggttctgtcagatgaaagcaaagcgaggctggatcccagcgtccttcctcgagcccctggacagtcctgacgagacggaagaccctgagcccaactatgcaggtgagccatacgtcgccatcaaggcctacactgctgtggagggggacgaggtgtccctgctcgagggtgaagctgttgaggtcattcacaagctcctggacggctggtgggtcatcaggaaagacgacgtcacaggctacttcccgtccatgtacctgcaaaagtcagggcaagacgtgtcccaggcccaacgccagatcaagcggggggcgccgccccgcaggtacagccgcggggtccccggggaggaggagcggcagacgcagcgctctaaaccgcagccggcggtgcccccgcggccgagcgccgacctcatcctgaaccgctgcagcgagagcaccaagcggaagctggcgtctgccgtctgaggctggagcgcagtccccagctagcgtctcggcccttgccgccccgtgcctgtacatacgtgttctatagagcctggcgtctggacgccgagggcagccccgacccctgtccagcgcggctcccgccaccctcaataaatgttgcttggagtggaaccgaggctctgcaggaatgcagggagggccgggctccgccccagggttatttctaagttgaaaacagga

SEQ ID NO: 415244 - DNA, 1344 bp, Homo sapiens
gaccgcgacaaaagcgacttcctctttccagtgcatttaaggcgcagcctggaagtgccagggagcactggaggccacccagtcatgggggacaccttcatccgtcacatcgccctgctgggctttgagaagcgcttcgtacccagccagcactatgtgtacatgttcctggtgaaatggcaggacctgtcggagaaggtggtctaccggcgcttcaccgagatctacgagttccataaaaccttaaaagaaatgttccctattgaggcaggggcgatcaatccagagaacaggatcatcccccacctcccagctcccaagtggtttgacgggcagcgggccgccgagaaccgccagggcacacttaccgagtactgcagcacgctcatgagcctgcccaccaagatctcccgctgtccccacctcctcgacttcttcaaggtgcgccctgatgacctcaagctccccacggacaaccagacaaaaaagccagagacatacttgatgcccaaagatggcaagagtaccgcgacagacatcaccggccccatcatcctgcagacgtaccgcgccattgccaactacgagaagacctcgggctccgagatggctctgtccacgggggacgtggtggaggtcgtagagaagagcgagagcggtcagacctcccaccttacggggctccttcccctggtgctcaggaacccacagccacaagccccctgccaaggctcaggcagccttgcccctgggaggactccggctctgttaggggccctaaatgtcctccccacactgtgggtcgccttctgtcttagtgtgcaccctgtggtggctgtgggcatctgtgcatggcaggccggggcggggcatgtctgcgtgttctgtctggatggggtatgggaccgtctgttcattatgaagtgggctcagagctgtgattctgtgagcatgtgtgcatgcatgcatgtgacctcattgtccagtgtggtgaaggtgacatttccaaatctgagcaggggacgaggtgtccctgctcgagggtgaagctgttgaggtcattcacaagctcctggacggctggtgggtcatcaggtaggagggcccctctccatccagagcacccatctgagtcagccccagccaggacggggtgtttagggatctggggtgacttgtccctgggactctgggtaagccactgcccctctctgggcttagtttccatctcagtagcagggaggaatgagcccacccttgcctgtcttgtggggatccaatgtccttgtccaagtgggtgcatttctcctttgtgatttagggtctcttcccaaccatctatta

SEQ ID NO: 415245 - DNA, 1092 bp, Homo sapiens
gaccgcgacaaaagcgacttcctctttccagtgcatttaaggcgcagcctggaagtgccagggagcactggaggccacccagtcatgggggacaccttcatccgtcacatcgccctgctgggctttgagaagcgcttcgtacccagccagcactatgtgtacatgttcctggtgaaatggcaggacctgtcggagaaggtggtctaccggcgcttcaccgagatctacgagttccataaaaccttaaaagaaatgttccctattgaggcaggggcgatcaatccagagaacaggatcatcccccacctcccagctcccaagtggtttgacgggcagcgggccgccgagaaccgccagggcacacttaccgagtactgcagcacgctcatgagcctgcccaccaagatctcccgctgtccccacctcctcgacttcttcaaggtgcgccctgatgacctcaagctccccacggacaaccagacaaaaaagccagagacatacttgatgcccaaagatggcaagagtaccgcgacagacatcaccggccccatcatcctgcagacgtaccgcgccattgccaactacgagaagacctcgggctccgagatggctctgtccacgggggacgtggtggaggtcgtagagaagagcgagagcggttggtggttctgtcagatgaaagcaaagcgaggctggatcccagcgtccttcctcgagcccctggacagtcctgacgagacggaagaccctgagcccaactatgcagcgacgccgccaggcgcggccgggaccgcagagccccgggagcccgctcgaggaggagcggcagacgcagcgctctaaaccgcagccggcggtgcccccgcggccgagcgccgacctcatcctgaaccgctgcagcgagagcaccaagcggaagctggcgtctgccgtctgaggctggagcgcagtccccagctagcgtctcggcccttgccgccccgtgcctgtacatacgtgttctatagagcctggcgtctggacgccgagggcagccccgacccctgtccagcgcggctcccgccaccctcaataaatgttgcttggagtgga

SEQ ID NO: 415246 - DNA, 1166 bp, Homo sapiens
cagtccaggggggctccccggagagggggacgacagaccgaaggctggtgaggggcgtggaaaaccgaccgtgccctgcccattcttgccaatgtcttatagcaaatacctgtcccctgcggtgacctggatctgctaacctccacccctgcctagactgtggaaggattgctggaagggtctcagttgcacagaccaggaaactgaggcccacagaggcaggtgtccggttgtttgcaacctctcagcctgtgctaaccccaattgttcagagagagccctgaaaccctctcctctgggcgcccccaggtgactgccccagcctcaagggctgcctctgttgcaggaaagacgacgtcacaggctacttcccgtccatgtacctgcaaaagtcagggcaagacgtgtcccaggcccaacgccagatcaagcggggggcgccgccccgcaggtacagccgcggggtccccggggctgggcggggtcgagcggggcgcaccacgggttcgctctgtctaggccatagcttggcagtgccggggcgggggctctcagcctggcaggagaggcaggaccctcacgggggaaaggggctggacgcgcctggccgcggtgtggggctggcacgggggcggaaggaaagcggcgatgccccccacttcctcggaccaggggtgcccatctgagtccctgggggcaggggcgccctcgggctttgacgacgccccgtcccgctgggccaggtcgtccatccgcaacgcgcacagcatccaccagcggtcgcggaagcgcctcagccaggacgcctatcgccgcaacagcgtccgttttctgcagcagcgacgccgccaggcgcggccgggaccgcagagccccgggagcccgctcgaggaggagcggcagacgcagcgctctaaaccgcagccggcggtgcccccgcggccgagcgccgacctcatcctgaaccgctgcagcgagagcaccaagcggaagctggcgtctgccgtctgaggctggagcgcagtccccagctagcgtctcggcccttgccgccccgtgcctgtacatacgtgttctatagagcctggcgtctggacgccgagggcagccccgacccctgtccagcgcggctcccgccaccctcaataaatgttgcttggagtgga

SEQ ID NO: 415247 - DNA, 598 bp, Homo sapiens
gaccgcgacaaaagcgacttcctctttccagtgcatttaaggcgcagcctggaagtgccagggagcactggaggccacccagtcatgggggacaccttcatccgtcacatcgccctgctgggctttgagaagcgcttcgtacccagccagcactatgtgtacatgttcctggtgaaatggcaggacctgtcggagaaggtggtctaccggcgcttcaccgagatctacgagttccataaaaccttaaaagaaatgttccctattgaggcaggggcgatcaatccagagaacaggatcatcccccacctcccagctcccaagtggtttgacgggcagcgggccgccgagaaccgccagggcacacttaccgagtactgcagcacgctcatgagcctgcccaccaagatctcccgctgtccccacctcctcgacttcttcaaggtgcgccctgatgacctcaagctccccacggacaaccagacaaaaaagccagagacatacttgatgcccaaagatggcaagagtaccgcgacagggcagccccgacccctgtccagcgcggctcccgccaccctcaataaatgttgcttggagtgga

SEQ ID NO: 415248 - DNA, 739 bp, Homo sapiens
gaccgcgacaaaagcgacttcctctttccagtgcatttaaggcgcagcctggaagtgccagggagcactggaggccacccagtcatgggggacaccttcatccgtcacatcgccctgctgggctttgagaagcgcttcgtacccagccagcactatgtgtacatgttcctggtgaaatggcaggacctgtcggagaaggtggtctaccggcgcttcaccgagatctacgagttccataaaaccttaaaagaaatgttccctattgaggcaggggcgatcaatccagagaacaggatcatcccccacctcccagctcccaagtggtttgacgggcagcgggccgccgagaaccgccagggcacacttaccgagtactgcagcacgctcatgagcctgcccaccaagatctcccgctgtccccacctcctcgacttcttcaaggtgcgccctgatgacctcaagctccccacggacaaccagacaaaaaagccagagacatacttgatgcccaaagatggcaagagtaccgcgacagacatcaccggccccatcatcctgcagacgtaccgcgccattgccaactacgagaagacctcgggctccgagatggctctgtccacgggggacgtggtggaggtcgtagagaagagcgagagcggtcagacctcccaggggtaaggctgcctgagccttggcagggggcttgtggctgtgggttcctgagcaccaggggaaggag

SEQ ID NO: 415249 - DNA, 3309 bp, Homo sapiens
  misc_feature (3309)..(3309): n is a, c, g, or t
atttaaaaatatatgttaatctcaaagctaagattacagatttaactccttccaatctccttttccataggttataaaaagagttatttgattaaaaggtgggtcactatgaccagacgctcttctttactagttggaagctgatcatagatacacccacctcccttacataatttgtagcattccaccttcatggaagaaagcattcagaactctgctaccagatacacagcccaggaaacattatttattattctgtacacttatattccacaaagagaacaacttttaaaatccatatcagacacagaaatctgcatgacattggaacagtccatgacacagagaggacacaattgaaacagtctttatttacacggaagcagagagacagagggatgagggcaggcaccccaaaagtgacttcacattcaccaatgtttcagtggcttctaagaccacagcagagctgtggatcctgggactcacagggtatgaaaatgtgttaccctccaaagcctcaaaacaaaagggttggattaaaaacaaataccaagtgtttctggcatcagttgaaaaatatctgagaaagaggaactattgaatgtccagaaaaatcaaagttctggaggctagaaatctgacatttctctgatagagagatcactggtcatcagttcattttgggaaattcttacagttaagtgatgtgtttccttcattgtaaatttaacaggagagcatcattatggatacaagcagggttttctttaatggaatgggaactttgatgatctgatataacccctgattttaaagacaaagaatcttgaagccccaaaagatgaagccactatccccaggccacccagctagtcagctgcagacccaagtctgtaaaactatatgctgtgctttttccgccacactacacaccttctctgtttttctctcttcggtggctttcgaaggaaataaacaaataaagtgagttcaatgggcttctttactaggaaatgatttctttggtaagaatgcttcagtctcacattagcgaggctagaaaacagatcatatagcaggaactggctcccagctgagcggtaactccttttgagaattaaggcagcttcagggatttctgttcagcaggatatctggcaagagttggtagctctccttctcccttgtctcgttttcatctagaatgaaagctaaaaggtgggtgctaaataactagacattgagtagacgtaaatgtgatgttctcaaactgatattttacatttcatgaaaaataataattctttaaaaacctgaaaaaatatcaaaagcgtcaagtgtcatatacagtacacagcacccttgtcccgggtgacctctgctattaaaaacaagctacaaaaaggaagtcaaagatgacttaacataaagcccatactctctctccattaaatgtgggtggaaaggtaaacccaaatgatctccaagcacctccccgagaacttccaagggctttctgggtacccccaccctcccaggggacccaggcttggagccaggttcccatcccagattcaggagccaacttccgccgcaaggcagcaccactgcgttggtttggtgttggttcagctagcaccacatctccgattcaccccgggacaaatgtctggaggcagaaggggccacatgcagatggcaaagaggacgccggaagcggcggacgcaggaggcctcgtggaggacacagcagcatgggacagtcagggaggtcccggcaccagaagcgcgcccgcgcccaggcgcagctccgcaacctcgaggcctatgccgcgaacccgcactcgttcgtgttcacgcgaggctgcacgggtcgcaacatccggcagctcagcctggacgtgcggcgggtcatggagccgctcactgccagccgtctgcaggttcgtaagaagaactcgctgaaggactgcgtggcagtggctgggcccctcggggtcacacactttctgatcctgagcaaaacagagaccaatgtctactttaagctgatgcgcctcccaggaggccccaccttgaccttccaggtcaagaagtactcgctggtgcgtgatgtggtctcctcactgcgccggcaccgcatgcacgagcagcagtttgcccacccacccctcctggtactcaacagctttggcccccatggtatgcatgtgaagctcatggccaccatgttccagaacctgttcccctccatcaacgtgcacaaggtgaacctgaacaccatcaagcgctgcctcctcatcgactacaaccccgactcccaggagctggacttccgccactatagcatcaaagttgttcctgtgggcgcgagtcgcgggatgaagaagctgctccaggagaagttccccaacatgagccgcctgcaggacatcagcgagctgctggccacgggcgcggggctgtcggagagcgaggcagagcctgacggcgaccacaacatcacagagctgcctcaggctgtcgctggccgtggcaacatgcgggcccagcagagtgcagtgcggctcaccgagatcggcccgcggatgacactgcagctcatcaaggtccaggagggcgtcggggagggcaaagtgatgttccacagttttgtgagcaagacggaggaggagctgcaggccatcctggaagccaaggagaagaagctgcggctgaaggcgcagaggcaggcccagcaggcccagaatgtgcagcgcaagcaggagcagcgggaggcccacagaaagaagagcctggagggcatgaagaaggcacgggtcgggggtagtgatgaagaggcctctgggatcccttcaaggacggcgagcctggagttgggtgaggacgatgatgaacaggaagatgatgacatcgagtatttctgccaggcggtgggcgaggcgcccagtgaggacctgttccccgaggccaagcagaaacggcttgccaagtctccagggcggaagcggaagcggtgggaaatggatcgaggcaggggtcgcctttgtgaccagaagtttcccaagaccaaggacaagtcccagggagcccaggccaggcgggggcccagaggggcttcccgggatggtgggcgaggccggggccggggccgcccagggaagagagtggcctgagcccaagccgcaccggagcagcggctggattgaacgccccagattggggcccgagatgtggccctcggtttcctttcataaaggagttgtgtccccagcccttccactccagtaaagaactgaattggcn

SEQ ID NO: 415250 - DNA, 1931 bp, Homo sapiens
gggaccttgtggggtgagtctggctttttggcggcaactccctggccaagtgtgagcacctggaagcaaaaggatggggcaggactccagcgctcgcgggtgctctctggtggccacggggagaagaggctttgggcggcggcgggtgccaaggtcagggcagagtgggggctggacccccacggggctttggacggcacagatctgaagtggagccggcaggccttgctggggctggactttggggaggaggcctctagtggggccaggtgtggtgggggagtagggtggccgctgtctgtgttaccagtggaccttgagctccaagactgcctggcccgcctaagctggtccattggggcccaatgcataaccctggctctgagcctcaatcctgtccacataaaggagtggagcccggtccccctccagggaggggaaagaactcgtgtccagggatccacgccatggcagacgtgggctcttggggtagcaggagccgccttatgggggaatagggctcagctggtgacaccttctgcccacaggtgccaagtcctgccctgccaacttcttggcagctgccgacgacaaactcagtgggttccagggggacttcctgtggcccatactggtggttgagttcctggtggccgtggccagcaatggcctggccctgtaccgcttcagcatccggaagcagcgcccatggcaccccgccgtggtcttctctgtccagctggcagtcagcgacctgctctgcgccctgacgctgcccccgctggccgcctacctctatccccccaagcactggcgctatggggaggccgcgtgccgcctggagcgcttcctcttcacctgcaacctgctgggcagcgtcatcttcatcacctgcatcagcctcaaccgctacctgggcatcgtgcaccccttcttcgcccgaagccacctgcgacccaagcacgcctgggccgtgagcgctgccggctgggtcctggccgccctgctggccatgcccacactcagcttctcccacctgaagaggccgcagcagggggcgggcaactgcagcgtggccaggcccgaggcctgcatcaagtgtctggggacagcagaccacgggctggcggcctacagagcgtatagcctggtgctggcggggttgggctgcggcctgccgctgctgctcacgctggcagcctacggcgccctcgggcgggccgtgctacgcagcccaggcatgactgtggccgagaagctgcgtgtggcagcgttggtggccagtggtgtggccctctacgccagctcctatgtgccctaccacatcatgcgggtgctcaacgtggatgctcggcggcgctggagcacccgctgcccgagctttgcagacatagcccaggccacagcagccctggagctggggccctacgtgggctaccaggtgatgcggggcctcatgcccctggccttctgtgtccaccctctactctacatggccgcagtgcccagcctgggctgctgctgccgacactgccccggctacagggacagctggaacccagaggacgccaagagcactggccaagccctgcccctcaatgccacagccgcccctaaaccgtcagagccccagtcccgtgagctgagccaatgatgtggcctagcggaagctgcctcctcaccctaggtgttgctggagaaccctgagggcagggcccgagccccgacacatcccttcccccaaaaagcaacacctgtgcttgcagccaggtcaggcccagctgcagcccaggcaggagcagtcgcctttcccacccacagcgctggccacagggctccctgcagggtcagggaccagaccacgcccagaggaggggaggcactggcccccgccacaggactggagacgcaagaacaaaaagaaccaagta

SEQ ID NO: 415251 - DNA, 4419 bp, Homo sapiens
atttaaaaatatatgttaatctcaaagctaagattacagatttaactccttccaatctccttttccataggttataaaaagagttatttgattaaaaggtgggtcactatgaccagacgctcttctttactagttggaagctgatcatagatacacccacctcccttacataatttgtagcattccaccttcatggaagaaagcattcagaactctgctaccagatacacagcccaggaaacattatttattattctgtacacttatattccacaaagagaacaacttttaaaatccatatcagacacagaaatctgcatgacattggaacagtccatgacacagagaggacacaattgaaacagtctttatttacacggaagcagagagacagagggatgagggcaggcaccccaaaagtgacttcacattcaccaatgtttcagtggcttctaagaccacagcagagctgtggatcctgggactcacagggtatgaaaatgtgttaccctccaaagcctcaaaacaaaagggttggattaaaaacaaataccaagtgtttctggcatcagttgaaaaatatctgagaaagaggaactattgaatgtccagaaaaatcaaagttctggaggctagaaatctgacatttctctgatagagagatcactggtcatcagttcattttgggaaattcttacagttaagtgatgtgtttccttcattgtaaatttaacaggagagcatcattatggatacaagcagggttttctttaatggaatgggaactttgatgatctgatataacccctgattttaaagacaaagaatcttgaagccccaaaagatgaagccactatccccaggccacccagctagtcagctgcagacccaagtctgtaaaactatatgctgtgctttttccgccacactacacaccttctctgtttttctctcttcggtggctttcgaaggaaataaacaaataaagtgagttcaatgggcttctttactaggaaatgatttctttggtaagaatgcttcagtctcacattagcgaggctagaaaacagatcatatagcaggaactggctcccagctgagcggtaactccttttgagaattaaggcagcttcagggatttctgttcagcaggatatctggcaagagttggtagctctccttctcccttgtctcgttttcatctagaatgaaagctaaaaggtgggtgctaaataactagacattgagtagacgtaaatgtgatgttctcaaactgatattttacatttcatgaaaaataataattctttaaaaacctgaaaaaatatcaaaagcgtcaagtgtcatatacagtacacagcacccttgtcccgggtgacctctgctattaaaaacaagctacaaaaaggaagtcaaagatgacttaacataaagcccatactctctctccattaaatgtgggtggaaaggtaaacccaaatgatctccaagcacctccccgagaacttccaagggctttctgggtacccccaccctcccaggggacccaggcttggagccaggttcccatcccagattcaggagccaacttccgccgcaaggcagcaccactgcgttggtttggtgttggttcagctagcaccacatctccgattcaccccgggacaaatgtctggaggcagaaggggccacatgcagatggcaaagaggacgccggaagcggcggacgcaggaggcctcgtggaggacacagcagcatgggacagtcagggaggtcccggcaccagaagcgcgcccgcgcccaggcgcagctccgcaacctcgaggcctatgccgcgaacccgcactcgttcgtgttcacgcgaggctgcacgggtcgcaacatccggcagctcagcctggacgtgcggcgggtcatggagccgctcactgccagccgtctgcaggttcgtaagaagaactcgctgaaggactgcgtggcagtggctgggcccctcggggtcacacactttctgatcctgagcaaaacagagaccaatgtctactttaagctgatgcgcctcccaggaggccccaccttgaccttccaggtcaagaagtactcgctggtgcgtgatgtggtctcctcactgcgccggcaccgcatgcacgagcagcagtttgcccacccacccctcctggtactcaacagctttggcccccatggtatgcatgtgaagctcatggccaccatgttccagaacctgttcccctccatcaacgtgcacaaggtgaacctgaacaccatcaagcgctgcctcctcatcgactacaaccccgactcccaggagctggacttccgccactatagcatcaaagttgttcctgtgggcgcgagtcgcgggatgaagaagctgctccaggagaagttccccaacatgagccgcctgcaggacatcagcgagctgctggccacgggcgcggggctgtcggagagcgaggcagagcctgacggcgaccacaacatcacagagctgcctcaggctgtcgctggccgtggcaacatgcgggcccagcagagtgcagtgcggctcaccgagatcggcccgcggatgacactgcagctcatcaaggtccaggagggcgtcggggagggcaaagtgatgttccacagttttgtgagcaagacggaggaggagctgcaggccatcctggaagccaaggagaagaagctgcggctgaaggcgcagaggcaggcccagcaggcccagaatgtgcagcgcaagcaggagcagcgggaggcccacagaaagaagagcctggagggcatgaagaaggcacgggtcgggggtagtgatgaagaggcctctgggatcccttcaaggacggcgagcctggagttgggtgaggacgatgatgaacaggaagatgatgacatcgagtatttctgccaggcggtgggcgaggcgcccagtgaggacctgttccccgaggccaagcagaaacggcttgccaagtctccagggcggaagcggaagcggtgggaaatggatcgaggtgccaagtcctgccctgccaacttcttggcagctgccgacgacaaactcagtgggttccagggggacttcctgtggcccatactggtggttgagttcctggtggccgtggccagcaatggcctggccctgtaccgcttcagcatccggaagcagcgcccatggcaccccgccgtggtcttctctgtccagctggcagtcagcgacctgctctgcgccctgacgctgcccccgctggccgcctacctctatccccccaagcactggcgctatggggaggccgcgtgccgcctggagcgcttcctcttcacctgcaacctgctgggcagcgtcatcttcatcacctgcatcagcctcaaccgctacctgggcatcgtgcaccccttcttcgcccgaagccacctgcgacccaagcacgcctgggccgtgagcgctgccggctgggtcctggccgccctgctggccatgcccacactcagcttctcccacctgaagaggccgcagcagggggcgggcaactgcagcgtggccaggcccgaggcctgcatcaagtgtctggggacagcagaccacgggctggcggcctacagagcgtatagcctggtgctggcggggttgggctgcggcctgccgctgctgctcacgctggcagcctacggcgccctcgggcgggccgtgctacgcagcccaggcatgactgtggccgagaagctgcgtgtggcagcgttggtggccagtggtgtggccctctacgccagctcctatgtgccctaccacatcatgcgggtgctcaacgtggatgctcggcggcgctggagcacccgctgcccgagctttgcagacatagcccaggccacagcagccctggagctggggccctacgtgggctaccaggtgatgcggggcctcatgcccctggccttctgtgtccaccctctactctacatggccgcagtgcccagcctgggctgctgctgccgacactgccccggctacagggacagctggaacccagaggacgccaagagcactggccaagccctgcccctcaatgccacagccgcccctaaaccgtcagagccccagtcccgtgagctgagccaatgatgtggcctagcggaagctgcctcctcaccctaggtgttgctggagaaccctgagggcagggcccgagccccgacacatcccttcccccaaaaagcaacacctgtgcttgcagccaggtcaggcccagctgcagcccaggcaggagcagtcgcctttcccacccacagcgctggccacagggctccctgcagggtcagggaccagaccacgcccagaggaggggaggcactggcccccgccacaggactggagacgcaagaacaaaaagaaccaagta

SEQ ID NO: 415252 - DNA, 3577 bp, Homo sapiens
  misc_feature (3309)..(3309): n is a, c, g, or t
atttaaaaatatatgttaatctcaaagctaagattacagatttaactccttccaatctccttttccataggttataaaaagagttatttgattaaaaggtgggtcactatgaccagacgctcttctttactagttggaagctgatcatagatacacccacctcccttacataatttgtagcattccaccttcatggaagaaagcattcagaactctgctaccagatacacagcccaggaaacattatttattattctgtacacttatattccacaaagagaacaacttttaaaatccatatcagacacagaaatctgcatgacattggaacagtccatgacacagagaggacacaattgaaacagtctttatttacacggaagcagagagacagagggatgagggcaggcaccccaaaagtgacttcacattcaccaatgtttcagtggcttctaagaccacagcagagctgtggatcctgggactcacagggtatgaaaatgtgttaccctccaaagcctcaaaacaaaagggttggattaaaaacaaataccaagtgtttctggcatcagttgaaaaatatctgagaaagaggaactattgaatgtccagaaaaatcaaagttctggaggctagaaatctgacatttctctgatagagagatcactggtcatcagttcattttgggaaattcttacagttaagtgatgtgtttccttcattgtaaatttaacaggagagcatcattatggatacaagcagggttttctttaatggaatgggaactttgatgatctgatataacccctgattttaaagacaaagaatcttgaagccccaaaagatgaagccactatccccaggccacccagctagtcagctgcagacccaagtctgtaaaactatatgctgtgctttttccgccacactacacaccttctctgtttttctctcttcggtggctttcgaaggaaataaacaaataaagtgagttcaatgggcttctttactaggaaatgatttctttggtaagaatgcttcagtctcacattagcgaggctagaaaacagatcatatagcaggaactggctcccagctgagcggtaactccttttgagaattaaggcagcttcagggatttctgttcagcaggatatctggcaagagttggtagctctccttctcccttgtctcgttttcatctagaatgaaagctaaaaggtgggtgctaaataactagacattgagtagacgtaaatgtgatgttctcaaactgatattttacatttcatgaaaaataataattctttaaaaacctgaaaaaatatcaaaagcgtcaagtgtcatatacagtacacagcacccttgtcccgggtgacctctgctattaaaaacaagctacaaaaaggaagtcaaagatgacttaacataaagcccatactctctctccattaaatgtgggtggaaaggtaaacccaaatgatctccaagcacctccccgagaacttccaagggctttctgggtacccccaccctcccaggggacccaggcttggagccaggttcccatcccagattcaggagccaacttccgccgcaaggcagcaccactgcgttggtttggtgttggttcagctagcaccacatctccgattcaccccgggacaaatgtctggaggcagaaggggccacatgcagatggcaaagaggacgccggaagcggcggacgcaggaggcctcgtggaggacacagcagcatgggacagtcagggaggtcccggcaccagaagcgcgcccgcgcccaggcgcagctccgcaacctcgaggcctatgccgcgaacccgcactcgttcgtgttcacgcgaggctgcacgggtcgcaacatccggcagctcagcctggacgtgcggcgggtcatggagccgctcactgccagccgtctgcaggttcgtaagaagaactcgctgaaggactgcgtggcagtggctgggcccctcggggtcacacactttctgatcctgagcaaaacagagaccaatgtctactttaagctgatgcgcctcccaggaggccccaccttgaccttccaggtcaagaagtactcgctggtgcgtgatgtggtctcctcactgcgccggcaccgcatgcacgagcagcagtttgcccacccacccctcctggtactcaacagctttggcccccatggtatgcatgtgaagctcatggccaccatgttccagaacctgttcccctccatcaacgtgcacaaggtgaacctgaacaccatcaagcgctgcctcctcatcgactacaaccccgactcccaggagctggacttccgccactatagcatcaaagttgttcctgtgggcgcgagtcgcgggatgaagaagctgctccaggagaagttccccaacatgagccgcctgcaggacatcagcgagctgctggccacgggcgcggggctgtcggagagcgaggcagagcctgacggcgaccacaacatcacagagctgcctcaggctgtcgctggccgtggcaacatgcgggcccagcagagtgcagtgcggctcaccgagatcggcccgcggatgacactgcagctcatcaaggtccaggagggcgtcggggagggcaaagtgatgttccacagttttgtgagcaagacggaggaggagctgcaggccatcctggaagccaaggagaagaagctgcggctgaaggcgcagaggcaggcccagcaggcccagaatgtgcagcgcaagcaggagcagcgggaggcccacagaaagaagagcctggagggcatgaagaaggcacgggtcgggggtagtgatgaagaggcctctgggatcccttcaaggacggcgagcctggagttgggtgaggacgatgatgaacaggaagatgatgacatcgagtatttctgccaggcggtgggcgaggcgcccagtgaggacctgttccccgaggccaagcagaaacggcttgccaagtctccagggcggaagcggaagcggtgggaaatggatcgaggcaggggtcgcctttgtgaccagaagtttcccaagaccaaggacaagtcccagggagcccaggccaggcgggggcccagaggggcttcccgggatggtgggcgaggccggggccggggccgcccagggaagagagtggcctgagcccaagccgcaccggagcagcggctggattgaacgccccagattggggcccgagatgtggccctcggtttcctttcataaaggagttgtgtccccagcccttccactccagtaaagaactgaattggcnaggggtccacgtcagcgtttgggatgggggattctggagccatacaaagcaacccagagagtcctgggccggccacacccgagagtccctcccacctggtttcttcctggaagctgggtctctcccctaccctgcacggggttggtttcattggtggcagcagcagccatgagtggcccctccccccagtcccaccaaagagccgtgcaagcagacaggtcacactttcagcagatgagcttgaacctcaggagggttgtggcacaat

SEQ ID NO: 415253 - DNA, 3277 bp, Homo sapiens
  misc_feature (3277)..(3277): n is a, c, g, or t
atttaaaaatatatgttaatctcaaagctaagattacagatttaactccttccaatctccttttccataggttataaaaagagttatttgattaaaaggtgggtcactatgaccagacgctcttctttactagttggaagctgatcatagatacacccacctcccttacataatttgtagcattccaccttcatggaagaaagcattcagaactctgctaccagatacacagcccaggaaacattatttattattctgtacacttatattccacaaagagaacaacttttaaaatccatatcagacacagaaatctgcatgacattggaacagtccatgacacagagaggacacaattgaaacagtctttatttacacggaagcagagagacagagggatgagggcaggcaccccaaaagtgacttcacattcaccaatgtttcagtggcttctaagaccacagcagagctgtggatcctgggactcacagggtatgaaaatgtgttaccctccaaagcctcaaaacaaaagggttggattaaaaacaaataccaagtgtttctggcatcagttgaaaaatatctgagaaagaggaactattgaatgtccagaaaaatcaaagttctggaggctagaaatctgacatttctctgatagagagatcactggtcatcagttcattttgggaaattcttacagttaagtgatgtgtttccttcattgtaaatttaacaggagagcatcattatggatacaagcagggttttctttaatggaatgggaactttgatgatctgatataacccctgattttaaagacaaagaatcttgaagccccaaaagatgaagccactatccccaggccacccagctagtcagctgcagacccaagtctgtaaaactatatgctgtgctttttccgccacactacacaccttctctgtttttctctcttcggtggctttcgaaggaaataaacaaataaagtgagttcaatgggcttctttactaggaaatgatttctttggtaagaatgcttcagtctcacattagcgaggctagaaaacagatcatatagcaggaactggctcccagctgagcggtaactccttttgagaattaaggcagcttcagggatttctgttcagcaggatatctggcaagagttggtagctctccttctcccttgtctcgttttcatctagaatgaaagctaaaaggtgggtgctaaataactagacattgagtagacgtaaatgtgatgttctcaaactgatattttacatttcatgaaaaataataattctttaaaaacctgaaaaaatatcaaaagcgtcaagtgtcatatacagtacacagcacccttgtcccgggtgacctctgctattaaaaacaagctacaaaaaggaagtcaaagatgacttaacataaagcccatactctctctccattaaatgtgggtggaaaggtaaacccaaatgatctccaagcacctccccgagaacttccaagggctttctgggtacccccaccctcccaggggacccaggcttggagccaggttcccatcccagattcaggagccaacttccgccgcaaggcagcaccactgcgttggtttggtgttggttcagctagcaccacatctccgattcaccccgggacaaatgtctggaggcagaaggggccacatgcagatggcaaagaggacgccggaagcggcggacgcaggaggcctcgtggaggacacagcagcatgggacagtcagggaggtcccggcaccagaagcgcgcccgcgcccaggcgcagctccgcaacctcgaggcctatgccgcgaacccgcactcgttcgtgttcacgcgaggctgcacgggtcgcaacatccggcagctcagcctggacgtgcggcgggtcatggagccgctcactgccagccgtctgcaggttcgtaagaagaactcgctgaaggactgcgtggcagtggctgggcccctcggggtcacacactttctgatcctgagcaaaacagagaccaatgtctactttaagctgatgcgcctcccaggaggccccaccttgaccttccaggtcaagaagtactcgctggtgcgtgatgtggtctcctcactgcgccggcaccgcatgcacgagcagcagtttgcccacccacccctcctggtactcaacagctttggcccccatggtatgcatgtgaagctcatggccaccatgttccagaacctgttcccctccatcaacgtgcacaaggtgaacctgaacaccatcaagcgctgcctcctcatcgactacaaccccgactcccaggagctggacttccgccactatagcatcaaagttgttcctgtgggcgcgagtcgcgggatgaagaagctgctccaggagaagttccccaacatgagccgcctgcaggacatcagcgagctgctggccacgggcgcggggctgtcggagagcgaggcagagcctgacggcgaccacaacatcacagagctgcctcaggctgtcgctggccgtggcaacatgcgggcccagcagagtgcagtgcggctcaccgagatcggcccgcggatgacactgcagctcatcaaggtccaggagggcgtcggggagggcaaagtgatgttccacagttttgtgagcaagacggaggaggagctgcaggccatcctggaagccaaggagaagaagctgcggctgaaggcgcagaggcaggcccagcaggcccagaatgtgcagcgcaagcaggagcagcgggaggcccacagaaagaagagcctggagggcatgaagaaggcacgggtcgggggtagtgatgaagaggcctctgggatcccttcaaggacggcgagcctggagttgggtgaggacgatgatgaacaggaagatgatgacatcgagtatttctgccaggcggtgggcgaggcgcccagtgaggacctgttccccgaggccaagcagaaacggcttgccaagtctccagggcggaagcggaagcggtgggaaatggatcgaggcaggggtcgcctttgtgaccagaagtttcccaagaccaaggacaagtcccagggagcccaggccaggcgggggccggggccggggccgcccagggaagagagtggcctgagcccaagccgcaccggagcagcggctggattgaacgccccagattggggcccgagatgtggccctcggtttcctttcataaaggagttgtgtccccagcccttccactccagtaaagaactgaattggcn

SEQ ID NO: 415254 - DNA, 3234 bp, Homo sapiens
  misc_feature (3234)..(3234): n is a, c, g, or t
atttaaaaatatatgttaatctcaaagctaagattacagatttaactccttccaatctccttttccataggttataaaaagagttatttgattaaaaggtgggtcactatgaccagacgctcttctttactagttggaagctgatcatagatacacccacctcccttacataatttgtagcattccaccttcatggaagaaagcattcagaactctgctaccagatacacagcccaggaaacattatttattattctgtacacttatattccacaaagagaacaacttttaaaatccatatcagacacagaaatctgcatgacattggaacagtccatgacacagagaggacacaattgaaacagtctttatttacacggaagcagagagacagagggatgagggcaggcaccccaaaagtgacttcacattcaccaatgtttcagtggcttctaagaccacagcagagctgtggatcctgggactcacagggtatgaaaatgtgttaccctccaaagcctcaaaacaaaagggttggattaaaaacaaataccaagtgtttctggcatcagttgaaaaatatctgagaaagaggaactattgaatgtccagaaaaatcaaagttctggaggctagaaatctgacatttctctgatagagagatcactggtcatcagttcattttgggaaattcttacagttaagtgatgtgtttccttcattgtaaatttaacaggagagcatcattatggatacaagcagggttttctttaatggaatgggaactttgatgatctgatataacccctgattttaaagacaaagaatcttgaagccccaaaagatgaagccactatccccaggccacccagctagtcagctgcagacccaagtctgtaaaactatatgctgtgctttttccgccacactacacaccttctctgtttttctctcttcggtggctttcgaaggaaataaacaaataaagtgagttcaatgggcttctttactaggaaatgatttctttggtaagaatgcttcagtctcacattagcgaggctagaaaacagatcatatagcaggaactggctcccagctgagcggtaactccttttgagaattaaggcagcttcagggatttctgttcagcaggatatctggcaagagttggtagctctccttctcccttgtctcgttttcatctagaatgaaagctaaaaggtgggtgctaaataactagacattgagtagacgtaaatgtgatgttctcaaactgatattttacatttcatgaaaaataataattctttaaaaacctgaaaaaatatcaaaagcgtcaagtgtcatatacagtacacagcacccttgtcccgggtgacctctgctattaaaaacaagctacaaaaaggaagtcaaagatgacttaacataaagcccatactctctctccattaaatgtgggtggaaaggtaaacccaaatgatctccaagcacctccccgagaacttccaagggctttctgggtacccccaccctcccaggggacccaggcttggagccaggttcccatcccagattcaggagccaacttccgccgcaaggcagcaccactgcgttggtttggtgttggttcagctagcaccacatctccgattcaccccgggacaaatgtctggaggcagaaggggccacatgcagatggcaaagaggacgccggaagcggcggacgcaggaggcctcgtggaggacacagcagcatgggacagtcagggaggtcccggcaccagaagcgcgcccgcgcccaggcgcagctccgcaacctcgaggcctatgccgcgaacccgcactcgttcgtgttcacgcgaggctgcacgggtcgcaacatccggcagctcagcctggacgtgcggcgggtcatggagccgctcactgccagccgtctgcaggttcgtaagaagaactcgctgaaggactgcgtggcagtggctgggcccctcggggtcacacactttctgatcctgagcaaaacagagaccaatgtctactttaagctgatgcgcctcccaggaggccccaccttgaccttccaggtcaagaagtactcgctggtgcgtgatgtggtctcctcactgcgccggcaccgcatgcacgagcagcagtttgcccacccacccctcctggtactcaacagctttggcccccatggtatgcatgtgaagctcatggccaccatgttccagaacctgttcccctccatcaacgtgcacaaggtgaacctgaacaccatcaagcgctgcctcctcatcgactacaaccccgactcccaggagctggacttccgccactatagcatcaaagttgttcctgtgggcgcgagtcgcgggatgaagaagctgctccaggagaagttccccaacatgagccgcctgcaggacatcagcgagctgctggccacgggcgcggggctgtcggagagcgaggcagagcctgacggcgaccacaacatcacagagctgcctcaggctgtcgctggccgtggcaacatgcgggcccagcagagtgcagtgcggctcaccgagatcggcccgcggatgacactgcagctcatcaaggtccaggagggcgtcggggagggcaaagtgatgttccacagttttgtgagcaagacggaggaggagctgcaggccatcctggaagccaaggagaagaagctgcggctgaaggcgcagaggcaggcccagcaggcccagaatgtgcagcgcaagcaggagcagcgggaggcccacagaaagaagagcctggagggcatgaagaaggcacgggtcgggggtagtgatgaagaggcctctgggatcccttcaaggacggcgagcctggagttggacctgttccccgaggccaagcagaaacggcttgccaagtctccagggcggaagcggaagcggtgggaaatggatcgaggcaggggtcgcctttgtgaccagaagtttcccaagaccaaggacaagtcccagggagcccaggccaggcgggggcccagaggggcttcccgggatggtgggcgaggccggggccggggccgcccagggaagagagtggcctgagcccaagccgcaccggagcagcggctggattgaacgccccagattggggcccgagatgtggccctcggtttcctttcataaaggagttgtgtccccagcccttccactccagtaaagaactgaattggcn

SEQ ID NO: 415255 - DNA, 3502 bp, Homo sapiens
  misc_feature (3234)..(3234): n is a, c, g, or t
atttaaaaatatatgttaatctcaaagctaagattacagatttaactccttccaatctccttttccataggttataaaaagagttatttgattaaaaggtgggtcactatgaccagacgctcttctttactagttggaagctgatcatagatacacccacctcccttacataatttgtagcattccaccttcatggaagaaagcattcagaactctgctaccagatacacagcccaggaaacattatttattattctgtacacttatattccacaaagagaacaacttttaaaatccatatcagacacagaaatctgcatgacattggaacagtccatgacacagagaggacacaattgaaacagtctttatttacacggaagcagagagacagagggatgagggcaggcaccccaaaagtgacttcacattcaccaatgtttcagtggcttctaagaccacagcagagctgtggatcctgggactcacagggtatgaaaatgtgttaccctccaaagcctcaaaacaaaagggttggattaaaaacaaataccaagtgtttctggcatcagttgaaaaatatctgagaaagaggaactattgaatgtccagaaaaatcaaagttctggaggctagaaatctgacatttctctgatagagagatcactggtcatcagttcattttgggaaattcttacagttaagtgatgtgtttccttcattgtaaatttaacaggagagcatcattatggatacaagcagggttttctttaatggaatgggaactttgatgatctgatataacccctgattttaaagacaaagaatcttgaagccccaaaagatgaagccactatccccaggccacccagctagtcagctgcagacccaagtctgtaaaactatatgctgtgctttttccgccacactacacaccttctctgtttttctctcttcggtggctttcgaaggaaataaacaaataaagtgagttcaatgggcttctttactaggaaatgatttctttggtaagaatgcttcagtctcacattagcgaggctagaaaacagatcatatagcaggaactggctcccagctgagcggtaactccttttgagaattaaggcagcttcagggatttctgttcagcaggatatctggcaagagttggtagctctccttctcccttgtctcgttttcatctagaatgaaagctaaaaggtgggtgctaaataactagacattgagtagacgtaaatgtgatgttctcaaactgatattttacatttcatgaaaaataataattctttaaaaacctgaaaaaatatcaaaagcgtcaagtgtcatatacagtacacagcacccttgtcccgggtgacctctgctattaaaaacaagctacaaaaaggaagtcaaagatgacttaacataaagcccatactctctctccattaaatgtgggtggaaaggtaaacccaaatgatctccaagcacctccccgagaacttccaagggctttctgggtacccccaccctcccaggggacccaggcttggagccaggttcccatcccagattcaggagccaacttccgccgcaaggcagcaccactgcgttggtttggtgttggttcagctagcaccacatctccgattcaccccgggacaaatgtctggaggcagaaggggccacatgcagatggcaaagaggacgccggaagcggcggacgcaggaggcctcgtggaggacacagcagcatgggacagtcagggaggtcccggcaccagaagcgcgcccgcgcccaggcgcagctccgcaacctcgaggcctatgccgcgaacccgcactcgttcgtgttcacgcgaggctgcacgggtcgcaacatccggcagctcagcctggacgtgcggcgggtcatggagccgctcactgccagccgtctgcaggttcgtaagaagaactcgctgaaggactgcgtggcagtggctgggcccctcggggtcacacactttctgatcctgagcaaaacagagaccaatgtctactttaagctgatgcgcctcccaggaggccccaccttgaccttccaggtcaagaagtactcgctggtgcgtgatgtggtctcctcactgcgccggcaccgcatgcacgagcagcagtttgcccacccacccctcctggtactcaacagctttggcccccatggtatgcatgtgaagctcatggccaccatgttccagaacctgttcccctccatcaacgtgcacaaggtgaacctgaacaccatcaagcgctgcctcctcatcgactacaaccccgactcccaggagctggacttccgccactatagcatcaaagttgttcctgtgggcgcgagtcgcgggatgaagaagctgctccaggagaagttccccaacatgagccgcctgcaggacatcagcgagctgctggccacgggcgcggggctgtcggagagcgaggcagagcctgacggcgaccacaacatcacagagctgcctcaggctgtcgctggccgtggcaacatgcgggcccagcagagtgcagtgcggctcaccgagatcggcccgcggatgacactgcagctcatcaaggtccaggagggcgtcggggagggcaaagtgatgttccacagttttgtgagcaagacggaggaggagctgcaggccatcctggaagccaaggagaagaagctgcggctgaaggcgcagaggcaggcccagcaggcccagaatgtgcagcgcaagcaggagcagcgggaggcccacagaaagaagagcctggagggcatgaagaaggcacgggtcgggggtagtgatgaagaggcctctgggatcccttcaaggacggcgagcctggagttggacctgttccccgaggccaagcagaaacggcttgccaagtctccagggcggaagcggaagcggtgggaaatggatcgaggcaggggtcgcctttgtgaccagaagtttcccaagaccaaggacaagtcccagggagcccaggccaggcgggggcccagaggggcttcccgggatggtgggcgaggccggggccggggccgcccagggaagagagtggcctgagcccaagccgcaccggagcagcggctggattgaacgccccagattggggcccgagatgtggccctcggtttcctttcataaaggagttgtgtccccagcccttccactccagtaaagaactgaattggcnaggggtccacgtcagcgtttgggatgggggattctggagccatacaaagcaacccagagagtcctgggccggccacacccgagagtccctcccacctggtttcttcctggaagctgggtctctcccctaccctgcacggggttggtttcattggtggcagcagcagccatgagtggcccctccccccagtcccaccaaagagccgtgcaagcagacaggtcacactttcagcagatgagcttgaacctcaggagggttgtggcacaat

SEQ ID NO: 415256 - DNA, 3387 bp, Homo sapiens
  misc_feature (3119)..(3119): n is a, c, g, or t
atttaaaaatatatgttaatctcaaagctaagattacagatttaactccttccaatctccttttccataggttataaaaagagttatttgattaaaaggtgggtcactatgaccagacgctcttctttactagttggaagctgatcatagatacacccacctcccttacataatttgtagcattccaccttcatggaagaaagcattcagaactctgctaccagatacacagcccaggaaacattatttattattctgtacacttatattccacaaagagaacaacttttaaaatccatatcagacacagaaatctgcatgacattggaacagtccatgacacagagaggacacaattgaaacagtctttatttacacggaagcagagagacagagggatgagggcaggcaccccaaaagtgacttcacattcaccaatgtttcagtggcttctaagaccacagcagagctgtggatcctgggactcacagggtatgaaaatgtgttaccctccaaagcctcaaaacaaaagggttggattaaaaacaaataccaagtgtttctggcatcagttgaaaaatatctgagaaagaggaactattgaatgtccagaaaaatcaaagttctggaggctagaaatctgacatttctctgatagagagatcactggtcatcagttcattttgggaaattcttacagttaagtgatgtgtttccttcattgtaaatttaacaggagagcatcattatggatacaagcagggttttctttaatggaatgggaactttgatgatctgatataacccctgattttaaagacaaagaatcttgaagccccaaaagatgaagccactatccccaggccacccagctagtcagctgcagacccaagtctgtaaaactatatgctgtgctttttccgccacactacacaccttctctgtttttctctcttcggtggctttcgaaggaaataaacaaataaagtgagttcaatgggcttctttactaggaaatgatttctttggtaagaatgcttcagtctcacattagcgaggctagaaaacagatcatatagcaggaactggctcccagctgagcggtaactccttttgagaattaaggcagcttcagggatttctgttcagcaggatatctggcaagagttggtagctctccttctcccttgtctcgttttcatctagaatgaaagctaaaaggtgggtgctaaataactagacattgagtagacgtaaatgtgatgttctcaaactgatattttacatttcatgaaaaataataattctttaaaaacctgaaaaaatatcaaaagcgtcaagtgtcatatacagtacacagcacccttgtcccgggtgacctctgctattaaaaacaagctacaaaaaggaagtcaaagatgacttaacataaagcccatactctctctccattaaatgtgggtggaaaggtaaacccaaatgatctccaagcacctccccgagaacttccaagggctttctgggtacccccaccctcccaggggacccaggcttggagccaggttcccatcccagattcaggagccaacttccgccgcaaggcagcaccactgcgttggtttggtgttggttcagctagcaccacatctccgattcaccccgggacaaatgtctggaggcagaaggggccacatgcagatggcaaagaggacgccggaagcggcggacgcaggaggcctcgtggaggacacagcagcatgggacagtcagggaggtcccggcaccagaagcgcgcccgcgcccaggcgcagctccgcaacctcgaggcctatgccgcgaacccgcactcgttcgtgttcacgcgaggctgcacgggtcgcaacatccggcagctcagcctggacgtgcggcgggtcatggagccgctcactgccagccgtctgcaggttcgtaagaagaactcgctgaaggactgcgtggcagtggctgggcccctcggggtcacacactttctgatcctgagcaaaacagagaccaatgtctactttaagctgatgcgcctcccaggaggccccaccttgaccttccaggtcaagaagtactcgctggtgcgtgatgtggtctcctcactgcgccggcaccgcatgcacgagcagcagtttgcccacccacccctcctggtactcaacagctttggcccccatggtatgcatgtgaagctcatggccaccatgttccagaacctgttcccctccatcaacgtgcacaaggtgaacctgaacaccatcaagcgctgcctcctcatcgactacaaccccgactcccaggagctggacttccgccactatagcatcaaagttgttcctgtgggcgcgagtcgcgggatgaagaagctgctccaggagaagttccccaacatgagccgcctgcaggacatcagcgagctgctggccacgggcgcggggctgtcggagagcgaggcagagcctgacggcgaccacaacatcacagagctgcctcaggctgtcgctggccgtggcaacatgcgggcccagcagagtgcagtgcggctcaccgagatcggcccgcggatgacactgcagctcatcaaggtccaggagggcgtcggggagggcaaagtgatgttccacagttttgtgagcaagacggaggaggagctgcaggccatcctggaagccaaggagaagaagctgcggctgaaggcgcagaggcaggcccagcaggcccagaatgtgcagcgcaagcaggagcagcgggaggcccacagaaagaagagcctggagggcatgaagaaggcacgggtcgggggtagtgatgaagaggcctctgggatcccttcaaggacggcgagcctggagttgggtgaggacgatgatgaacaggaagatgatgacatcgagtatttctgccaggcggtgggcgaggcgcccagtgaggacctgttccccgaggccaagcagaaacggcttgccaagtcgcaccggagcagcggctggattgaacgccccagattggggcccgagatgtggccctcggtttcctttcataaaggagttgtgtccccagcccttccactccagtaaagaactgaattggcnaggggtccacgtcagcgtttgggatgggggattctggagccatacaaagcaacccagagagtcctgggccggccacacccgagagtccctcccacctggtttcttcctggaagctgggtctctcccctaccctgcacggggttggtttcattggtggcagcagcagccatgagtggcccctccccccagtcccaccaaagagccgtgcaagcagacaggtcacactttcagcagatgagcttgaacctcaggagggttgtggcacaat

SEQ ID NO: 415257 - DNA, 3397 bp, Homo sapiens
  misc_feature (3397)..(3397): n is a, c, g, or t
atttaaaaatatatgttaatctcaaagctaagattacagatttaactccttccaatctccttttccataggttataaaaagagttatttgattaaaaggtgggtcactatgaccagacgctcttctttactagttggaagctgatcatagatacacccacctcccttacataatttgtagcattccaccttcatggaagaaagcattcagaactctgctaccagatacacagcccaggaaacattatttattattctgtacacttatattccacaaagagaacaacttttaaaatccatatcagacacagaaatctgcatgacattggaacagtccatgacacagagaggacacaattgaaacagtctttatttacacggaagcagagagacagagggatgagggcaggcaccccaaaagtgacttcacattcaccaatgtttcagtggcttctaagaccacagcagagctgtggatcctgggactcacagggtatgaaaatgtgttaccctccaaagcctcaaaacaaaagggttggattaaaaacaaataccaagtgtttctggcatcagttgaaaaatatctgagaaagaggaactattgaatgtccagaaaaatcaaagttctggaggctagaaatctgacatttctctgatagagagatcactggtcatcagttcattttgggaaattcttacagttaagtgatgtgtttccttcattgtaaatttaacaggagagcatcattatggatacaagcagggttttctttaatggaatgggaactttgatgatctgatataacccctgattttaaagacaaagaatcttgaagccccaaaagatgaagccactatccccaggccacccagctagtcagctgcagacccaagtctgtaaaactatatgctgtgctttttccgccacactacacaccttctctgtttttctctcttcggtggctttcgaaggaaataaacaaataaagtgagttcaatgggcttctttactaggaaatgatttctttggtaagaatgcttcagtctcacattagcgaggctagaaaacagatcatatagcaggaactggctcccagctgagcggtaactccttttgagaattaaggcagcttcagggatttctgttcagcaggatatctggcaagagttggtagctctccttctcccttgtctcgttttcatctagaatgaaagctaaaaggtgggtgctaaataactagacattgagtagacgtaaatgtgatgttctcaaactgatattttacatttcatgaaaaataataattctttaaaaacctgaaaaaatatcaaaagcgtcaagtgtcatatacagtacacagcacccttgtcccgggtgacctctgctattaaaaacaagctacaaaaaggaagtcaaagatgacttaacataaagcccatactctctctccattaaatgtgggtggaaaggtaaacccaaatgatctccaagcacctccccgagaacttccaagggctttctgggtacccccaccctcccaggggacccaggcttggagccaggttcccatcccagattcaggagccaacttccgccgcaaggcagcaccactgcgttggtttggtgttggttcagctagcaccacatctccgattcaccccgggacaaatgtctggaggcagaaggggccacatgcagatggcaaagaggacgccggaagcggcggacgcaggaggcctcgtggaggacacagcagcatgggacagtcagggagggtaaggcccggcagcttgggaggcaggtggcgcaggtggggtcccggccgaggtcgcggcgctgaccctttgtctctcgtcgccgcagtcccggcaccagaagcgcgcccgcgcccaggcgcagctccgcaacctcgaggcctatgccgcgaacccgcactcgttcgtgttcacgcgaggctgcacgggtcgcaacatccggcagctcagcctggacgtgcggcgggtcatggagccgctcactgccagccgtctgcaggttcgtaagaagaactcgctgaaggactgcgtggcagtggctgggcccctcggggtcacacactttctgatcctgagcaaaacagagaccaatgtctactttaagctgatgcgcctcccaggaggccccaccttgaccttccaggtcaagaagtactcgctggtgcgtgatgtggtctcctcactgcgccggcaccgcatgcacgagcagcagtttgcccacccacccctcctggtactcaacagctttggcccccatggtatgcatgtgaagctcatggccaccatgttccagaacctgttcccctccatcaacgtgcacaaggtgaacctgaacaccatcaagcgctgcctcctcatcgactacaaccccgactcccaggagctggacttccgccactatagcatcaaagttgttcctgtgggcgcgagtcgcgggatgaagaagctgctccaggagaagttccccaacatgagccgcctgcaggacatcagcgagctgctggccacgggcgcggggctgtcggagagcgaggcagagcctgacggcgaccacaacatcacagagctgcctcaggctgtcgctggccgtggcaacatgcgggcccagcagagtgcagtgcggctcaccgagatcggcccgcggatgacactgcagctcatcaaggtccaggagggcgtcggggagggcaaagtgatgttccacagttttgtgagcaagacggaggaggagctgcaggccatcctggaagccaaggagaagaagctgcggctgaaggcgcagaggcaggcccagcaggcccagaatgtgcagcgcaagcaggagcagcgggaggcccacagaaagaagagcctggagggcatgaagaaggcacgggtcgggggtagtgatgaagaggcctctgggatcccttcaaggacggcgagcctggagttgggtgaggacgatgatgaacaggaagatgatgacatcgagtatttctgccaggcggtgggcgaggcgcccagtgaggacctgttccccgaggccaagcagaaacggcttgccaagtctccagggcggaagcggaagcggtgggaaatggatcgaggcaggggtcgcctttgtgaccagaagtttcccaagaccaaggacaagtcccagggagcccaggccaggcgggggcccagaggggcttcccgggatggtgggcgaggccggggccggggccgcccagggaagagagtggcctgagcccaagccgcaccggagcagcggctggattgaacgccccagattggggcccgagatgtggccctcggtttcctttcataaaggagttgtgtccccagcccttccactccagtaaagaactgaattggcn

SEQ ID NO: 415258 - DNA, 3386 bp, Homo sapiens
  misc_feature (3386)..(3386): n is a, c, g, or t
atttaaaaatatatgttaatctcaaagctaagattacagatttaactccttccaatctccttttccataggttataaaaagagttatttgattaaaaggtgggtcactatgaccagacgctcttctttactagttggaagctgatcatagatacacccacctcccttacataatttgtagcattccaccttcatggaagaaagcattcagaactctgctaccagatacacagcccaggaaacattatttattattctgtacacttatattccacaaagagaacaacttttaaaatccatatcagacacagaaatctgcatgacattggaacagtccatgacacagagaggacacaattgaaacagtctttatttacacggaagcagagagacagagggatgagggcaggcaccccaaaagtgacttcacattcaccaatgtttcagtggcttctaagaccacagcagagctgtggatcctgggactcacagggtatgaaaatgtgttaccctccaaagcctcaaaacaaaagggttggattaaaaacaaataccaagtgtttctggcatcagttgaaaaatatctgagaaagaggaactattgaatgtccagaaaaatcaaagttctggaggctagaaatctgacatttctctgatagagagatcactggtcatcagttcattttgggaaattcttacagttaagtgatgtgtttccttcattgtaaatttaacaggagagcatcattatggatacaagcagggttttctttaatggaatgggaactttgatgatctgatataacccctgattttaaagacaaagaatcttgaagccccaaaagatgaagccactatccccaggccacccagctagtcagctgcagacccaagtctgtaaaactatatgctgtgctttttccgccacactacacaccttctctgtttttctctcttcggtggctttcgaaggaaataaacaaataaagtgagttcaatgggcttctttactaggaaatgatttctttggtaagaatgcttcagtctcacattagcgaggctagaaaacagatcatatagcaggaactggctcccagctgagcggtaactccttttgagaattaaggcagcttcagggatttctgttcagcaggatatctggcaagagttggtagctctccttctcccttgtctcgttttcatctagaatgaaagctaaaaggtgggtgctaaataactagacattgagtagacgtaaatgtgatgttctcaaactgatattttacatttcatgaaaaataataattctttaaaaacctgaaaaaatatcaaaagcgtcaagtgtcatatacagtacacagcacccttgtcccgggtgacctctgctattaaaaacaagctacaaaaaggaagtcaaagatgacttaacataaagcccatactctctctccattaaatgtgggtggaaaggtaaacccaaatgatctccaagcacctccccgagaacttccaagggctttctgggtacccccaccctcccaggggacccaggcttggagccaggttcccatcccagattcaggagccaacttccgccgcaaggcagcaccactgcgttggtttggtgttggttcagctagcaccacatctccgattcaccccgggacaaatgtctggaggcagaaggggccacatgcagatggcaaagaggacgccggaagcggcggacgcaggaggcctcgtggaggacacagcagcatgggacagtcagggaggtcccggcaccagaagcgcgcccgcgcccaggcgcagctccgcaacctcgaggcctatgccgcgaacccgcactcgttcgtgttcacgcgaggctgcacgggtcgcaacatccggcagctcagcctggacgtgcggcgggtcatggagccgctcactgccagccgtctgcaggttcgtaagaagaactcgctgaaggactgcgtggcagtggctgggcccctcggggtcacacactttctgatcctgagcaaaacagagaccaatgtctactttaagctgatgcgcctcccaggaggccccaccttgaccttccaggtcaagaagtactcgctggtgcgtgatgtggtctcctcactgcgccggcaccgcatgcacgagcagcagtttgcccacccacccctcctggtactcaacagctttggcccccatggtatgcatgtgaagctcatggccaccatgttccagaacctgttcccctccatcaacgtgcacaaggtgaacctgaacaccatcaagcgctgcctcctcatcgactacaaccccgactcccaggagctggacttccgccactatagcatcaaagttgttcctgtgggcgcgagtcgcgggatgaagaagctgctccaggagaagttccccaacatgagccgcctgcaggacatcagcgagctgctggccacgggcgcggggctgtcggagagcgaggcagagcctgacggcgaccacaacatcacagagctgcctcaggctgtcgctggccgtggcaacatgcgggcccagcagagtgcagtgcggctcaccgaggtgaggcccagggcagggggacccccgggctccaccagtcccaacggtgggctgacgcttcttcctcgtcccctcagatcggcccgcggatgacactgcagctcatcaaggtccaggagggcgtcggggagggcaaagtgatgttccacagttttgtgagcaagacggaggaggagctgcaggccatcctggaagccaaggagaagaagctgcggctgaaggcgcagaggcaggcccagcaggcccagaatgtgcagcgcaagcaggagcagcgggaggcccacagaaagaagagcctggagggcatgaagaaggcacgggtcgggggtagtgatgaagaggcctctgggatcccttcaaggacggcgagcctggagttgggtgaggacgatgatgaacaggaagatgatgacatcgagtatttctgccaggcggtgggcgaggcgcccagtgaggacctgttccccgaggccaagcagaaacggcttgccaagtctccagggcggaagcggaagcggtgggaaatggatcgaggcaggggtcgcctttgtgaccagaagtttcccaagaccaaggacaagtcccagggagcccaggccaggcgggggcccagaggggcttcccgggatggtgggcgaggccggggccggggccgcccagggaagagagtggcctgagcccaagccgcaccggagcagcggctggattgaacgccccagattggggcccgagatgtggccctcggtttcctttcataaaggagttgtgtccccagcccttccactccagtaaagaactgaattggcn

SEQ ID NO: 415259 - DNA, 1006 bp, Homo sapiens
  misc_feature (1006)..(1006): n is a, c, g, or t
tgaacaccatcaagcgctgcctcctcatcgactacaaccccgactcaacagctttggcccccatggtatgcatgtgaagctcatggccaccatgttccagaacctttccccaacatgagccgcctgcaggacatcagcgagctgctggccacgggcgcggggctgtcggagagcgaggcagagcctgacggcgaccacaacatcacagagctgcctcaggctgtcgctggccgtggcaacatgcgggcccagcagagtgcagtgcggctcaccgagatcggcccgcggatgacactgcagctcatcaaggtccaggagggcgtcggggagggcaaagtgatgttccacagttttgtgagcaagacggaggaggagctgcaggccatcctggaagccaaggagaagaagctgcggctgaaggcgcagaggcaggcccagcaggcccagaatgtgcagcgcaagcaggagcagcgggaggcccacagaaagaagagcctggagggcatgaagaaggcacgggtcgggggtagtgatgaagaggcctctgggatcccttcaaggacggcgagcctggagttgggtgaggacgatgatgaacaggaagatgatgacatcgagtatttctgccaggcggtgggcgaggcgcccagtgaggacctgttccccgaggccaagcagaaacggcttgccaagtctccagggcggaagcggaagcggtgggaaatggatcgaggcaggggtcgcctttgtgaccagaagtttcccaagaccaaggacaagtcccagggagcccaggccaggcgggggcccagaggggcttcccgggatggtgggcgaggccggggccggggccgcccagggaagagagtggcctgagcccaagccgcaccggagcagcggctggattgaacgccccagattggggcccgagatgtggccctcggtttcctttcataaaggagttgtgtccccagcccttccactccagtaaagaactgaattggcn

SEQ ID NO: 415260 - DNA, 931 bp, Homo sapiens
  misc_feature (931)..(931): n is a, c, g, or t
tgaacaccatcaagcgctgcctcctcatcgactacaaccccgactcaacagctttggcccccatggtatgcatgtgaagctcatggccaccatgttccagaacctttccccaacatgagccgcctgcaggacatcagcgagctgctggccacgggcgcggggctgtcggagagcgaggcagagcctgacggcgaccacaacatcacagagctgcctcaggctgtcgctggccgtggcaacatgcgggcccagcagagtgcagtgcggctcaccgagatcggcccgcggatgacactgcagctcatcaaggtccaggagggcgtcggggagggcaaagtgatgttccacagttttgtgagcaagacggaggaggagctgcaggccatcctggaagccaaggagaagaagctgcggctgaaggcgcagaggcaggcccagcaggcccagaatgtgcagcgcaagcaggagcagcgggaggcccacagaaagaagagcctggagggcatgaagaaggcacgggtcgggggtagtgatgaagaggcctctgggatcccttcaaggacggcgagcctggagttggacctgttccccgaggccaagcagaaacggcttgccaagtctccagggcggaagcggaagcggtgggaaatggatcgaggcaggggtcgcctttgtgaccagaagtttcccaagaccaaggacaagtcccagggagcccaggccaggcgggggcccagaggggcttcccgggatggtgggcgaggccggggccggggccgcccagggaagagagtggcctgagcccaagccgcaccggagcagcggctggattgaacgccccagattggggcccgagatgtggccctcggtttcctttcataaaggagttgtgtccccagcccttccactccagtaaagaactgaattggcn

SEQ ID NO: 415261 - DNA, 305 bp, Homo sapiens
  misc_feature (10)..(10): n is a, c, g, or t
  misc_feature (12)..(14): n is a, c, g, or t
gcctgggccnannncataaacaaacagtactaaaaaagaagcacctgagtggtctaagaaacaaaagatgaagacctagtgttttggatgggaagcacctgtagaccattatatactcctgaagttctttttctgatggaaaacaaaattcagcttaatcgtgtactcagcattttttaaataacaatgtttatttgaactaatattaaattaacaaattcagtgtaatcaaaatgtgtaaagaacaatcaatatactttatttttttttctattttataaaataaatatatatgctatgcttta

SEQ ID NO: 415262 - DNA, 340 bp, Homo sapiens
  misc_feature (36)..(37): n is a, c, g, or t
gggagcgccgccctggcccgccgggcccgttttttnnggctgttgcggcataaaaaccaacctactaaaaaagaagcacctgagtggtctaagaaacaaaagatgaagacctagtgttttggatgggaagcacctgtagaccattatatactcctgaagttctttttctgatggaaaacaaaattcagcttaatcgtgtactcagcattttttaaataacaatgtttatttgaactaatattaaattaacaaattcagtgtaatcaaaatgtgtaaagaacaatcaatatactttatttttttttctattttataaaataaatatatatgctatgcttta

SEQ ID NO: 415263 - DNA, 303 bp, Homo sapiens
ctttttctttttttaaacagcctaaaactaaaaaagaagcacctgagtggtctaagaaacaaaagatgaagacctagtgttttggatgggaagcacctgtagaccattatatactcctgaagttctttttctgatggaaaacaaaattcagcttaatcgtgtactcagcattttttaaataacaatgtttatttgaactaatattaaattaacaaattcagtgtaatcaaaatgtgtaaagaacaatcaatatactttatttttttttctattttataaaataaatatatatgctatgcttta

SEQ ID NO: 415264 - DNA, 847 bp, Homo sapiens
  misc_feature (40)..(41): n is a, c, g, or t
  misc_feature (69)..(69): n is a, c, g, or t
ctggggacaccagcccggtggactctttcccggccccccnncacacatttcagcggcactgactctctngttgaaccggcgcaacagggtacagagaactacaacttagtacagaaagcaaagtaacagaatttctccatcaaagtaaattaaaatcttttgaaagtgagcgtgttcaacttctgcaagaggaaacagcaagaaatctcacacagtgtcaattggaatgtgaaaaatatcagaaaaaattggaggttttaaccaaagaattttatagtctccaagcctcttctgaaaaacgcattactgaacttcaagcacagaactcagagcatcaagcaaggctagacatttatgagaaactggaaaaagagcttgatgaaataataatgcaaactgcagaaattgaaaatgaagatgaggctgaaagggttcttttttcctacggctatggtgctaatgttcccacaacagccaaaagacgactaaagcaaagtgttcacttggcaagaagagtgcttcaattagaaaaacaaaactcgctgattttaaaagatctggaacatcgaaaggaccaagtaacacagctttcacaagagcttgacagagccaattcgctattaaaccagactcaacagccttacaggtatctcattgaatcagtgcgtcagagagattctaagattgattcactgacggaatctattgcacaacttgagaaagatgtcagcaacttaaataaagaaaagtcagctttactacagacgaagaatcaaatggcattagatttagaacaacttctaaatcatcgtgaggtatttttcctattttgtcataattgtaatca

SEQ ID NO: 415265 - DNA, 505 bp, Homo sapiens
gaggaaaagcaacactttctgcaaggggaggacataagaaaagtgtagggagaaaagcaaggcccaggaaaatgtttgagagaagacatttcttcaaaataataatgtaagatgttaaaaattagagtttgtttaattaaattaatactgagttgctttgattatattaggctctttattatttcatttttatcctgaagtgttggagatggttaaataaataccaaggtacagagaactacaacttagtacagaaagcaaagtaacagaatttctccatcaaagtaaattaaaatcttttgaaagtgagcgtgttcaacttctgcaagaggaaacagcaagaaatctcacacagtgtcaattggaatgtgaaaaatatcagaaaaaattggaggtacatgtacaagcttttctttcaacattagcatggcatgtaaactccctaagtacaagatttatattgagctttatttctcctataggatgtatcactatcctgcacaaa

SEQ ID NO: 415266 - DNA, 2772 bp, Homo sapiens
catccgggagagttgacttccggcggcttgtgggagtgctggttctgtcctccttgcgggtgcggagatggttgtcttggttacgggtcctaacggtcccctgccttgaaatcccttgttgagggcctgcaaccttgtgcttccgactggagacgcctttggtccctcggtgtctgcactggctgctggtcaaggcttcagtgtggagtaattgacactttcgagaatattaaaatcaaattagagaagaaaactgatccataataataaaaatgtctcgaaaaatttcaaaggagtcaaaaaaagtgaacatctctagttctctggaatctgaagatattagtttagaaacaacagttcctacggatgatatttcctcatcagaagagcgagagggcaaagtcagaatcaccaggcagctaattgaacgaaaagaactacttcataatattcagttactaaaaattgagctatcccagaaaactatgatgatcgacaatttgaaagtggattatcttacaaagattgaagaattggaggagaaacttaatgatgcacttcaccagaagcagctactaacattgagattagacaaccaattggcttttcaacagaaagatgccagcaaatatcaagaattaatgaaacaagaaatggaaaccattttgttgagacagaaacaactagaagagacaaatcttcagctaagagaaaaagctggagatgttcgtcgaaacctgcgtgactttgagttgacagaagagcaatatattaaattaaaagcttttcctgaagatcagctttctattcctgaatatgtatctgttcgcttctatgagctagtgaatccattaagaaaggaaatctgtgaactacaagtgaaaaagaatatcctagcagaagaattaagtacaaacaaaaaccaactgaagcagctgacagagacatatgaggaagatcgaaaaaactactctgaagttcaaattagatgtcaacgtttggccttagaattagcagacacaaaacagttaattcagcaaggtgactaccgtcaagagaactatgataaagtcaagagtgaacgtgatgcacttgaacaggaagtaattgagcttaggagaaaacatgaaatacttgaagcctctcacatgattcaaacaaaagaacgaagtgaattatcaaaagaggtagtcaccttagagcaaactgttactttactgcaaaaggataaagaatatcttaatcgccaaaacatggagcttagtgttcgctgtgctcatgaagaggatcgccttgaaagacttcaagctcaactggaagaaagcaaaaaggctagagaagagatgtatgaaaaatatgtagcatccagagaccattataaaacagaatatgaaaataaactacatgatgaactagaacaaatcagattgaaaaccaaccaagaaattgatcaacttcgaaatgcctctagggaaatgtatgaacgagaaaacagaaatctccgagaagcaagggataatgctgtggctgaaaaggaacgagcagtgatggctgaaaaggatgctttagaaaaacacgatcagctcttagacaggtacagagaactacaacttagtacagaaagcaaagtaacagaatttctccatcaaagtaaattaaaatcttttgaaagtgagcgtgttcaacttctgcaagaggaaacagcaagaaatctcacacagtgtcaattggaatgtgaaaaatatcagaaaaaattggaggttttaaccaaagaattttatagtctccaagcctcttctgaaaaacgcattactgaacttcaagcacagaactcagagcatcaagcaaggctagacatttatgagaaactggaaaaagagcttgatgaaataataatgcaaactgcagaaattgaaaatgaagatgaggctgaaagggttcttttttcctacggctatggtgctaatgttcccacaacagccaaaagacgactaaagcaaagtgttcacttggcaagaagagtgcttcaattagaaaaacaaaactcgctgattttaaaagatctggaacatcgaaaggaccaagtaacacagctttcacaagagcttgacagagccaattcgctattaaaccagactcaacagccttacaggtatctcattgaatcagtgcgtcagagagattctaagattgattcactgacggaatctattgcacaacttgagaaagatgtcagcaacttaaataaagaaaagtcagctttactacagacgaagaatcaaatggcattagatttagaacaacttctaaatcatcgtgaggaattggcagcaatgaaacagattctcgttaagatgcatagtaaacattctgagaacagcttacttctcactaaaacagaaccaaaacatgtgacagaaaatcagaaatcaaagactttgaatgtgcctaaagagcatgaagacaatatatttacacctaaaccaacactctttactaaaaaagaagcacctgagtggtctaagaaacaaaagatgaagacctagtgttttggatgggaagcacctgtagaccattatatactcctgaagttctttttctgatggaaaacaaaattcagcttaatcgtgtactcagcattttttaaataacaatgtttatttgaactaatattaaattaacaaattcagtgtaatcaaaatgtgtaaagaacaatcaatatactttatttttttttctattttataaaataaatatatatgctatgcttta

SEQ ID NO: 415267 - DNA, 3083 bp, Homo sapiens
catccgggagagttgacttccggcggcttgtgggagtgctggttctgtcctccttgcgggtgcggagatggttgtcttggttacgggtcctaacggtcccctgccttgaaatcccttgttgagggcctgcaaccttgtgcttccgactggagacgcctttggtccctcggtgtctgcactggctgctggtcaaggcttcagtgtggagtaattgacactttcgagaatattaaaatcaaattagagaagaaaactgatccataataataaaaatgtctcgaaaaatttcaaaggagtcaaaaaaagtgaacatctctagttctctggaatctgaagatattagtttagaaacaacagttcctacggatgatatttcctcatcagaagagcgagagggcaaagtcagaatcaccaggcagctaattgaacgaaaagaactacttcataatattcagttactaaaaattgagctatcccagaaaactatgatgatcgacaatttgaaagtggattatcttacaaagattgaagaattggaggagaaacttaatgatgcacttcaccagaagcagctactaacattgagattagacaaccaattggcttttcaacagaaagatgccagcaaatatcaagaattaatgaaacaagaaatggaaaccattttgttgagacagaaacaactagaagagacaaatcttcagctaagagaaaaagctggagatgttcgtcgaaacctgcgtgactttgagttgacagaagagcaatatattaaattaaaagcttttcctgaagatcagctttctattcctgaatatgtatctgttcgcttctatgagctagtgaatccattaagaaaggaaatctgtgaactacaagtgaaaaagaatatcctagcagaagaattaagtacaaacaaaaaccaactgaagcagctgacagagacatatgaggaagatcgaaaaaactactctgaagttcaaattagatgtcaacgtttggccttagaattagcagacacaaaacagttaattcagcaaggtgactaccgtcaagagaactatgataaagtcaagagtgaacgtgatgcacttgaacaggaagtaattgagcttaggagaaaacatgaaatacttgaagcctctcacatgattcaaacaaaagaacgaagtgaattatcaaaagaggtagtcaccttagagcaaactgttactttactgcaaaaggataaagaatatcttaatcgccaaaacatggagcttagtgttcgctgtgctcatgaagaggatcgccttgaaagacttcaagctcaactggaagaaagcaaaaaggctagagaagagatgtatgaaaaatatgtagcatccagagaccattataaaacagaatatgaaaataaactacatgatgaactagaacaaatcagattgaaaaccaaccaagaaattgatcaacttcgaaatgcctctagggaaatgtatgaacgagaaaacagaaatctccgagaagcaagggataatgctgtggctgaaaaggaacgagcagtgatggctgaaaaggatgctttagaaaaacacgatcagctcttagacaggtacagagaactacaacttagtacagaaagcaaagtaacagaatttctccatcaaagtaaattaaaatcttttgaaagtgagcgtgttcaacttctgcaagaggaaacagcaagaaatctcacacagtgtcaattggaatgtgaaaaatatcagaaaaaattggaggttttaaccaaagaattttatagtctccaagcctcttctgaaaaacgcattactgaacttcaagcacagaactcagagcatcaagcaaggctagacatttatgagaaactggaaaaagagcttgatgaaataataatgcaaactgcagaaattgaaaatgaagatgaggctgaaagggttcttttttcctacggctatggtgctaatgttcccacaacagccaaaagacgactaaagcaaagtgttcacttggcaagaagagtgcttcaattagaaaaacaaaactcgctgattttaaaagatctggaacatcgaaaggaccaagtaacacagctttcacaagagcttgacagagccaattcgctattaaaccagactcaacagccttacaggtatctcattgaatcagtgcgtcagagagattctaagattgattcactgacggaatctattgcacaacttgagaaagatgtcagcaacttaaataaagaaaagtcagctttactacagacgaagaatcaaatggcattagatttagaacaacttctaaatcatcgtgaggaattggcagcaatgaaacagattctcgttaagatgcatagtaaacattctgagaacagcttacttctcactaaaacagaaccaaaacatgtgacagaaaatcagaaatcaaagactttgaatgtgcctaaagagcatgaagacaatatatttacacctaaaccaacactctttactaaaaaagaagcacctgagtggtctaagaaacaaaagatgaagacctagtgttttggatgggaagcacctgtagaccattatatactcctgaagttctttttctgatggaaaacaaaattcagcttaatcgtgtactcagcattttttaaataacaatgtttatttgaactaatattaaattaacaaattcagtgtaatcaaaatgtgtaaagaacaatcaatatactttatttttttttctattttataaaataaatatatatgctatgctttaaattttggagctttcataaatgttcaatgcattttaagtgtgtggcttataaatattttggtatttttctatactacgtaaattctgagtttaaatgtcatacacaaatactaagacactttgcatttttaaaaattaagaatcatttgtgaagtccactacgaggtacttcaaaagcccagtaatggtggtcagataccatgtagatggatacagattgttgactcttttgaagttgtttttttcttatattttatattaccattaaccaataaaatctggcagaaagtctgctattccattggtaaagt

SEQ ID NO: 415268 - DNA, 2693 bp, Homo sapiens
catccgggagagttgacttccggcggcttgtgggagtgctggttctgtcctccttgcgggtgcggagatggttgtcttggttacgggtcctaacggtcccctgccttgaaatcccttgttgagggcctgcaaccttgtgcttccgactggagacgcctttggtccctcggtgtctgcactggctgctggtcaaggcttcagtgtggagtaattgacactttcgagaatattaaaatcaaattagagaagaaaactgatccataataataaaaatgtctcgaaaaatttcaaaggagtcaaaaaaagtgaacatctctagttctctggaatctgaagatattagtttagaaacaacagttcctacggatgatatttcctcatcagaagagcgagagggcaaagtcagaatcaccaggcagctaattgaacgaaaagaactacttcataatattcagttactaaaaattgagctatcccagaaaactatgatgatcgacaatttgaaagtggattatcttacaaagattgaagaattggaggagaaacttaatgatgcacttcaccagaagcagctactaacattgagattagacaaccaattggcttttcaacagaaagatgccagcaaatatcaagaattaatgaaacaagaaatggaaaccattttgttgagacagaaacaactagaagagacaaatcttcagctaagagaaaaagctggagatgttcgtcgaaacctgcgtgactttgagttgacagaagagcaatatattaaattaaaagcttttcctgaagatcagctttctattcctgaatatgtatctgttcgcttctatgagctagtgaatccattaagaaaggaaatctgtgaactacaagtgaaaaagaatatcctagcagaagaattaagtacaaacaaaaaccaactgaagcagctgacagagacatatgaggaagatcgaaaaaactactctgaagttcaaattagatgtcaacgtttggccttagaattagcagacacaaaacagttaattcagcaaggtgactaccgtcaagagaactatgataaagtcaagagtgaacgtgatgcacttgaacaggaagtaattgagcttaggagaaaacatgaaatacttgaagcctctcacatgattcaaacaaaagaacgaagtgaattatcaaaagaggtagtcaccttagagcaaactgttactttactgcaaaaggataaagaatatcttaatcgccaaaacatggagcttagtgttcgctgtgctcatgaagaggatcgccttgaaagacttcaagctcaactggaagaaagcaaaaaggctagagaagagatgtatgaaaaatatgtagcatccagagaccattataaaacagaatatgaaaataaactacatgatgaactagaacaaatcagattgaaaaccaaccaagaaattgatcaacttcgaaatgcctctagggaaatgtatgaacgagaaaacagaaatctccgagaagcaagggataatgctgtggctgaaaaggaacgagcagtgatggctgaaaaggatgctttagaaaaacacgatcagctcttagacaggtacagagaactacaacttagtacagaaagcaaagtaacagaatttctccatcaaagtaaattaaaatcttttgaaagtgagcgtgttcaacttctgcaagaggaaacagcaagaaatctcacacagtgtcaattggaatgtgaaaaatatcagaaaaaattggaggttttaaccaaagaattttatagtctccaagcctcttctgaaaaacgcattactgaacttcaagcacagaactcagagcatcaagcaaggctagacatttatgagaaactggaaaaagagcttgatgaaataataatgcaaactgcagaaattgaaaatgaagatgaggctgaaagggttcttttttcctacggctatggtgctaatgttcccacaacagccaaaagacgactaaagcaaagtgttcacttggcaagaagagtgcttcaattagaaaaacaaaactcgctgattttaaaagatctggaacatcgaaaggaccaagtaacacagctttcacaagagcttgacagagccaattcgctattaaaccagactcaacagccttacaggtatctcattgaatcagtgcgtcagagagattctaagattgattcactgacggaatctattgcacaacttgagaaagatgtcagcaacttaaataaagaaaagtcagctttactacagacgaagaatcaaatggcattagatttagaacaacttctaaatcatcgtgaggaattggcagcaatgaaacagattctcgttaagatgcatagtaaacattctgagaacagcttacttctcactaaaacagaaccaaaacatgtgacagaaaatcagaaatcaaagactttgaatgtgcctaaagagcatgaagacaatatatttacacctaaaccaacactctttactaaaaaagaagcacctgagtggtctaagaaacaaaagatgaagacctagtgttttggatgggaagcacctgtagaccattatatactcctgaagttctttttctgatggaaaacaaaattcagcttaatcgtgtactcagcattttttaaataacaatgtttatttgaactaatattaaattaacaaattcagtgt

SEQ ID NO: 415269 - DNA, 2590 bp, Homo sapiens
catccgggagagttgacttccggcggcttgtgggagtgctggttctgtcctccttgcgggtgcggagatggttgtcttggttacgggtcctaacggtcccctgccttgaaatcccttgttgagggcctgcaaccttgtgcttccgactggagacgcctttggtccctcggtgtctgcactggctgctggtcaaggcttcagtgtggagtaattgacactttcgagaatattaaaatcaaattagagaagaaaactgatccataataataaaaatgtctcgaaaaatttcaaaggagtcaaaaaaagtgaacatctctagttctctggaatctgaagatattagtttagaaacaacagttcctacggatgatatttcctcatcagaagagcgagagggcaaagtcagaatcaccaggcagctaattgaacgaaaagaactacttcataatattcagttactaaaaattgagctatcccagaaaactatgatgatcgacaatttgaaagtggattatcttacaaagattgaagaattggaggagaaacttaatgatgcacttcaccagaagcagctactaacattgagattagacaaccaattggcttttcaacagaaagatgccagcaaatatcaagaattaatgaaacaagaaatggaaaccattttgttgagacagaaacaactagaagagacaaatcttcagctaagagaaaaagctggagatgttcgtcgaaacctgcgtgactttgagttgacagaagagcaatatattaaattaaaagcttttcctgaagatcagctttctattcctgaatatgtatctgttcgcttctatgagctagtgaatccattaagaaaggaaatctgtgaactacaagtgaaaaagaatatcctagcagaagaattaagtacaaacaaaaaccaactgaagcagctgacagagacatatgaggaagatcgaaaaaactactctgaagttcaaattagatgtcaacgtttggccttagaattagcagacacaaaacagttaattcagcaaggtgactaccgtcaagagaactatgataaagtcaagagtgaacgtgatgcacttgaacaggaagtaattgagcttaggagaaaacatgaaatacttgaagcctctcacatgattcaaacaaaagaacgaagtgaattatcaaaagagagaccattataaaacagaatatgaaaataaactacatgatgaactagaacaaatcagattgaaaaccaaccaagaaattgatcaacttcgaaatgcctctagggaaatgtatgaacgagaaaacagaaatctccgagaagcaagggataatgctgtggctgaaaaggaacgagcagtgatggctgaaaaggatgctttagaaaaacacgatcagctcttagacaggtacagagaactacaacttagtacagaaagcaaagtaacagaatttctccatcaaagtaaattaaaatcttttgaaagtgagcgtgttcaacttctgcaagaggaaacagcaagaaatctcacacagtgtcaattggaatgtgaaaaatatcagaaaaaattggaggttttaaccaaagaattttatagtctccaagcctcttctgaaaaacgcattactgaacttcaagcacagaactcagagcatcaagcaaggctagacatttatgagaaactggaaaaagagcttgatgaaataataatgcaaactgcagaaattgaaaatgaagatgaggctgaaagggttcttttttcctacggctatggtgctaatgttcccacaacagccaaaagacgactaaagcaaagtgttcacttggcaagaagagtgcttcaattagaaaaacaaaactcgctgattttaaaagatctggaacatcgaaaggaccaagtaacacagctttcacaagagcttgacagagccaattcgctattaaaccagactcaacagccttacaggtatctcattgaatcagtgcgtcagagagattctaagattgattcactgacggaatctattgcacaacttgagaaagatgtcagcaacttaaataaagaaaagtcagctttactacagacgaagaatcaaatggcattagatttagaacaacttctaaatcatcgtgaggaattggcagcaatgaaacagattctcgttaagatgcatagtaaacattctgagaacagcttacttctcactaaaacagaaccaaaacatgtgacagaaaatcagaaatcaaagactttgaatgtgcctaaagagcatgaagacaatatatttacacctaaaccaacactctttactaaaaaagaagcacctgagtggtctaagaaacaaaagatgaagacctagtgttttggatgggaagcacctgtagaccattatatactcctgaagttctttttctgatggaaaacaaaattcagcttaatcgtgtactcagcattttttaaataacaatgtttatttgaactaatattaaattaacaaattcagtgtaatcaaaatgtgtaaagaacaatcaatatactttatttttttttctattttataaaataaatatatatgctatgcttta

SEQ ID NO: 415270 - DNA, 3011 bp, Homo sapiens
catccgggagagttgacttccggcggcttgtgggagtgctggttctgtcctccttgcgggtgcggagatggttgtcttggttacgggtcctaacggtcccctgccttgaaatcccttgttgagggcctgcaaccttgtgcttccgactggagacgcctttggtccctcggtgtctgcactggctgctggtcaaggcttcagtgtggagtaattgacactttcgagaatattaaaatcaaattagagaagaaaactgatccataataataaaaatgtctcgaaaaatttcaaaggagtcaaaaaaagtgaacatctctagttctctggaatctgaagatattagtttagaaacaacagttcctacggatgatatttcctcatcagaagagcgagagggcaaagtcagaatcaccaggcagctaattgaacgaaaagaactacttcataatattcagttactaaaaattgagctatcccagaaaactatgatgatcgacaatttgaaagtggattatcttacaaagattgaagaattggaggagaaacttaatgatgcacttcaccagaagcagctactaacattgagattagacaaccaattggcttttcaacagaaagatgccagcaaatatcaagaattaatgaaacaagaaatggaaaccattttgttgagacagaaacaactagaagagacaaatcttcagctaagagaaaaagctggagatgttcgtcgaaacctgcgtgactttgagttgacagaagagcaatatattaaattaaaagcttttcctgaagatcagctttctattcctgaatatgtatctgttcgcttctatgagctagtgaatccattaagaaaggaaatctgtgaactacaagtgaaaaagaatatcctagcagaagaattaagtacaaacaaaaaccaactgaagcagctgacagagacatatgaggaagatcgaaaaaactactctgaagttcaaattagatgtcaacgtttggccttagaattagcagacacaaaacagttaattcagcaaggtgactaccgtcaagagaactatgataaagtcaagagtgaacgtgatgcacttgaacaggaagtaattgagcttaggagaaaacatgaaatacttgaagcctctcacatgattcaaacaaaagaacgaagtgaattatcaaaagaggtagtcaccttagagcaaactgttactttactgcaaaaggataaagaatatcttaatcgccaaaacatggagcttagtgttcgctgtgctcatgaagaggatcgccttgaaagacttcaagctcaactggaagaaagcaaaaaggctagagaagagatgtatgaaaaatatgtagcatccagagaccattataaaacagaatatgaaaataaactacatgatgaactagaacaaatcagattgaaaaccaaccaagaaattgatcaacttcgaaatgcctctagggaaatgtatgaacgagaaaacagaaatctccgagaagcaagggataatgctgtggctgaaaaggaacgagcagtgatggctgaaaaggatgctttagaaaaacacgatcagctcttagacaggtacagagaactacaacttagtacagaaagcaaagtaacagaatttctccatcaaagtaaattaaaatcttttgaaagtgagcgtgttcaacttctgcaagaggaaacagcaagaaatctcacacagtgtcaattggaatgtgaaaaatatcagaaaaaattggaggttttaaccaaagaattttatagtctccaagcctcttctgaaaaacgcattactgaacttcaagcacagaactcagagcatcaagcaaggctagacatttatgagaaactggaaaaagagcttgatgaaataataatgcaaactgcagaaattgaaaatgaagatgaggctgaaagggttcttttttcctacggctatggtgctaatgttcccacaacagccaaaagacgactaaagcaaagtgttcacttggcaagaagagtgcttcaattagaaaaacaaaactcgctgattttaaaagatctggaacatcgaaaggaccaagtaacacagctttcacaagagcttgacagagccaattcgctattaaaccagactcaacagccttacaggtatctcattgaattctaagattgattcactgacggaatctattgcacaacttgagaaagatgtcagcaacttaaataaagaaaagtcagctttacttggcattagatttagaacaacttctaaatcatcgtgaggaattggcagcaatgaaacagattctcgttaagatgcatagtaaacattctcactaaaacagaaccaaaacatgtgacagaaaatcagaaatcaaagactttgaatgtgcctaaagagcatgaagacaatatatttacacctaaaccaacactctttactaaaaaagaagcacctgagtggtctaagaaacaaaagatgaagacctagtgttttggatgggaagcacctgtagaccattatatactcctgaaaaaattcagcttaatcgtgtactcagcattttttaaataacaatgtttatttgaactaatattaaattaacaaattcagtgtaatcaaaatgtgtaaagaacaatcaatatactttatttttttttctattttataaaataaatatatatgctatgctttaaattttggagctttcataaatgttcaatgcattttaagtgtgtggcttataaatattttggtatttttctatactacgtaaattctgagtttaaatgtcatacacaaatactaagacactttgcatttttaaaaattaagaatcatttgtgaagtccactacgaggtacttcaaaagcccagtaatggtggtcagataccatgtagatggatacagattgttgactcttttgaagttgtttttttcttatattttatattaccattaaccaataaaatctggcagaaagtctgctattccattggtaaagt

SEQ ID NO: 415271 - DNA, 2286 bp, Homo sapiens
catccgggagagttgacttccggcggcttgtgggagtgctggttctgtcctccttgcgggtgcggagatggttgtcttggttacgggtcctaacggtcccctgccttgaaatcccttgttgagggcctgcaaccttgtgcttccgactggagacgcctttggtccctcggtgtctgcactggctgctggtcaaggcttcagtgtggagtaattgacactttcgagaatattaaaatcaaattagagaagaaaactgatccataataataaaaatgtctcgaaaaatttcaaaggagtcaaaaaaagtgaacatctctagttctctggaatctgaagatattagtttagaaacaacagttcctacggatgatatttcctcatcagaagagcgagagggcaaagtcagaatcaccaggcagctaattgaacgaaaagaactacttcataatattcagttactaaaaattgagctatcccagaaaactatgatgatcgacaatttgaaagtggattatcttacaaagattgaagaattggaggagaaacttaatgatgcacttcaccagaagcagctactaacattgagattagacaaccaattggcttttcaacagaaagatgccagcaaatatcaagaattaatgaaacaagaaatggaaaccattttgttgagacagaaacaactagaagagacaaatcttcagctaagagaaaaagctggagatgttcgtcgaaacctgcgtgactttgagttgacagaagagcaatatattaaattaaaagcttttcctgaagatcagctttctattcctgaatatgtatctgttcgcttctatgagctagtgaatccattaagaaaggaaatctgtgaactacaagtgaaaaagaatatcctagcagaagaattaagtacaaacaaaaaccaactgaagcagctgacagagacatatgaggaagatcgaaaaaactactctgaagttcaaattagatgtcaacgtttggccttagaattagcagacacaaaacagttaattcagcaaggtgactaccgtcaagagaactatgataaagtcaagagtgaacgtgatgcacttgaacaggaagtaattgagcttaggagaaaacatgaaatacttgaagcctctcacatgattcaaacaaaagaacgaagtgaattatcaaaagaggtagtcaccttagagcaaactgttactttactgcaaaaggataaagaatatcttaatcgccaaaacatggagcttagtgttcgctgtgctcatgaagaggatcgccttgaaagacttcaagctcaactggaagaaagcaaaaaggctagagaagagatgtatgaaaaatatgtagcatccagagaccattataaaacagaatatgaaaataaactacatgatgaactagaacaaatcagattgaaaaccaaccaagaaattgatcaacttcgaaatgcctctagggaaatgtatgaacgagaaaacagaaatctccgagaagcaagggataatgctgtggctgaaaaggaacgagcagtgatggctgaaaaggatgctttagaaaaacacgatcagctcttagacaggtacagagaactacaacttagtacagaaagcaaagtaacagaatttctccatcaaagtaaattaaaatcttttgaaagtgagcgtgttcaacttctgcaagaggaaacagcaagaaatctcacacagtgtcaattggaatgtgaaaaatatcagaaaaaattggaggttttaaccaaagaattttatagtctccaagcctcttctgaaaaacgcattactgaacttcaagcacagaactcagagcatcaagcaaggctagacatttatgagaaactggaaaaagagcttgatgaaataataatgcaaactgcagaaattgaaaatgaagatgaggctgaaagggttcttttttcctacggctatggtgctaatgttcccacaacagccaaaagacgactaaagcaaagtgttcacttggcaagaagagtgcttcaattagaaaaacaaaactcgctgattttaaaagatctggaacatcgaaaggaccaagtaacacagctttcacaagagcttgacagagccaattcgctattaaaccagactcaacagccttacaggtatctcattgaatcagtgcgtcagagagattctaagattgattcactgacggaatctattgcacaacttgagaaagatgtcaggtaaaccatctacaaatcttttatttgaataataaagacattgttaccat

SEQ ID NO: 415272 - DNA, 2473 bp, Homo sapiens
catccgggagagttgacttccggcggcttgtgggagtgctggttctgtcctccttgcgggtgcggagatggttgtcttggttacgggtcctaacggtcccctgccttgaaatcccttgttgagggcctgcaaccttgtgcttccgactggagacgcctttggtccctcggtgtctgcactggctgctggtcaaggcttcagtgtggagtaattgacactttcgagattgaagaattggaggagaaacttaatgatgcacttcaccagaagcagctactaacattgagattagacaaccaattggcttttcaacagaaagatgccagcaaatatcaagaattaatgaaacaagaaatggaaaccattttgttgagacagaaacaactagaagagacaaatcttcagctaagagaaaaagctggagatgttcgtcgaaacctgcgtgactttgagttgacagaagagcaatatattaaattaaaagcttttcctgaagatcagctttctattcctgaatatgtatctgttcgcttctatgagctagtgaatccattaagaaaggaaatctgtgaactacaagtgaaaaagaatatcctagcagaagaattaagtacaaacaaaaaccaactgaagcagctgacagagacatatgaggaagatcgaaaaaactactctgaagttcaaattagatgtcaacgtttggccttagaattagcagacacaaaacagttaattcagcaaggtgactaccgtcaagagaactatgataaagtcaagagtgaacgtgatgcacttgaacaggaagtaattgagcttaggagaaaacatgaaatacttgaagcctctcacatgattcaaacaaaagaacgaagtgaattatcaaaagaggtagtcaccttagagcaaactgttactttactgcaaaaggataaagaatatcttaatcgccaaaacatggagcttagtgttcgctgtgctcatgaagaggatcgccttgaaagacttcaagctcaactggaagaaagcaaaaaggctagagaagagatgtatgaaaaatatgtagcatccagagaccattataaaacagaatatgaaaataaactacatgatgaactagaacaaatcagattgaaaaccaaccaagaaattgatcaacttcgaaatgcctctagggaaatgtatgaacgagaaaacagaaatctccgagaagcaagggataatgctgtggctgaaaaggaacgagcagtgatggctgaaaaggatgctttagaaaaacacgatcagctcttagacaggtacagagaactacaacttagtacagaaagcaaagtaacagaatttctccatcaaagtaaattaaaatcttttgaaagtgagcgtgttcaacttctgcaagaggaaacagcaagaaatctcacacagtgtcaattggaatgtgaaaaatatcagaaaaaattggaggttttaaccaaagaattttatagtctccaagcctcttctgaaaaacgcattactgaacttcaagcacagaactcagagcatcaagcaaggctagacatttatgagaaactggaaaaagagcttgatgaaataataatgcaaactgcagaaattgaaaatgaagatgaggctgaaagggttcttttttcctacggctatggtgctaatgttcccacaacagccaaaagacgactaaagcaaagtgttcacttggcaagaagagtgcttcaattagaaaaacaaaactcgctgattttaaaagatctggaacatcgaaaggaccaagtaacacagctttcacaagagcttgacagagccaattcgctattaaaccagactcaacagccttacaggtatctcattgaatcagtgcgtcagagagattctaagattgattcactgacggaatctattgcacaacttgagaaagatgtcagcaacttaaataaagaaaagtcagctttactacagacgaagaatcaaatggcattagatttagaacaacttctaaatcatcgtgaggaattggcagcaatgaaacagattctcgttaagatgcatagtaaacattctgagaacagcttacttctcactaaaacagaaccaaaacatgtgacagaaaatcagaaatcaaagactttgaatgtgcctaaagagcatgaagacaatatatttacacctaaaccaacactctttactaaaaaagaagcacctgagtggtctaagaaacaaaagatgaagacctagtgttttggatgggaagcacctgtagaccattatatactcctgaagttctttttctgatggaaaacaaaattcagcttaatcgtgtactcagcattttttaaataacaatgtttatttgaactaatattaaattaacaaattcagtgtaatcaaaatgtgtaaagaacaatcaatatactttatttttttttctattttataaaataaatatatatgctatgcttta

SEQ ID NO: 415273 - DNA, 1949 bp, Homo sapiens
  misc_feature (1892)..(1892): n is a, c, g, or t
catccgggagagttgacttccggcggcttgtgggagtgctggttctgtcctccttgcgggtgcggagatggttgtcttggttacgggtcctaacggtcccctgccttgaaatcccttgttgagggcctgcaaccttgtgcttccgactggagacgcctttggtccctcggtgtctgcactggctgctggtcaaggcttcagtgtggagtaattgacactttcgagaatattaaaatcaaattagagaagaaaactgatccataataataaaaatgtctcgaaaaatttcaaaggagtcaaaaaaagtgaacatctctagttctctggaatctgaagatattagtttagaaacaacagttcctacggatgatatttcctcatcagaagagcgagagggcaaagtcagaatcaccaggcagctaattgaacgaaaagaactacttcataatattcagttactaaaaattgagctatcccagaaaactatgatgatcgacaatttgaaagtggattatcttacaaagattgaagaattggaggagaaacttaatgatgcacttcaccagaagcagctactaacattgagattagacaaccaattggcttttcaacagaaagatgccagcaaatatcaagaattaatgaaacaagaaatggaaaccattttgttgagacagaaacaactagaagagacaaatcttcagctaagagaaaaagctggagatgttcgtcgaaacctgcgtgactttgagttgacagaagagcaatatattaaattaaaagcttttcctgaagatcagctttctattcctgaatatgtatctgttcgcttctatgagctagtgaatccattaagaaaggaaatctgtgaactacaagtgaaaaagaatatcctagcagaagaattaagtacaaacaaaaaccaactgaagcagctgacagagacatatgaggaagatcgaaaaaactactctgaagttcaaattagatgtcaacgtttggccttagaattagcagacacaaaacagttaattcagcaaggtgactaccgtcaagagaactatgataaagtcaagagtgaacgtgatgcacttgaacaggaagtaattgagcttaggagaaaacatgaaatacttgaagcctctcacatgattcaaacaaaagaacgaagtgaattatcaaaagaggtagtcaccttagagcaaactgttactttactgcaaaaggataaagaatatcttaatcgccaaaacatggagcttagtgttcgctgtgctcatgaagaggatcgccttgaaagacttcaagctcaactggaagaaagcaaaaaggctagagaagagatgtatgaaaaatatgtagcatccagagaccattataaaacagaatatgaaaataaactacatgatgaactagaacaaatcagattgaaaaccaaccaagaaattgatcaacttcgaaatgcctctagggaaatgtatgaacgagaaaacagaaatctccgagaagcaagggataatgctgtggctgaaaaggaacgagcagtgatggctgaaaaggatgctttagaaaaacacgatcagctcttagacaggtacagagaactacaacttagtacagaaagcaaagtaacagaatttctccatcaaagtaaattaaaatcttttgaaagtgagcgtgttcaacttctgcaagaggaaacagcaagaaatctcacacagtgtcaattggaatgtgaaaaatatcagaaaaaattggaggttttaaccaaagaattttatagtctccaagcctcttctgaaaaacgcattactgaacttcaagcacagaactcagagcatcaagcaaggctagacatttatgagaaactgggctctttttctacggtatgngctaagttcacaacgccaaagacactaaggaagtgtacctggcggagagtgtcaatt

SEQ ID NO: 415274 - DNA, 1871 bp, Homo sapiens
catccgggagagttgacttccggcggcttgtgggagtgctggttctgtcctccttgcgggtgcggagatggttgtcttggttacgggtcctaacggtcccctgccttgaaatcccttgttgagggcctgcaaccttgtgcttccgactggagacgcctttggtccctcggtgtctgcactggctgctggtcaaggcttcagtgtggagtaattgacactttcgagaatattaaaatcaaattagagaagaaaactgatccataataataaaaatgtctcgaaaaatttcaaaggagtcaaaaaaagtgaacatctctagttctctggaatctgaagatattagtttagaaacaacagttcctacggatgatatttcctcatcagaagagcgagagggcaaagtcagaatcaccaggcagctaattgaacgaaaagaactacttcataatattcagttactaaaaattgagctatcccagaaaactatgatgatcgacaatttgaaagtggattatcttacaaagattgaagaattggaggagaaacttaatgatgcacttcaccagaagcagctactaacattgagattagacaaccaattggcttttcaacagaaagatgccagcaaatatcaagaattaatgaaacaagaaatggaaaccattttgttgagacagaaacaactagaagagacaaatcttcagctaagagaaaaagctggagatgttcgtcgaaacctgcgtgactttgagttgacagaagagcaatatattaaattaaaagcttttcctgaagatcagctttctattcctgaatatgtatctgttcgcttctatgagctagtgaatccattaagaaaggaaatctgtgaactacaagtgaaaaagaatatcctagcagaagaattaagtacaaacaaaaaccaactgaagcagctgacagagacatatgaggaagatcgaaaaaactactctgaagttcaaattagatgtcaacgtttggccttagaattagcagacacaaaacagttaattcagcaaggtgactaccgtcaagagaactatgataaagtcaagagtgaacgtgatgcacttgaacaggaagtaattgagcttaggagaaaacatgaaatacttgaagcctctcacatgattcaaacaaaagaacgaagtgaattatcaaaagaggtagtcaccttagagcaaactgttactttactgcaaaaggataaagaatatcttaatcgccaaaacatggagcttagtgttcgctgtgctcatgaagaggatcgccttgaaagacttcaagctcaactggaagaaagcaaaaaggctagagaagagatgtatgaaaaatatgtagcatccagagaccattataaaacagaatatgaaaataaactacatgatgaactagaacaaatcagattgaaaaccaaccaagaaattgatcaacttcgaaatgcctctagggaaatgtatgaacgagaaaacagaaatctccgagaagcaagggataatgctgtggctgaaaaggaacgagcagtgatggctgaaaaggatgctttagaaaaacacgatcagctcttagacaggtacagagaactacaacttagtacagaaagcaaagtaacagaatttctccatcaaagtaaattaaaatcttttgaaagtgagcgtgttcaacttctgcaagaggaaacagcaagaaatctcacacagtgtcaattggaatgtgaaaaatatcagaaaaaattggaggtacatgtacaagcttttctttcaacattagcatggcatgtaaactccctaagtacaagatttatattgagctttatttctcctataggatgtatcactatcctgcacaaa

SEQ ID NO: 415275 - DNA, 1406 bp, Homo sapiens
gaggaaaagcaacactttctgcaaggggaggacataagaaaagtgtagggagaaaagcaaggcccaggaaaatgtttgagagaagacatttcttcaaaataataatgtaagatgttaaaaattagagtttgtttaattaaattaatactgagttgctttgattatattaggctctttattatttcatttttatcctgaagtgttggagatggttaaataaataccaaggtacagagaactacaacttagtacagaaagcaaagtaacagaatttctccatcaaagtaaattaaaatcttttgaaagtgagcgtgttcaacttctgcaagaggaaacagcaagaaatctcacacagtgtcaattggaatgtgaaaaatatcagaaaaaattggaggttttaaccaaagaattttatagtctccaagcctcttctgaaaaacgcattactgaacttcaagcacagaactcagagcatcaagcaaggctagacatttatgagaaactggaaaaagagcttgatgaaataataatgcaaactgcagaaattgaaaatgaagatgaggctgaaagggttcttttttcctacggctatggtgctaatgttcccacaacagccaaaagacgactaaagcaaagtgttcacttggcaagaagagtgcttcaattagaaaaacaaaactcgctgattttaaaagatctggaacatcgaaaggaccaagtaacacagctttcacaagagcttgacagagccaattcgctattaaaccagactcaacagccttacaggtatctcattgaatcagtgcgtcagagagattctaagattgattcactgacggaatctattgcacaacttgagaaagatgtcagcaacttaaataaagaaaagtcagctttactacagacgaagaatcaaatggcattagatttagaacaacttctaaatcatcgtgaggaattggcagcaatgaaacagattctcgttaagatgcatagtaaacattctgagaacagcttacttctcactaaaacagaaccaaaacatgtgacagaaaatcagaaatcaaagactttgaatgtgcctaaagagcatgaagacaatatatttacacctaaaccaacactctttactaaaaaagaagcacctgagtggtctaagaaacaaaagatgaagacctagtgttttggatgggaagcacctgtagaccattatatactcctgaagttctttttctgatggaaaacaaaattcagcttaatcgtgtactcagcattttttaaataacaatgtttatttgaactaatattaaattaacaaattcagtgtaatcaaaatgtgtaaagaacaatcaatatactttatttttttttctattttataaaataaatatatatgctatgcttta

SEQ ID NO: 415276 - DNA, 1083 bp, Homo sapiens
taccatggctggccaatagatttagataggtatgggaaggatcgttgcacctcgttttgtatatgtaaagggatgcgtagggatgggagggcgatgaggactaggatgatggcggacaggatagttcagacggtttctatttcctgagcgtctgagatgttagtattagttagttttgttgtgagtgtcaggaaaagggcatacaggactaggaagcagatattgaaaatgaagatgaggctgaaagggttcttttttcctacggctatggtgctaatgttcccacaacagccaaaagacgactaaagcaaagtgttcacttggcaagaagagtgcttcaattagaaaaacaaaactcgctgattttaaaagatctggaacatcgaaaggaccaagtaacacagctttcacaagagcttgacagagccaattcgctattaaaccagactcaacagccttacaggtatctcattgaatcagtgcgtcagagagattctaagattgattcactgacggaatctattgcacaacttgagaaagatgtcagcaacttaaataaagaaaagtcagctttactacagacgaagaatcaaatggcattagatttagaacaacttctaaatcatcgtgaggaattggcagcaatgaaacagattctcgttaagatgcatagtaaacattctgagaacagcttacttctcactaaaacagaaccaaaacatgtgacagaaaatcagaaatcaaagactttgaatgtgcctaaagagcatgaagacaatatatttacacctaaaccaacactctttactaaaaaagaagcacctgagtggtctaagaaacaaaagatgaagacctagtgttttggatgggaagcacctgtagaccattatatactcctgaagttctttttctgatggaaaacaaaattcagcttaatcgtgtactcagcattttttaaataacaatgtttatttgaactaatattaaattaacaaattcagtgtaatcaaaatgtgtaaagaacaatcaatatactttatttttttttctattttataaaataaatatatatgctatgcttta

SEQ ID NO: 415277 - DNA, 614 bp, Homo sapiens
ctttttctttttttaaacagcctaaaactaaaaaagaagcacctgagtggtctaagaaacaaaagatgaagacctagtgttttggatgggaagcacctgtagaccattatatactcctgaagttctttttctgatggaaaacaaaattcagcttaatcgtgtactcagcattttttaaataacaatgtttatttgaactaatattaaattaacaaattcagtgtaatcaaaatgtgtaaagaacaatcaatatactttatttttttttctattttataaaataaatatatatgctatgctttaaattttggagctttcataaatgttcaatgcattttaagtgtgtggcttataaatattttggtatttttctatactacgtaaattctgagtttaaatgtcatacacaaatactaagacactttgcatttttaaaaattaagaatcatttgtgaagtccactacgaggtacttcaaaagcccagtaatggtggtcagataccatgtagatggatacagattgttgactcttttgaagttgtttttttcttatattttatattaccattaaccaataaaatctggcagaaagtctgctattccattggtaaagt

SEQ ID NO: 415278 - DNA, 429 bp, Homo sapiens
tgatatgttccagaagtttacaagcacctagtgtggagtgagcagtagtagatgagtagtaatggagtgtcagtagaagggaggaaatactgtcaaaggtaagaggttataaatcatctggcccttgagggaagttaattgaacattaaggcttgatagaaagtattagtggctagggtccattaatgactgtcttgttgtagttttgtaaatatttatctttattactgataagtgagagcactacaaattacaaattttaattgtaatttggatttaagactgcttattaatttaatttttttcaaggttcgcttctatgagctagtgaatccattaagaaaggaaatctgtgaactacaagtgaaaaagaatatcctagcagaagaattaagtacaaacaaaaaccaactgaagcagctgacagag

SEQ ID NO: 415279 - DNA, 1229 bp, Homo sapiens
cgtggatctgtcttgttcagtggtgagtccccagtgacctggtacatggaggtactcaaaaatatttgttgcataaagtaatgagcaaagtttggcacaaatgttagctattattatttcagggcgtatcggtaacagcaccctaccctttgcaaaaatctccttgggaaccagaaacttaaacacaaccaggaagaaaaaaaatcagccaaaaataaaagcgaattaagacagttggggtcttattttagaaatatacctttctaggttctggtatgttgggctctgtcatctttctacctgatcaaggaaccactgtgacattttttggtaacttccagtctgtagtttggatttaggagttcaggattccaatcctaatttccaggttccagctgcgtggcccgagtagcccggccagccccaccccggggcgcaggaggcgcgcgaagggcgggagttctcgggtccccgccctcggggaggctctgggcgcggggcgggactccgggacgctgggcgggcgtgctagggccccgccgccctggcccggccttgccttgcgctgcgcgctcaccatggtgggccccgcgccgcggcggcggctgcggccgctggcagcgctggccctggtcctggcgctggccccggggctgcccacagcccgggccgggcagacaccgcgccctgccgagcgggggcccccagtgcggcttttcaccgaggaggagctggcccgctatggcggggaggaggaagatcagcccatctacttggcagtgaagggagtggtgtttgatgtcacctccggaaaggagttttatggacgaggagccccctacaatgccttgacggggaaggactccactagaggggtagccaagatgtccttggatcctgcagacctcacccatgacactacgggtctcacggccaaggaactggaggccctggatgaggtcttcaccaaagtgtacaaagccaaataccccatcgtcggctacactgcccggagaattctcaatgaggatggcagccctaacctggacttcaagcctgaagaccagccccattttgacatcaaggatgagttctgatgttccccctgcaggagcaggttcttgggagcgtgaggcaggaagacactaggtgctgaatctcctgcaaaactggctgcctggaggccctgagccacccagatctgaataaaacagatgcttaccctggaa

SEQ ID NO: 415280 - DNA, 1168 bp, Homo sapiens
cgtggatctgtcttgttcagtggtgagtccccagtgacctggtacatggaggtactcaaaaatatttgttgcataaagtaatgagcaaagtttggcacaaatgttagctattattatttcagggcgtatcggtaacagcaccctaccctttgcaaaaatctccttgggaaccagaaacttaaacacaaccaggaagaaaaaaaatcagccaaaaataaaagcgaattaagacagttggggtcttattttagaaatatacctttctaggttctggtatgttgggctctgtcatctttctacctgatcaaggaaccactgtgacattttttggtaacttccagtctgtagtttggatttaggagttcaggattccaatcctaatttccaggttccagctgcgtggcccgagtagcccggccagccccaccccggggcgcaggaggcgcgcgaagggcgggagttctcgggtccccgccctcggggaggctctgggcgcggggcgggactccgggacgctgggcgggcgtgctagggccccgccgccctggcccggccttgccttgcgctgcgcgctcaccatggtgggccccgcgccgcggcggcggctgcggccgctggcagcgctggccctggtcctggcgctggccccggggctgcccacagcccgggccgggcagacaccgcgccctgccgagcgggggcccccagtgcggcttttcaccgaggaggagctggcccgctatggcggggaggagagttttatggacgaggagccccctacaatgccttgacggggaaggactccactagaggggtagccaagatgtccttggatcctgcagacctcacccatgacactacgggtctcacggccaaggaactggaggccctggatgaggtcttcaccaaagtgtacaaagccaaataccccatcgtcggctacactgcccggagaattctcaatgaggatggcagccctaacctggacttcaagcctgaagaccagccccattttgacatcaaggatgagttctgatgttccccctgcaggagcaggttcttgggagcgtgaggcaggaagacactaggtgctgaatctcctgcaaaactggctgcctggaggccctgagccacccagatctgaataaaacagatgcttaccctggaa

SEQ ID NO: 415281 - DNA, 1125 bp, Homo sapiens
cgtggatctgtcttgttcagtggtgagtccccagtgacctggtacatggaggtactcaaaaatatttgttgcataaagtaatgagcaaagtttggcacaaatgttagctattattatttcagggcgtatcggtaacagcaccctaccctttgcaaaaatctccttgggaaccagaaacttaaacacaaccaggaagaaaaaaaatcagccaaaaataaaagcgaattaagacagttggggtcttattttagaaatatacctttctaggttctggtatgttgggctctgtcatctttctacctgatcaaggaaccactgtgacattttttggtaacttccagtctgtagtttggatttaggagttcaggattccaatcctaatttccaggttccagctgcgtggcccgagtagcccggccagccccaccccggggcgcaggaggcgcgcgaagggcgggagttctcgggtccccgccctcggggaggctctgggcgcggggcgggactccgggacgctgggcgggcgtgctagggccccgccgccctggcccggccttgccttgcgctgcgcgctcaccatggtgggccccgcgccgcggcggcggctgcggccgctggcagcgctggccctggtcctggcgctggccccggggctgcccacagcccgggccgggcagacaccgcgccctgccgagcgggggcccccagtgcggcttttcaccgaggaggagctggcccgctatggcggggaggaggaagatcagcccatctacttggcagtgaagggagtggtgtttgatgtcacctccggaaaggacgggtctcacggccaaggaactggaggccctggatgaggtcttcaccaaagtgtacaaagccaaataccccatcgtcggctacactgcccggagaattctcaatgaggatggcagccctaacctggacttcaagcctgaagaccagccccattttgacatcaaggatgagttctgatgttccccctgcaggagcaggttcttgggagcgtgaggcaggaagacactaggtgctgaatctcctgcaaaactggctgcctggaggccctgagccacccagatctgaataaaacagatgcttaccctggaa

SEQ ID NO: 415282 - DNA, 1470 bp, Homo sapiens
cgtggatctgtcttgttcagtggtgagtccccagtgacctggtacatggaggtactcaaaaatatttgttgcataaagtaatgagcaaagtttggcacaaatgttagctattattatttcagggcgtatcggtaacagcaccctaccctttgcaaaaatctccttgggaaccagaaacttaaacacaaccaggaagaaaaaaaatcagccaaaaataaaagcgaattaagacagttggggtcttattttagaaatatacctttctaggttctggtatgttgggctctgtcatctttctacctgatcaaggaaccactgtgacattttttggtaacttccagtctgtagtttggatttaggagttcaggattccaatcctaatttccaggttccagctgcgtggcccgagtagcccggccagccccaccccggggcgcaggaggcgcgcgaagggcgggagttctcgggtccccgccctcggggaggctctgggcgcggggcgggactccgggacgctgggcgggcgtgctagggccccgccgccctggcccggccttgccttgcgctgcgcgctcaccatggtgggccccgcgccgcggcggcggctgcggccgctggcagcgctggccctggtcctggcgctggccccggggctgcccacagcccgggccgggcagacaccgcgccctgccgagcgggggcccccagtgcggcttttcaccgaggaggagctggcccgctatggcggggaggaggaagatcagcccatctacttggcagtgaagggagtggtgtttgatgtcacctccggaaaggagttttatggacgaggagccccctacaatgccttgacggggaaggactccactagaggggtagccaagatgtccttggatcctgcagacctcacccatgacactacgggtctcacggccaaggaactggaggccctggatgaggtcttcaccaaagtgtacaaagccaaataccccatcgtcggctacactgcccggagaattctcaatgaggatggcagccctaacctggacttcaagcctgaagaccagccccattttgacatcaaggatgagttctgatgttccccctgcaggagcaggttcttgggagcgtgaggcaggaagacactaggtgctgaatctcctgcaaaactggctgcctggaggccctgagccacccagatctgaataaaacagatgcttaccctggaagagcaaatgcctcctgttgtccttggtcaggggttctgtctacctggggacccctgtctgcacaccagggatcaataagagccaaagtgggacacctcctagatgtcagtatcagctggctgggcagtggaattttgagcgacctttactttatacttttctgtgcttgacagattttcagccatgaccatgttcactttataatcaaaacaaaaataaaggtcccatttttacaaaagga

SEQ ID NO: 415283 - DNA, 1650 bp, Homo sapiens
cgtggatctgtcttgttcagtggtgagtccccagtgacctggtacatggaggtactcaaaaatatttgttgcataaagtaatgagcaaagtttggcacaaatgttagctattattatttcagggcgtatcggtaacagcaccctaccctttgcaaaaatctccttgggaaccagaaacttaaacacaaccaggaagaaaaaaaatcagccaaaaataaaagcgaattaagacagttggggtcttattttagaaatatacctttctaggttctggtatgttgggctctgtcatctttctacctgatcaaggaaccactgtgacattttttggtaacttccagtctgtagtttggatttaggagttcaggattccaatcctaatttccaggttccagctgcgtggcccgagtagcccggccagccccaccccggggcgcaggaggcgcgcgaagggcgggagttctcgggtccccgccctcggggaggctctgggcgcggggcgggactccgggacgctgggcgggcgtgctagggccccgccgccctggcccggccttgccttgcgctgcgcgctcaccatggtgggccccgcgccgcggcggcggctgcggccgctggcagcgctggccctggtcctggcgctggccccggggctgcccacagcccgggccgggcagacaccgcgccctgccgagcgggggcccccagtgcggcttttcaccgaggaggagctggcccgctatggcggggaggagagttttatggacgaggagccccctacaatgccttgacggggaaggactccactagaggggtagccaagatgtccttggatcctgcagacctcacccatgacactacgggtctcacggccaaggaactggaggccctggatgaggtcttcaccaaagtgtacaaagccaaataccccatcgtcggctacactgcccggagaattctcaatgaggatggcagccctaacctggacttcaagcctgaagaccagccccattttgacatcaaggatgagttctgatgttccccctgcaggagcaggttcttgggagcgtgaggcaggaagacactaggtgctgaatctcctgcaaaactggctgcctggaggccctgagccacccagatctgaataaaacagatgcttaccctggaaaaaaaaaaaaaaaaaaaaaaaaaaaaaaaaacaaaaaaaaaaaaaaaacaaaaaaaaaatagagtgtgtgtggggcgcgcgcgcgcgcgcgcgccccgcagaaaaaagcttttaagcaacacccgcgcgtgggggagcgagcgcgggcgcccacaaggagagaagagacaagagcggtgggcaaaagaggggtgtccccaggagagagaacagcggcggagacaaagaaaaagagggcggggagccttcccaccaaaataaaaaaagaagcggcgcggggggagacccaaacagacgagctggtttctaggagagagacaaaatcacacagagggagagaggagatagcgagagagagagcgatagcaaagagagggagagaatctaatacaaccgagaaggaggagctgctaacaaggaaagccgtagccaaaaagtctataaaaatattagcccccgaggacgggggggggggggggggc

SEQ ID NO: 415284 - DNA, 1079 bp, Homo sapiens
cgtggatctgtcttgttcagtggtgagtccccagtgacctggtacatggaggtactcaaaaatatttgttgcataaagtaatgagcaaagtttggcacaaatgttagctattattatttcagggcgtatcggtaacagcaccctaccctttgcaaaaatctccttgggaaccagaaacttaaacacaaccaggaagaaaaaaaatcagccaaaaataaaagcgaattaagacagttggggtcttattttagaaatatacctttctaggttctggtatgttgggctctgtcatctttctacctgatcaaggaaccactgtgacattttttggtaacttccagtctgtagtttggatttaggagttcaggattccaatcctaatttccaggttccagctgcgtggcccgagtagcccggccagccccaccccggggcgcaggaggcgcgcgaagggcgggagttctcgggtccccgccctcggggaggctctgggcgcggggcgggactccgggacgctgggcgggcgtgctagggccccgccgccctggcccggccttgccttgcgctgcgcgctcaccatggtgggccccgcgccgcggcggcggctgcggccgctggcagcgctggccctggtcctggcgctggccccggggctgcccacagcccgggccgggcagacaccgcgccctgccgagcgggggcccccagtgcggcttttcaccgaggaggagctggcccgctatggcggggaggagagttttatggacgaggagccccctacaatgccttgacggggaaggactccactagaggggtagccaagatgtccttggatcctgcagacctcacccatgacactacgggtctcacggccaaggaactggaggccctggatgaggtcttcaccaaagtgtacaaagccaaataccccatcgtcggctacactgcccggagaattctcaatgaggatggcagccctaacctggacttcaagcctgaagaccagccccattttgacatcaaggatgagttctgatgttccccctgcaggaagcccagggggtttttccccttttttt

SEQ ID NO: 415285 - DNA, 929 bp, Homo sapiens
gaaccaaagaacagatacctagtaaaatagaagacctagggttcccacaacagacgggatgtacacagcacccaaccgagcgggtgcccaatgcggttatcccgaggagagtggacccataggagggaggaagatcagcccatctacttggcagtgaagggagtggtgtttgatgtcacctccggaaaggagttttatggacgaggagccccctacaatgccttgacggggaaggactccactagaggggtagccaagatgtccttggatcctgcagacctcacccatgacactacgggtctcacggccaaggaactggaggccctggatgaggtcttcaccaaagtgtacaaagccaaataccccatcgtcggctacactgcccggagaattctcaatgaggatggcagccctaacctggacttcaagcctgaagaccagccccattttgacatcaaggatgagttctgatgttccccctgcaggagcaggttcttgggagcgtgaggcaggaagacactaggtgctgaatctcctgcaaaactggctgcctggaggccctgagccacccagatctgaataaaacagatgcttaccctggaaaaaaaaaaatatcaccatctcaagcagctatgatgttaaacaagtggcactgagttccggtgtttctaaaattttgagactgcgtctcgctctgattgccagattggagtgcatggggacacccatgggtccattgaagctcgacctccgggttaaacaatctccagaatgggcaagcggatttccacttgggctccggcgtggcagaggcgtggcccagaccgtgctggctgcccctttgactctggaaccattggcacgacggcggagggtctatacgagcgagtctcggacggcgcgtcatatgccgcagctcactatcacgg

SEQ ID NO: 415286 - DNA, 522 bp, Homo sapiens
atgaagcattgctccccgtatgttataccctcccacccccacgccccccccacagcagtgtctcttaagccatttgtccattatttggtttgttgagatatcttttctcttgcattagggatgtgggaggcaaggcagggatggagaaaggccagtgccaaacactatccacttaaccccatctcctgtctttcttgggcttttctccccaagacgggtctcacggccaaggaactggaggccctggatgaggtcttcaccaaagtgtacaaagccaaataccccatcgtcggctacactgcccggagaattctcaatgaggatggcagccctaacctggacttcaagcctgaagaccagccccattttgacatcaaggatgagttctgatgttccccctgcaggagcaggttcttgggagcgtgaggcaggaagacactaggtgctgaatctcctgcaaaactggctgcctggaggccctgagccacccagatctgaataaaacagatgcttaccctggaa

SEQ ID NO: 415287 - DNA, 980 bp, Homo sapiens
cgtggatctgtcttgttcagtggtgagtccccagtgacctggtacatggaggtactcaaaaatatttgttgcataaagtaatgagcaaagtttggcacaaatgttagctattattatttcagggcgtatcggtaacagcaccctaccctttgcaaaaatctccttgggaaccagaaacttaaacacaaccaggaagaaaaaaaatcagccaaaaataaaagcgaattaagacagttggggtcttattttagaaatatacctttctaggttctggtatgttgggctctgtcatctttctacctgatcaaggaaccactgtgacattttttggtaacttccagtctgtagtttggatttaggagttcaggattccaatcctaatttccaggttccagctgcgtggcccgagtagcccggccagccccaccccggggcgcaggaggcgcgcgaagggcgggagttctcgggtccccgccctcggggaggctctgggcgcggggcgggactccgggacgctgggcgggcgtgctagggccccgccgccctggcccggccttgccttgcgctgcgcgctcaccatggtgggccccgcgccgcggcggcggctgcggccgctggcagcgctggccctggtcctggcgctggccccggggctgcccacagcccgggccgggcagacaccgcgccctgccgagcgggggcccccagtgcggcttttcaccgaggaggagctggcccgctatggcggggaggagactgcccggagaattctcaatgaggatggcagccctaacctggacttcaagcctgaagaccagccccattttgacatcaaggatgagttctgatgttccccctgcaggagcaggttcttgggagcgtgaggcaggaagacactaggtgctgaatctcctgcaaaactggctgcctggaggccctgagccacccagatctgaataaaacagatgcttaccctggaa

SEQ ID NO: 415288 - DNA, 1084 bp, Homo sapiens
cgtggatctgtcttgttcagtggtgagtccccagtgacctggtacatggaggtactcaaaaatatttgttgcataaagtaatgagcaaagtttggcacaaatgttagctattattatttcagggcgtatcggtaacagcaccctaccctttgcaaaaatctccttgggaaccagaaacttaaacacaaccaggaagaaaaaaaatcagccaaaaataaaagcgaattaagacagttggggtcttattttagaaatatacctttctaggttctggtatgttgggctctgtcatctttctacctgatcaaggaaccactgtgacattttttggtaacttccagtctgtagtttggatttaggagttcaggattccaatcctaatttccaggttccagctgcgtggcccgagtagcccggccagccccaccccggggcgcaggaggcgcgcgaagggcgggagttctcgggtccccgccctcggggaggctctgggcgcggggcgggactccgggacgctgggcgggcgtgctagggccccgccgccctggcccggccttgccttgcgctgcgcgctcaccatggtgggccccgcgccgcggcggcggctgcggccgctggcagcgctggccctggtcctggcgctggccccggggctgcccacagcccgggccgggcagacaccgcgccctgccgagcgggggcccccagtgcggcttttcaccgaggaggagctggcccgctatggcggggaggagggactctccaactgacccgatgatctttgggaccactggcacaagaatctaaggaaagagagagttcaccactgaggttacagcaagagtgccagaactgcaagatgaggactgagaaaagacccttggttttttgatgttgatgttatagattgaaatttaactgagagagagaggaccttgagatggaaacaggggtaggaaacaattgttttgggagtggagcctgaggatctctgtaggtggaaggaaggagccagagagaggaggggagcgagggacgagagaggcagttgagtgcagtgggttcaagctgtgctgcgctgttg

SEQ ID NO: 415289 - DNA, 684 bp, Homo sapiens
atttctcacccttccctacccaataacggtggactcacttgcctaggccgtatatacagatggtgtggttagtattgaacactgtatatgctaggcagagggtgccccatgtgaccagcccccagtgaaaaccttgggtgctgagtctaatgggcatctctagcagaggaatgttctgccagaagaatggcacatactgtcaagttttgttgctgggggaagagtgtgctcttcctcatgggagggagagagcataggaaacctgcacatagattcccctagattctccctctgtgtttttccttcccagctgtgagtagaactatatgctgggttcttggaatcttccttctagggactctccaactgacccgatgatctttgggaccactggcacaagaatctaaggaaagagagagttcaccactgaggttacagcaagagtgccagaactgcaagatgaggactgagaaaagacccttggttttttgatgttgatgttatagattgaaatttaactgagagagagaggaccttgagatggaaacaggggtaggaaacaattgttttgggagtggagcctgaggatctctgtaggtggaaggaaggagccagagagaggaggggagcgagggacgagagaggcagttgagtgcagtgggttcaagctgtgctgcgctgttg

SEQ ID NO: 415290 - DNA, 1591 bp, Homo sapiens
cgtggatctgtcttgttcagtggtgagtccccagtgacctggtacatggaggtactcaaaaatatttgttgcataaagtaatgagcaaagtttggcacaaatgttagctattattatttcagggcgtatcggtaacagcaccctaccctttgcaaaaatctccttgggaaccagaaacttaaacacaaccaggaagaaaaaaaatcagccaaaaataaaagcgaattaagacagttggggtcttattttagaaatatacctttctaggttctggtatgttgggctctgtcatctttctacctgatcaaggaaccactgtgacattttttggtaacttccagtctgtagtttggatttaggagttcaggattccaatcctaatttccaggttccagctgcgtggcccgagtagcccggccagccccaccccggggcgcaggaggcgcgcgaagggcgggagttctcgggtccccgccctcggggaggctctgggcgcggggcgggactccgggacgctgggcgggcgtgctagggccccgccgccctggcccggccttgccttgcgctgcgcgctcaccatggtgggccccgcgccgcggcggcggctgcggccgctggcagcgctggccctggtcctggcgctggccccggggctgcccacagcccgggccgggcagacaccgcgccctgccgagcgggggcccccagtgcggcttttcaccgaggaggagctggcccgctatggcggggaggaggaagatcagcccatctacttggcagtgaagggagtggtgtttgatgtcacctccggaaaggagttttatggacgaggagccccctacaatgccttgacggggaaggactccactagaggggtagccaagatgtccttggatcctgcagacctcacccatgacactacgggtctcacggccaaggaactggaggccctggatgaggtcttcaccaaagtgtacaaagccaaataccccatcgtcggctacactgcccggagaattctcaatgaggatggcagccctaacctggacttcaagcctgaagaccagccccattttgacatcaaggatgagttctgatgttccccctgcaggagcaggttcttgggagcgtgaggcaggaagacactaggtgctgaatctcctgcaaaactggctgcctggaggccctgagccacccagatctgaataaaacagatgcttaccctggaagagcaaatgcctcctgttgtccttggtcaggggttctgtctacctggggacccctgtctgcacaccagggatcaataagagccaaagtgggacacctcctagatgtcagtatcagctggctgggcagtggaattttgagcgacctttactttatacttttctgtgcttgacagattttcagccatgaccatgttcactttataatcaaaacaaaaataaaggtcccatttttacaaaaggaaaaaaaaaacaaactcctaggggggccccggtcccaattcgccctataaggagtgtattacaagtaaatggcccgggttttacaacgttttgactgtaaaaaccctgcgttccccaaatta

SEQ ID NO: 415291 - DNA, 1711 bp, Homo sapiens
cgtggatctgtcttgttcagtggtgagtccccagtgacctggtacatggaggtactcaaaaatatttgttgcataaagtaatgagcaaagtttggcacaaatgttagctattattatttcagggcgtatcggtaacagcaccctaccctttgcaaaaatctccttgggaaccagaaacttaaacacaaccaggaagaaaaaaaatcagccaaaaataaaagcgaattaagacagttggggtcttattttagaaatatacctttctaggttctggtatgttgggctctgtcatctttctacctgatcaaggaaccactgtgacattttttggtaacttccagtctgtagtttggatttaggagttcaggattccaatcctaatttccaggttccagctgcgtggcccgagtagcccggccagccccaccccggggcgcaggaggcgcgcgaagggcgggagttctcgggtccccgccctcggggaggctctgggcgcggggcgggactccgggacgctgggcgggcgtgctagggccccgccgccctggcccggccttgccttgcgctgcgcgctcaccatggtgggccccgcgccgcggcggcggctgcggccgctggcagcgctggccctggtcctggcgctggccccggggctgcccacagcccgggccgggcagacaccgcgccctgccgagcgggggcccccagtgcggcttttcaccgaggaggagctggcccgctatggcggggaggaggaagatcagcccatctacttggcagtgaagggagtggtgtttgatgtcacctccggaaaggagttttatggacgaggagccccctacaatgccttgacggggaaggactccactagaggggtagccaagatgtccttggatcctgcagacctcacccatgacactacgggtctcacggccaaggaactggaggccctggatgaggtcttcaccaaagtgtacaaagccaaataccccatcgtcggctacactgcccggagaattctcaatgaggatggcagccctaacctggacttcaagcctgaagaccagccccattttgacatcaaggatgagttctgatgttccccctgcaggagcaggttcttgggagcgtgaggcaggaagacactaggtgctgaatctcctgcaaaactggctgcctggaggccctgagccacccagatctgaataaaacagatgcttaccctggaaaaaaaaaaaaaaaaaaaaaaaaaaaaaaaaacaaaaaaaaaaaaaaaacaaaaaaaaaatagagtgtgtgtggggcgcgcgcgcgcgcgcgcgccccgcagaaaaaagcttttaagcaacacccgcgcgtgggggagcgagcgcgggcgcccacaaggagagaagagacaagagcggtgggcaaaagaggggtgtccccaggagagagaacagcggcggagacaaagaaaaagagggcggggagccttcccaccaaaataaaaaaagaagcggcgcggggggagacccaaacagacgagctggtttctaggagagagacaaaatcacacagagggagagaggagatagcgagagagagagcgatagcaaagagagggagagaatctaatacaaccgagaaggaggagctgctaacaaggaaagccgtagccaaaaagtctataaaaatattagcccccgaggacgggggggggggggggggc

SEQ ID NO: 415292 - DNA, 1248 bp, Homo sapiens
cgtggatctgtcttgttcagtggtgagtccccagtgacctggtacatggaggtactcaaaaatatttgttgcataaagtaatgagcaaagtttggcacaaatgttagctattattatttcagggcgtatcggtaacagcaccctaccctttgcaaaaatctccttgggaaccagaaacttaaacacaaccaggaagaaaaaaaatcagccaaaaataaaagcgaattaagacagttggggtcttattttagaaatatacctttctaggttctggtatgttgggctctgtcatctttctacctgatcaaggaaccactgtgacattttttggtaacttccagtctgtagtttggatttaggagttcaggattccaatcctaatttccaggttccagctgcgtggcccgagtagcccggccagccccaccccggggcgcaggaggcgcgcgaagggcgggagttctcgggtccccgccctcggggaggctctgggcgcggggcgggactccgggacgctgggcgggcgtgctagggccccgccgccctggcccggccttgccttgcgctgcgcgctcaccatggtgggccccgcgccgcggcggcggctgcggccgctggcagcgctggccctggtcctggcgctggccccggggctgcccacagcccgggccgggcagacaccgcgccctgccgagcgggggcccccagtgcggcttttcaccgaggaggagctggcccgctatggcggggaggagcttctcccctgctttctaggaagatcagcccatctacttggcagtgaagggagtggtgtttgatgtcacctccggaaaggagttttatggacgaggagccccctacaatgccttgacggggaaggactccactagaggggtagccaagatgtccttggatcctgcagacctcacccatgacactacgggtctcacggccaaggaactggaggccctggatgaggtcttcaccaaagtgtacaaagccaaataccccatcgtcggctacactgcccggagaattctcaatgaggatggcagccctaacctggacttcaagcctgaagaccagccccattttgacatcaaggatgagttctgatgttccccctgcaggagcaggttcttgggagcgtgaggcaggaagacactaggtgctgaatctcctgcaaaactggctgcctggaggccctgagccacccagatctgaataaaacagatgcttaccctggaa

SEQ ID NO: 415293 - DNA, 603 bp, Homo sapiens
gaaccaaagaacagatacctagtaaaatagaagacctagggttcccacaacagacgggatgtacacagcacccaaccgagcgggtgcccaatgcggttatcccgaggagagtggacccataggagggaggaagatcagcccatctacttggcagtgaagggagtggtgtttgatgtcacctccggaaaggagttttatggacgaggagccccctacaatgccttgacggggaaggactccactagaggggtagccaagatgtccttggatcctgcagacctcacccatgacactacgggtctcacggccaaggaactggaggccctggatgaggtcttcaccaaagtgtacaaagccaaataccccatcgtcggctacactgcccggagaattctcaatgaggatggcagccctaacctggacttcaagcctgaagaccagccccattttgacatcaaggatgagttctgatgttccccctgcaggagcaggttcttgggagcgtgaggcaggaagacactaggtgctgaatctcctgcaaaactggctgcctggaggccctgagccacccagatctgaataaaacagatgcttaccctggaa

SEQ ID NO: 415294 - DNA, 494 bp, Homo sapiens
tgctgaggtactctagcaggatctcaacgtcagcactcttggcagtgaagggagtggtgtttgatgtcacctccggaaaggagttttatggacgaggagccccctacaatgccttgacggggaaggactccactagaggggtagccaagatgtccttggatcctgcagacctcacccatgacactacgggtctcacggccaaggaactggaggccctggatgaggtcttcaccaaagtgtacaaagccaaataccccatcgtcggctacactgcccggagaattctcaatgaggatggcagccctaacctggacttcaagcctgaagaccagccccattttgacatcaaggatgagttctgatgttccccctgcaggagcaggttcttgggagcgtgaggcaggaagacactaggtgctgaatctcctgcaaaactggctgcctggaggccctgagccacccagatctgaataaaacagatgcttaccctggaa

SEQ ID NO: 415295 - DNA, 174 bp, Homo sapiens
cgtgagcgtggagtcttttttaggattgggtgcgggccttgggagcgcccccacgtgcaagctcctggttactctgcatgtaaacccacgcttacgtctcttccttccttcccactacagagttttatggacgaggagccccctacaatgccttgacggggaaggactccacta

SEQ ID NO: 415296 - DNA, 2903 bp, Homo sapiens
gggtcgagtcttgaggtgggctggaggggaaggagacacagggtgctcacgctgtccccccttcctcagctccaccaggtgctggttcagctccaggctggcgagaaggagcaggacttggcatcagctcccattcaggtctccatcagcgtccagctgtggcggctcccgggatgccacgagttcctggcagctctaggttttgatctctgtgaagttggtcaggaggaagtaatcctgaaaaccgggaagcaagctaatcgacggactgtgcacttcgcgctccagtccctgctgtctctgtttgattctactgagctacccaagcgcctcagccttgacagctcctcctccctcgagtctcttgcttctgctcagtctgtttccaacgccctgcccttgggttaccagcaaccccccttctctcccaccggtgcggacagcatcgcctcagatgccatctctgtgtacagtctgagctccattgcctcctcaatgagctttgtctccaaacccgagggtggatcagagggtggaggccccggaggacggcaggaccatgaccggtccaagaacgcttacctgcagagatccaccctgcctaggagccagctgcctccccagacccgccctgcaggcaacaaagatgaagaagaatatgaagggttttctatcatcagtaacgagcccttggcgacctaccaagaaaaccgaaacacatgcttctcaccagaccacaaacaaccccaacctgggacagccggaggcatgagagtctcggtgagctccaaagggagcatcagcactccaaattctccagtgaaaatgactctgattcccagccccaactcacccttccaaaaggtgggaaaactagcaagctcagatacaggagaatcagaccagtctagcacagaaacggacagtaccgtgaaatcccaagaagaaagcaacccaaaactggatccacaagagttagcccagaaaattctggaggagacacagagtcatctcattgcggtggagcgtcttcagaggagcggcggccaggtgagcaagagtaataaccctgaagacggcgttcaggcgcccagcagcactgctgtcttcagagcgtcagaaaccagtgcgttcagcaggcctgttctctcccatcagaagagtcagccatcaccagtcactgttaaaccaaagcccccagccaggagctcctccctgcccaaggtgagttccggatatagcagccccaccacctcagagatgtccatcaaagacagcccgagccagcacagtggccggccatcgcccggctgcgactcacagacttcccagctggaccagcctctctttaaactgaagtaccccagctctccttacagcgctcacatttccaaatcaccaaggaacatgtccccaagctccggccaccagtctcctgctggcagtgcaccctccccagctctctcctactcctcagctggatctgctcgctcaagtccagcagacgctcccgacatagacaaactgaaaatggcagccattgatgaaaaggtgcaggctgtccataacctgaagatgttctggcagagcacaccccagcattccacagggccaatgaagatcttccggggggctcctggcacgatgacttccaaaagggatgtcctcagtctgttgaatttgtcaccacggcacaataagaaggaggagggagtggataagcttgaactgaaggagctgtccctgcagcagcatgacggagctccaccgaaagcccctcccaacggacactggcgcaccgagaccacctcgctgggctcactgccgctgcccgccggccctcccgccacagcccccgcgcgccctttgaggcttccttctggaaatggctacaagttcctgtctccaggaagatttttcccttcttccaaatgctaaagcatcttttatacccactgactctgagcagcctgcagatgggggcctggcgtttgcttcagcccttccctgagtgcagtccccccacagccaccagcaccctcatgatgctgtgctctgcaggcgaggggcaccaccacgtccaaaggctgccacacacactggtggcttttctgggccacattcaccaaaagccaggacttctgtggggctggtacaggaggctcatggaatttcctacacacttcaccaaatgtttgtttacctttgaactccctgcttctcatctttgatatgattcttcaccaggattttgtacaaaaatgatcatggttctggggtggggagaggaaagggagcacatattttgctaagaggtatatatgcagtaccttttatacacagaaatacaaatagagctttttctaaggctttcggttgctggttgggggtgggatatatgaaatttcagttgaattctacaggaaagtgttatattagccaaaaacagaaaaatggtttttaaaatgccaatgatttgtaattaaattgtagcaattttggtctcatgatagtgtaatatctcagcaacaatgcaataattcacattgaaacagcgcttccattctgaactctgctctgcaaatgtcttttgggtcccgctgtcaaccaaacttgaattttcttaaaaaaaaaattatgtaactcttatccaggcattttagaactatgcaattgtgatttaaaatgcaactttgtgcttttaaaacattattgaccttttttgtatatggataaacaacttggttttattatcaatagtactttgcatttatagctattatttttaaaagctcaaaaagttttttaaaatgtcaaattttgaatagtcatcaataagtaattatcaagtttggaaggaaaggttgaaatgactccgtttccttataagcaaaaaaaaaaaa

SEQ ID NO: 415297 - DNA, 6066 bp, Homo sapiens
ggtatatcaggagctgagtgacttgccaggggagtgcagagctcatgggcacctggctgctgtctacatggcccttgggaaatacacaatggcattcaagtgttatgaagagcaactggatctagggcaaaagctgaaggatccgagtctggaagcccaggtctatggcaacatgggcatcacaaagatgaacatgaatgtgatggaagaagccattggctactttgagcagcaattggccatgctgcagcagctaagtggaaatgagtctgtgctcgacaggggccgggcctatggcaacctgggggattgctacgaagccctgggtgactatgaggaagctatcaaatactatgaacaatatttatctgtcgcgcagagtctgaatcgcatgcaagaccaagccaaggcttaccggggcctgggaaatggacacagggcaatggggagcttgcagcaagcccttgtgtgctttgaaaagaggctcgtggttgctcatgaacttggagaggccttcaataaagcccaggcctatggagagctgggaagtctgcacagccaattagggaattacgaacaagccatttcctgccttgaacgccagctgaacattgctagagatatgaaagaccgagccctggagagtgacgcagcctgtggcctggggggcgtttaccagcagatgggggagtatgacacagccctgcagtaccaccagcttgatctacagatagcagaggaaaccaacaaccccacgtgccagggccgagcctatgggaacctgggcctgacttatgaatccctgggcaccttcgagagggctgtggtctatcaagaacagcacttgagcattgctgcacagatgaatgacttggcggccaagacggtgtcatatagtagccttggaaggacccatcatgccttgcagaactattcccaagcagtcatgtacttacaggaaggtttaaggttagctgagcaactgggccgaagagaagatgaggcaaaaattcgccatggccttggcctctccctttgggctagtggaaacttggaggaggcccaacaccagctttatagggcatcagccttgtttgaaacaatccgacatgaggcacagctgagcacggactacaaactctccctctttgacctgcagacatcatcctaccaggccttgcagcgggtgctcgtcagcctaggccatcatgatgaagccctggctgtggcagaaaggggacggacaagggcatttgctgatcttctggtggaacgacaaacaggacaacaagactccgacccctactccccagtcactattgatcagatcttagagatggtaaatggccagaggggactagtgctttactattccctggctgcaggctatctgtatagctggctgctggctcctggggcaggaattgtgaagtttcatgaacactacctgggtgagaacacagtggaaaactcaagtgacttccaggccagcagcagtgtaacccttccaacagcaaccggctcagccctggagcagcacattgccagtgtccgggaggccctgggggtggagtctcactactcaagggcctgtgccagcagtgagacagagagtgaagcgggagacatcatggaccagcaatttgaagagatgaacaacaaactcaactcggtcactgaccccactggctttctgcggatggttcgccgcaataacctgtttaacaggagctgccagagcatgacgagcctgttcagtaacactgtgtcaccgacccaggacgggacctcctctcttcccaggaggcagagctcgtttgccaagcccccgctccgtgccctgtatgacctgctcatcgcgcccatggaagggggcctgatgcactccagcggccccgtgggccggcaccggcagctcatcctggttctggagggggagctctacctcattcctttcgccctcctgaagggaagctcctccaatgagtacctctacgagcgcttcggcctccttgctgtcccttccatccgctccctcagcgtgcagtccaagtctcacttacggaagaacccgcccacatactccagctccacatccatggcggctgtcatcggcaaccccaagctaccatcggccgtgatggacaggtggctgtgggggcccatgccatcggccgaggaagaggcctacatggtgtccgagctgctgggctgccagcccctagtgggcagtgtggccaccaaggagagggtcatgagtgccctgacccaggctgaatgcgtccactttgccacccacatctcctggaagctgtcggccttggtcctcacgcccagcatggacggcaaccctgccagcagcaagagctccttcggccacccctacacgatccctgagtccttgcgggtgcaggacgatgccagtgatggggagagcatctcggactgcccgcccctgcaggagctgctgcttactgccgccgacgtcctggacctgcagctgcctgtgaagctggtggtgcttggctcctcccaggagtccaacagcaaagtcacagccgacggggtcatcgcgctgacaagggccttcctggctgccggcgctcagtgtgtcctcgtgtctctgtggcctgtgccagtggctgcttctaagatgttcatccatgccttctactcatccctgctgaacggcctgaaagccagcgccgccctgggggaggccatgaaggtggtgcagagcagcaaggccttctcgcacccctccaactgggcagggttcatgctcatcgggagtgacgttaagctgaacagcccctcatcactcatcggccaggccctcacagagatcctgcagcacccggagcgtgcgcgggacgccctgcgagtgctgctgcacctggtggagaaatccctgcagcgcatccagaatgggcagcgcaatgccatgtacacatcccagcagagtgtggagaacaaagtgggcggcatccctggctggcaggccctcctcaccgctgtgggcttccggctggaccccccaaccagtggcctgccagcggctgtcttcttcccaacctccgacccgggcgaccggctccagcagtgcagcagcacactccagtccctgctgggtctgcccaatcctgccctccaagccctttgcaaactcatcactgcctccgagacgggcgagcagctcatcagccgggctgttaaaaatatggttggaatgctccaccaggtgctggttcagctccaggctggcgagaaggagcaggacttggcatcagctcccattcaggtctccatcagcgtccagctgtggcggctcccgggatgccacgagttcctggcagctctaggttttgatctctgtgaagttggtcaggaggaagtaatcctgaaaaccgggaagcaagctaatcgacggactgtgcacttcgcgctccagtccctgctgtctctgtttgattctactgagctacccaagcgcctcagccttgacagctcctcctccctcgagtctcttgcttctgctcagtctgtttccaacgccctgcccttgggttaccagcaaccccccttctctcccaccggtgcggacagcatcgcctcagatgccatctctgtgtacagtctgagctccattgcctcctcaatgagctttgtctccaaacccgagggtggatcagagggtggaggccccggaggacggcaggaccatgaccggtccaagaacgcttacctgcagagatccaccctgcctaggagccagctgcctccccagacccgccctgcaggcaacaaagatgaagaagaatatgaagggttttctatcatcagtaacgagcccttggcgacctaccaagaaaaccgaaacacatgcttctcaccagaccacaaacaaccccaacctgggacagccggaggcatgagagtctcggtgagctccaaagggagcatcagcactccaaattctccagtgaaaatgactctgattcccagccccaactcacccttccaaaaggtgggaaaactagcaagctcagatacaggagaatcagaccagtctagcacagaaacggacagtaccgtgaaatcccaagaagaaagcaacccaaaactggatccacaagagttagcccagaaaattctggaggagacacagagtcatctcattgcggtggagcgtcttcagaggagcggcggccaggtgagcaagagtaataaccctgaagacggcgttcaggcgcccagcagcactgctgtcttcagagcgtcagaaaccagtgcgttcagcaggcctgttctctcccatcagaagagtcagccatcaccagtcactgttaaaccaaagcccccagccaggagctcctccctgcccaaggtgagttccggatatagcagccccaccacctcagagatgtccatcaaagacagcccgagccagcacagtggccggccatcgcccggctgcgactcacagacttcccagctggaccagcctctctttaaactgaagtaccccagctctccttacagcgctcacatttccaaatcaccaaggaacatgtccccaagctccggccaccagtctcctgctggcagtgcaccctccccagctctctcctactcctcagctggatctgctcgctcaagtccagcagacgctcccgacatagacaaactgaaaatggcagccattgatgaaaaggtgcaggctgtccataacctgaagatgttctggcagagcacaccccagcattccacagggccaatgaagatcttccggggggctcctggcacgatgacttccaaaagggatgtcctcagtctgttgaatttgtcaccacggcacaataagaaggaggagggagtggataagcttgaactgaaggagctgtccctgcagcagcatgacggagctccaccgaaagcccctcccaacggacactggcgcaccgagaccacctcgctgggctcactgccgctgcccgccggccctcccgccacagcccccgcgcgccctttgaggcttccttctggaaatggctacaagttcctgtctccaggaagatttttcccttcttccaaatgctaaagcatcttttatacccactgactctgagcagcctgcagatgggggcctggcgtttgcttcagcccttccctgagtgcagtccccccacagccaccagcaccctcatgatgctgtgctctgcaggcgaggggcaccaccacgtccaaaggctgccacacacactggtggcttttctgggccacattcaccaaaagccaggacttctgtggggctggtacaggaggctcatggaatttcctacacacttcaccaaatgtttgtttacctttgaactccctgcttctcatctttgatatgattcttcaccaggattttgtacaaaaatgatcatggttctggggtggggagaggaaagggagcacatattttgctaagaggtatatatgcagtaccttttatacacagaaatacaaatagagctttttctaaggctttcggttgctggttgggggtgggatatatgaaatttcagttgaattctacaggaaagtgttatattagccaaaaacagaaaaatggtttttaaaatgccaatgatttgtaattaaattgtagcaattttggtctcatgatagtgtaatatctcagcaacaatgcaataattcacattgaaacagcgcttccattctgaactctgctctgcaaatgtcttttgggtcccgctgtcaaccaaacttgaattttcttaaaaaaaaaattatgtaactcttatccaggcattttagaactatgcaattgtgatttaaaatgcaactttgtgcttttaaaacattattgaccttttttgtatatggataaacaacttggttttattatcaatagtactttgcatttatagctattatttttaaaagctcaaaaagttttttaaaatgtcaaattttgaatagtcatcaataagtaattatcaagtttggaaggaaaggttgaaatgactccgtttccttataagcaaaaaaaaaaaa

SEQ ID NO: 415298 - DNA, 2033 bp, Homo sapiens
ggtatatcaggagctgagtgacttgccaggggagtgcagagctcatgggcacctggctgctgtctacatggcccttgggaaatacacaatggcattcaagtgttatgaagagcaactggatctagggcaaaagctgaaggatccgagtctggaagcccaggtctatggcaacatgggcatcacaaagatgaacatgaatgtgatggaagaagccattggctactttgagcagcaattggccatgctgcagcagctaagtggaaatgagtctgtgctcgacaggggccgggcctatggcaacctgggggattgctacgaagccctgggtgactatgaggaagctatcaaatactatgaacaatatttatctgtcgcgcagagtctgaatcgcatgcaagaccaagccaaggcttaccggggcctgggaaatggacacagggcaatggggagcttgcagcaagcccttgtgtgctttgaaaagaggctcgtggttgctcatgaacttggagaggccttcaataaagcccaggcctatggagagctgggaagtctgcacagccaattagggaattacgaacaagccatttcctgccttgaacgccagctgaacattgctagagatatgaaagaccgagccctggagagtgacgcagcctgtggcctggggggcgtttaccagcagatgggggagtatgacacagccctgcagtaccaccagcttgatctacagatagcagaggaaaccaacaaccccacgtgccagggccgagcctatgggaacctgggcctgacttatgaatccctgggcaccttcgagagggctgtggtctatcaagaacagcacttgagcattgctgcacagatgaatgacttggcggccaagacggtgtcatatagtagccttggaaggacccatcatgccttgcagaactattcccaagcagtcatgtacttacaggaaggtttaaggttagctgagcaactgggccgaagagaagatgaggcaaaaattcgccatggccttggcctctccctttgggctagtggaaacttggaggaggcccaacaccagctttatagggcatcagccttgtttgaaacaatccgacatgaggcacagctgagcacggactacaaactctccctctttgacctgcagacatcatcctaccaggccttgcagcgggtgctcgtcagcctaggccatcatgatgaagccctggctgtggcagaaaggggacggacaagggcatttgctgatcttctggtggaacgacaaacaggacaacaagactccgacccctactccccagtcactattgatcagatcttagagatggtaaatggccagaggggactagtgctttactattccctggctgcaggctatctgtatagctggctgctggctcctggggcaggaattgtgaagtttcatgaacactacctgggtgagaacacagtggaaaactcaagtgacttccaggccagcagcagtgtaacccttccaacagcaaccggctcagccctggagcagcacattgccagtgtccgggaggccctgggggtggagtctcactactcaagggcctgtgccagcagtgagacagagagtgaagcgggagacatcatggaccagcaatttgaagagatgaacaacaaactcaactcggtcactgaccccactggctttctgcggatggttcgccgcaataacctgtttaacagggatgcaaccaggtttgcggaggcctgggattgggcctggacacatgttcttgctctgccaacttctcagccagtgaaggcaggtgacacttacctccaccaggtgatgcaggctgtggtgataaactagagtgtgaagagctcagagtgcagcctctggccttgccactcacaagctgtaggacactagggaggcagtttcacctctgtcagcctcagtctcgtcatctgtgaaatggggatggcttcttaccctgcagggttcctgtaatgtgggaataaaggagccaatgtataaataaaaa

SEQ ID NO: 415299 - DNA, 455 bp, Homo sapiens
cagggctgagttgagtgggaagggagccaagggcaggggatgtaggagctggcagcctggttgtaaggaggccaaaacttcaagctagttcacccttagttccttcttcccagccaccttcacaggtgtccctcatggcttttggtttcatgtagggatgcaaccaggtttgcggaggcctgggattgggcctggacacatgttcttgctctgccaacttctcagccagtgaaggcaggtgacacttacctccaccaggtgatgcaggctgtggtgataaactagagtgtgaagagctcagagtgcagcctctggccttgccactcacaagctgtaggacactagggaggcagtttcacctctgtcagcctcagtctcgtcatctgtgaaatggggatggcttcttaccctgcagggttcctgtaatgtgggaataaaggagccaatgtataaat

SEQ ID NO: 415300 - DNA, 856 bp, Homo sapiens
acagtagtaaatgtttattatctcatattgttactgtgagtcaggaatctagaagtggcttagctgggtggctttggctgagtctgtcataaggttgtaatcacgatgcaaggcaaggatgtggtcatctgaaggttttaactggagatagaggatccatttccaaaatggcttagtcatgtgcctgtttgttgaccgaaggccccagttccttgtcatgaggacttctccatagtgtcttcacggtgtccttccaaagctaatgattcaggagaggacatagtagaaaccacaatgtctctcagcttcaaaagtcacacattgtcatttctacagtatccaaagtgtttacagaggatacctgtgctttctatgggaggggaataaacaagggcatgaatatgagcaggcaagagtaattgggggccaccttagagcctgacagccacatacacacattcagaattaccctgcaaacagttgaaaatatggaactccagactgtagcagacaagtcagagctaggaaactttggaagtactacagttgattactaaagccagtggtatgactaataagaataaatatagattccaggcacagctgcattaaaagaaaaaagaatatagaaagatttttcttgccctttgtatacctgcacatgtcttctgcaaggattgagacaaaattccattgcttgacgatacatgtcagtttttgaacatctttcagggaacttccaaatcaagtctttgtcatatggcttaataattctgtttgaaatgtactctagagatttgatgattgcaagagttaatctgcttcacttgagaatgcggcccaggtagttgactcc

SEQ ID NO: 415301 - DNA, 7038 bp, Homo sapiens
cccctgttcccactctccttccacctcggaccggccggggctccgcagagccaaagctcgcttgtccccggaaccgccctgctgccgccgcctgcttcctctgctcgcggttagcccgtcagtccctgctctgtgcgcgcctccatctgggccatggatggcggggatctgatgagcttctttcttctggcatcattaacggaccttttaccatgaatagttctactccttctacaggtgtgtatgctaatgggaatgacagcaagaaatttaaacgagatagacctccctgttcgccttcccgtgttctccatcttcgaaaaattccatgtgatgtcaccgaagcagagatcatatcattaggtctaccatttggcaaagtaactaatcttttgatgttgaaaggaaaaagccaggctttcttagaaatggcttctgaggaagctgccgttactatggtgaattattacactcctattactcctcaccttcgaagccagcctgtttatattcagtattccaatcacagagaacttaagactgacaatctacctaatcaagctcgagcccaagctgcactgcaggctgtcagtgccgtccaatcaggaagcctggccctttctggaggtccttccaatgaaggcacagtcctacctgggcagagccctgtgcttcgaataattattgaaaacctcttttaccctgttaccctggaagttcttcatcagatattttctaaatttggcacagtcttgaagattatcacctttacaaagaataatcagtttcaagccttgcttcagtatgctgacccagtaaatgcacattatgccaaaatggctctggatggccagaatatctataatgcatgctgcactctgcgcattgacttctccaagctcaccagccttaatgtgaaatataataatgacaaaagcagagacttcactcgcttagaccttcctactggtgatggccagccatcccttgaaccccctatggctgctgcttttggtgcaccgggtataatttcttcaccatatgcaggggctgctggatttgccccagccattggatttcctcaagctacaggtctatcagttccagctgttcctggagctcttggtcctctcacaatcacctcttctgctgtcactggaaggatggccattcctggggctagtggtataccaggaaattctgttctactcgtcacaaatctcaatcctgatcttatcacaccacatgggctttttatcctatttggagtctatggtgatgtacatcgagtgaagattatgtttaataagaaagaaaatgccttggttcagatggcggatgcaaatcaagctcagctagcaatgaaccatctaagtggtcagagactttatgggaaagtgcttcgtgctacactgtccaaacatcaagcagtacagcttcctcgagagggacaagaagaccaaggtctgactaaggatttcagcaatagtcctttgcatcgctttaaaaagccgggctctaaaaacttccagaatatctttccaccatcagccactctgcatctttccaacattcccccttctgttacagtggatgatctgaagaaccttttcatagaagctggatgttcagtgaaggcttttaaattctttcagaaagatcgcaaaatggcgctcattcaattgggatctgtggaagaagcaattcaggccctcattgagcttcataaccatgaccttggagaaaatcaccacctcagagtttccttctcaaaatctacaatctgacttttctgtgaatttttctcctaaaactggaccataatttcagtaaaaccttcagacatagactgaagcagctcaagaccaattttgcctctttcacaaaaataactctttctgagtttgatattcaagtatattttaaaaatcaagggattttttttttttgtattccccctgcccccgccagtcaaaggtttcttttccctttttaccatggtttctacaaaaataaccttcaggaaaaagaaaatcaggaaaaaaattttttttcaataatcttattccctatattaaattagatttgaagaggattaacgttgttttagtttgggtccagatcagccttatacaacatttctaaactcatttgtacttttaaaaaatttaaacacagacttctaaaattacttgatgtaagtaatttaaatcacttatgaccaagttattaaccttatgaatcagaagtctgacccttgtaggaaattatattcacatataaagtacatcagatctttgccatatattgatggttattatgcataaacacattgagttgtgttggaagcagatttataaacctgcatgttttctttgaatgatttctttttttcactgtaagacactcctttaaataatgcctatctttaactttttaagactatttggaaaaatgcagtgtctcagctgtccccagggaaattaagtggaattcaactaagatctgttaataagatgtcagaataactaataattttattaggaaaaaatcatgttttaaatttcaaaatgacacttatttgtcaagtaatatgatcttggaaaattttaaagaaaaataatcctacttataaactacttttttataattgttttcagaaaaaaagtttacagtcttaaggaaaatattcaggtctatcatatggtttgacagattttttaaaagttatttttggtaaggtcttcttttagaaaaaaattaatctcaagggttttttgtaccactataatctctaatacttactcagaattactgtgtatttacttaatttcttattatgtgccttattatgtgcttaagatacaataggttagagtttaatctaaatatcttgaaagctatattgtgggcttggtaagcattttgttttttctttctctgttttggtaaggatttaaaatttttttcattgcaattttaagtggttttcaataagtaatagtttttatcaaatttttggtgcttggtgcagagacggtgtggggaagggtgaatggttttgggaataattcagtgcacacctgtaggcctctttacattgtgactgataggggttattgcatatcaatttggggctgtagagtgcaatctcagtttcatctttttcacccatcagaatttgtctcaggattacttggtttttctcagtcctcaagcgagaacttgcttttctttgttaatgtgactttcattactgagtacccacgtatttggagtatgagaaggtgggttatttctcatactctgtccctctctttttcattgaatgtaagagtacattttaatgttgcttcagtgattgtataatgtaaaattgtttctttttaataagaaactttgctattatttcttcaattgttgatcagaattttttaaagcagaatttgtcaaaagggtcatttttttgtctaccccttttacacttttcagattctcaaagtgtctcatctcaacttttaaaagaataaagaatatcttgctgggcatggtggtgtgcgcctgtgcgcctgtagtcccagctacaggctgagcctgtaggcaggaggctacaggcaggaggatcacttgagcccaggagttcaaggctgcagtgcgctatgatcacatttgtgaatagccacttcactccagccctggaacatagtgtgaccccttctcttaaaagtaaaaattaagaaaatctcaatctctttgctgtattccagtgattaatttgaacatagggaggtttttacagaagaaattttaccaaaaaatagagactgcaagagatgatacagattgtttaaaaagcagaattcactcaccactgagcaacacttagttggtagaatagaaaggagggatactaagttaagacttttcaaatggatcagtttggctgaatagatagatatactcatgtatgtagttgtgggagtttttagttttttgtttttttacttatgaaataagttttgacctagacacaaggggtatatgaaggaggaaaaaaatttctttgcaaaatctcccaaaacttgcttttttttcccttccacacaggcactattataattttcagtgccatgttaaattggattatttcatttactttaagttaggaattactgtgtaatttattaattcatgattctcataacattcagcataagtgtagcaaagttgctaataacggaaggggatcatagtggtgttgaatgtaactttgaagtagggaatggccttttaagtctgagagagaacatttgaatccttttcagggatttgtgtaggggtgtgtttgtgtgtgtgtgtgaatgtgtgtgtgtgtagataagtgtatatacataaatacactcttctaaagttgtatatacatatgcacattacatacattttaatttattgacaaaattaaccaaattaagatttggagatgtgggatgttcttgttttaaaatagcatgtttgaaaccatcagtttgtgtctaaaattagctgtagcacatggatgttgtccatattaagctatttgctgtttgaattatagaggtctacagtatttgtgttggcatagtttttgtaaaaaaaagattaaaaaatatcaggatggtggaaaaactagatctgtgtatctctgttttggcatgcatttattcagtatcttctagcaatggtttttctctgttgatctaccgtagtatcctatttttaagtttattttatttttaaggagtattgtcatcacttttcaaggtgtcttgacttctacacaaagtatatatattcaggactttaaaaaatagcagtacacatttaacagtagcgaattacaccaaaatgatttactttgagatttgaataatttgcatagcagtaaaatgtgttttgtgtaacatacaaatagaaaaatgacccagtatcttaattgatacttactggagagtatcagaattacccagcagctcttacagaatgccataaattctttaagactaaatattgaaatcaattatttgaagtaatgtttctgatttactgttaaaagttgctgagctcagtttttggagatatcatttctgcctgcctgttcccttatgacagtgaggccttctttggctccacctagtatgataatcatgggttctgttttagttgatgagaagtggctcctatgaatgcctctgctcaatttctttttattttactttattttatttttaggggtctcgccaactcctgggctcaagtgattctcctgcttccacctccccacagtgctgggattacaggcatgagccaccacgcctggctctctgttcttttcagtgtctccgtgccatcagtcagcagtgcttacatgtttagcatattgtcatgcagtttctcttctgttcccacgagatatttttggacaaaaaattgacaaaagtacatgtgtttttccccacctatcccttagaaaacctaatgtgtactgctatttttaaaaccaaaaagagacagcgtgacgatgcgtaaagcatttttcttagcctttcctttgtcttgatctgttaatgagaacaaaactgccagactcaaaatactctactattgtgctgaaagaaatacaatttagattgcacaaaatttgaaaatataactcagctgtcttttaaaagagttgtgttgttatctacaagactattagcagtcttttttcagagcaaattttaacagctagttgtgagtggtttaaaatatagaaaattattaaaatcttagtttgaggggttttatagtgggagaaaaaacaggaccaaagtttatgtgccttcttcagtagtcttaattgaccttttcttcctatttgagactaaagtagtatcagtattctggttttcaggaaatatgtactatatagttttaaaagaatgttgtcccaccaactattcatccaagcaaagaattgtaactataaataaagtctcagttacacttttgcctttatcacataatattcattgtagagcattgtgcaggtccaagaatagagctgctcaaaatctttgtggtagtttccttagtttttgtaacctgaggcatatgttccagagaacagggatatttgtctggtccagtgaccttggtgatcatagtcataattgaaagatgcctatggcatgcttaaatcagcattgtcaactgatttgttgttgtattattttcacttcttggatctatgtagtagttgtaataacaaatatttaaatagctatttttttgatgccattaaaaaaatcatactctggccttttttcccccttactgttgtttcccagatcttttaaaaattcatcccatatccagaaagtaccagttataaagattgctgaccaagcaaagttttgcatcaaagtgtcacctcattgctctgaccaaagactgactgttgtggttttaactcctctctgtaaagcattttgcattttccccaagctcctttctgaaagaagacccagtgcagagcggcctttactttcaatttctactgctgaatagactacttagagaaaatgtgagtttcagtgtgaacagaatggattaggatgacgagtttgatgggcattttcagtactgtatctaagaaaaaaaaaatagcacagctaggagcctctgacattgtctggtgttttacgtggtctgttcatcaaaattccccttttcagtttttaagaatgttcgtctaacagaagaaaatgctgtaaatatttgtaacaacattttttttaacaaggccaaaaaagaaaaaaaggtttttgggaacaaatgaacttataaagtggttttatataaaacatcaattgtcttgtatattttggataagcagcagtaccagctttcatttgtaacagtctgtggcattggaaaaaaaggagtctgtgattgttgaagtgaattatgttataaatgcaaagagaagataaaatattaaaaaacatattttctaaa

SEQ ID NO: 415302 - DNA, 7126 bp, Homo sapiens
accggcgaggtggggcgagcggccgacggcgggtgcacgcgtcggtacacgtctgggcggcgacctggtcgcaagccatggtcccacgcggggtcccagggccgccgcgggacttggccgaggtctcccgacttgtgctgtgagatacgttaacgctttctcgacaccaggggtctggacttagtgaccatggacgcttccccctcacctttctctctccccaagaaacttaatgaattatctgcccgtcggggatctgatgagcttctttcttctggcatcattaacggaccttttaccatgaatagttctactccttctacaggtgtgtatgctaatgggaatgacagcaagaaatttaaacgagatagacctccctgttcgccttcccgtgttctccatcttcgaaaaattccatgtgatgtcaccgaagcagagatcatatcattaggtctaccatttggcaaagtaactaatcttttgatgttgaaaggaaaaagccaggctttcttagaaatggcttctgaggaagctgccgttactatggtgaattattacactcctattactcctcaccttcgaagccagcctgtttatattcagtattccaatcacagagaacttaagactgacaatctacctaatcaagctcgagcccaagctgcactgcaggctgtcagtgccgtccaatcaggaagcctggccctttctggaggtccttccaatgaaggcacagtcctacctgggcagagccctgtgcttcgaataattattgaaaacctcttttaccctgttaccctggaagttcttcatcagatattttctaaatttggcacagtcttgaagattatcacctttacaaagaataatcagtttcaagccttgcttcagtatgctgacccagtaaatgcacattatgccaaaatggctctggatggccagaatatctataatgcatgctgcactctgcgcattgacttctccaagctcaccagccttaatgtgaaatataataatgacaaaagcagagacttcactcgcttagaccttcctactggtgatggccagccatcccttgaaccccctatggctgctgcttttggtgcaccgggtataatttcttcaccatatgcaggggctgctggatttgccccagccattggatttcctcaagctacaggtctatcagttccagctgttcctggagctcttggtcctctcacaatcacctcttctgctgtcactggaaggatggccattcctggggctagtggtataccaggaaattctgttctactcgtcacaaatctcaatcctgatcttatcacaccacatgggctttttatcctatttggagtctatggtgatgtacatcgagtgaagattatgtttaataagaaagaaaatgccttggttcagatggcggatgcaaatcaagctcagctagcaatgaaccatctaagtggtcagagactttatgggaaagtgcttcgtgctacactgtccaaacatcaagcagtacagcttcctcgagagggacaagaagaccaaggtctgactaaggatttcagcaatagtcctttgcatcgctttaaaaagccgggctctaaaaacttccagaatatctttccaccatcagccactctgcatctttccaacattcccccttctgttacagtggatgatctgaagaaccttttcatagaagctggatgttcagtgaaggcttttaaattctttcagaaagatcgcaaaatggcgctcattcaattgggatctgtggaagaagcaattcaggccctcattgagcttcataaccatgaccttggagaaaatcaccacctcagagtttccttctcaaaatctacaatctgacttttctgtgaatttttctcctaaaactggaccataatttcagtaaaaccttcagacatagactgaagcagctcaagaccaattttgcctctttcacaaaaataactctttctgagtttgatattcaagtatattttaaaaatcaagggattttttttttttgtattccccctgcccccgccagtcaaaggtttcttttccctttttaccatggtttctacaaaaataaccttcaggaaaaagaaaatcaggaaaaaaattttttttcaataatcttattccctatattaaattagatttgaagaggattaacgttgttttagtttgggtccagatcagccttatacaacatttctaaactcatttgtacttttaaaaaatttaaacacagacttctaaaattacttgatgtaagtaatttaaatcacttatgaccaagttattaaccttatgaatcagaagtctgacccttgtaggaaattatattcacatataaagtacatcagatctttgccatatattgatggttattatgcataaacacattgagttgtgttggaagcagatttataaacctgcatgttttctttgaatgatttctttttttcactgtaagacactcctttaaataatgcctatctttaactttttaagactatttggaaaaatgcagtgtctcagctgtccccagggaaattaagtggaattcaactaagatctgttaataagatgtcagaataactaataattttattaggaaaaaatcatgttttaaatttcaaaatgacacttatttgtcaagtaatatgatcttggaaaattttaaagaaaaataatcctacttataaactacttttttataattgttttcagaaaaaaagtttacagtcttaaggaaaatattcaggtctatcatatggtttgacagattttttaaaagttatttttggtaaggtcttcttttagaaaaaaattaatctcaagggttttttgtaccactataatctctaatacttactcagaattactgtgtatttacttaatttcttattatgtgccttattatgtgcttaagatacaataggttagagtttaatctaaatatcttgaaagctatattgtgggcttggtaagcattttgttttttctttctctgttttggtaaggatttaaaatttttttcattgcaattttaagtggttttcaataagtaatagtttttatcaaatttttggtgcttggtgcagagacggtgtggggaagggtgaatggttttgggaataattcagtgcacacctgtaggcctctttacattgtgactgataggggttattgcatatcaatttggggctgtagagtgcaatctcagtttcatctttttcacccatcagaatttgtctcaggattacttggtttttctcagtcctcaagcgagaacttgcttttctttgttaatgtgactttcattactgagtacccacgtatttggagtatgagaaggtgggttatttctcatactctgtccctctctttttcattgaatgtaagagtacattttaatgttgcttcagtgattgtataatgtaaaattgtttctttttaataagaaactttgctattatttcttcaattgttgatcagaattttttaaagcagaatttgtcaaaagggtcatttttttgtctaccccttttacacttttcagattctcaaagtgtctcatctcaacttttaaaagaataaagaatatcttgctgggcatggtggtgtgcgcctgtgcgcctgtagtcccagctacaggctgagcctgtaggcaggaggctacaggcaggaggatcacttgagcccaggagttcaaggctgcagtgcgctatgatcacatttgtgaatagccacttcactccagccctggaacatagtgtgaccccttctcttaaaagtaaaaattaagaaaatctcaatctctttgctgtattccagtgattaatttgaacatagggaggtttttacagaagaaattttaccaaaaaatagagactgcaagagatgatacagattgtttaaaaagcagaattcactcaccactgagcaacacttagttggtagaatagaaaggagggatactaagttaagacttttcaaatggatcagtttggctgaatagatagatatactcatgtatgtagttgtgggagtttttagttttttgtttttttacttatgaaataagttttgacctagacacaaggggtatatgaaggaggaaaaaaatttctttgcaaaatctcccaaaacttgcttttttttcccttccacacaggcactattataattttcagtgccatgttaaattggattatttcatttactttaagttaggaattactgtgtaatttattaattcatgattctcataacattcagcataagtgtagcaaagttgctaataacggaaggggatcatagtggtgttgaatgtaactttgaagtagggaatggccttttaagtctgagagagaacatttgaatccttttcagggatttgtgtaggggtgtgtttgtgtgtgtgtgtgaatgtgtgtgtgtgtagataagtgtatatacataaatacactcttctaaagttgtatatacatatgcacattacatacattttaatttattgacaaaattaaccaaattaagatttggagatgtgggatgttcttgttttaaaatagcatgtttgaaaccatcagtttgtgtctaaaattagctgtagcacatggatgttgtccatattaagctatttgctgtttgaattatagaggtctacagtatttgtgttggcatagtttttgtaaaaaaaagattaaaaaatatcaggatggtggaaaaactagatctgtgtatctctgttttggcatgcatttattcagtatcttctagcaatggtttttctctgttgatctaccgtagtatcctatttttaagtttattttatttttaaggagtattgtcatcacttttcaaggtgtcttgacttctacacaaagtatatatattcaggactttaaaaaatagcagtacacatttaacagtagcgaattacaccaaaatgatttactttgagatttgaataatttgcatagcagtaaaatgtgttttgtgtaacatacaaatagaaaaatgacccagtatcttaattgatacttactggagagtatcagaattacccagcagctcttacagaatgccataaattctttaagactaaatattgaaatcaattatttgaagtaatgtttctgatttactgttaaaagttgctgagctcagtttttggagatatcatttctgcctgcctgttcccttatgacagtgaggccttctttggctccacctagtatgataatcatgggttctgttttagttgatgagaagtggctcctatgaatgcctctgctcaatttctttttattttactttattttatttttaggggtctcgccaactcctgggctcaagtgattctcctgcttccacctccccacagtgctgggattacaggcatgagccaccacgcctggctctctgttcttttcagtgtctccgtgccatcagtcagcagtgcttacatgtttagcatattgtcatgcagtttctcttctgttcccacgagatatttttggacaaaaaattgacaaaagtacatgtgtttttccccacctatcccttagaaaacctaatgtgtactgctatttttaaaaccaaaaagagacagcgtgacgatgcgtaaagcatttttcttagcctttcctttgtcttgatctgttaatgagaacaaaactgccagactcaaaatactctactattgtgctgaaagaaatacaatttagattgcacaaaatttgaaaatataactcagctgtcttttaaaagagttgtgttgttatctacaagactattagcagtcttttttcagagcaaattttaacagctagttgtgagtggtttaaaatatagaaaattattaaaatcttagtttgaggggttttatagtgggagaaaaaacaggaccaaagtttatgtgccttcttcagtagtcttaattgaccttttcttcctatttgagactaaagtagtatcagtattctggttttcaggaaatatgtactatatagttttaaaagaatgttgtcccaccaactattcatccaagcaaagaattgtaactataaataaagtctcagttacacttttgcctttatcacataatattcattgtagagcattgtgcaggtccaagaatagagctgctcaaaatctttgtggtagtttccttagtttttgtaacctgaggcatatgttccagagaacagggatatttgtctggtccagtgaccttggtgatcatagtcataattgaaagatgcctatggcatgcttaaatcagcattgtcaactgatttgttgttgtattattttcacttcttggatctatgtagtagttgtaataacaaatatttaaatagctatttttttgatgccattaaaaaaatcatactctggccttttttcccccttactgttgtttcccagatcttttaaaaattcatcccatatccagaaagtaccagttataaagattgctgaccaagcaaagttttgcatcaaagtgtcacctcattgctctgaccaaagactgactgttgtggttttaactcctctctgtaaagcattttgcattttccccaagctcctttctgaaagaagacccagtgcagagcggcctttactttcaatttctactgctgaatagactacttagagaaaatgtgagtttcagtgtgaacagaatggattaggatgacgagtttgatgggcattttcagtactgtatctaagaaaaaaaaaatagcacagctaggagcctctgacattgtctggtgttttacgtggtctgttcatcaaaattccccttttcagtttttaagaatgttcgtctaacagaagaaaatgctgtaaatatttgtaacaacattttttttaacaaggccaaaaaagaaaaaaaggtttttgggaacaaatgaacttataaagtggttttatataaaacatcaattgtcttgtatattttggataagcagcagtaccagctttcatttgtaacagtctgtggcattggaaaaaaaggagtctgtgattgttgaagtgaattatgttataaatgcaaagagaagataaaatattaaaaaacatattttctaaa

SEQ ID NO: 415303 - DNA, 7072 bp, Homo sapiens
cccctgttcccactctccttccacctcggaccggccggggctccgcagagccaaagctcgcttgtccccggaaccgccctgctgccgccgcctgcttcctctgctcgcggttagcccgtcagtccctgctctgtgcgcgcctccatctgggccatggatggtgttgttacagatcttataacagtcggtttaaagcggggatctgatgagcttctttcttctggcatcattaacggaccttttaccatgaatagttctactccttctacaggtgtgtatgctaatgggaatgacagcaagaaatttaaacgagatagacctccctgttcgccttcccgtgttctccatcttcgaaaaattccatgtgatgtcaccgaagcagagatcatatcattaggtctaccatttggcaaagtaactaatcttttgatgttgaaaggaaaaagccaggctttcttagaaatggcttctgaggaagctgccgttactatggtgaattattacactcctattactcctcaccttcgaagccagcctgtttatattcagtattccaatcacagagaacttaagactgacaatctacctaatcaagctcgagcccaagctgcactgcaggctgtcagtgccgtccaatcaggaagcctggccctttctggaggtccttccaatgaaggcacagtcctacctgggcagagccctgtgcttcgaataattattgaaaacctcttttaccctgttaccctggaagttcttcatcagatattttctaaatttggcacagtcttgaagattatcacctttacaaagaataatcagtttcaagccttgcttcagtatgctgacccagtaaatgcacattatgccaaaatggctctggatggccagaatatctataatgcatgctgcactctgcgcattgacttctccaagctcaccagccttaatgtgaaatataataatgacaaaagcagagacttcactcgcttagaccttcctactggtgatggccagccatcccttgaaccccctatggctgctgcttttggtgcaccgggtataatttcttcaccatatgcaggggctgctggatttgccccagccattggatttcctcaagctacaggtctatcagttccagctgttcctggagctcttggtcctctcacaatcacctcttctgctgtcactggaaggatggccattcctggggctagtggtataccaggaaattctgttctactcgtcacaaatctcaatcctgatcttatcacaccacatgggctttttatcctatttggagtctatggtgatgtacatcgagtgaagattatgtttaataagaaagaaaatgccttggttcagatggcggatgcaaatcaagctcagctagcaatgaaccatctaagtggtcagagactttatgggaaagtgcttcgtgctacactgtccaaacatcaagcagtacagcttcctcgagagggacaagaagaccaaggtctgactaaggatttcagcaatagtcctttgcatcgctttaaaaagccgggctctaaaaacttccagaatatctttccaccatcagccactctgcatctttccaacattcccccttctgttacagtggatgatctgaagaaccttttcatagaagctggatgttcagtgaaggcttttaaattctttcagaaagatcgcaaaatggcgctcattcaattgggatctgtggaagaagcaattcaggccctcattgagcttcataaccatgaccttggagaaaatcaccacctcagagtttccttctcaaaatctacaatctgacttttctgtgaatttttctcctaaaactggaccataatttcagtaaaaccttcagacatagactgaagcagctcaagaccaattttgcctctttcacaaaaataactctttctgagtttgatattcaagtatattttaaaaatcaagggattttttttttttgtattccccctgcccccgccagtcaaaggtttcttttccctttttaccatggtttctacaaaaataaccttcaggaaaaagaaaatcaggaaaaaaattttttttcaataatcttattccctatattaaattagatttgaagaggattaacgttgttttagtttgggtccagatcagccttatacaacatttctaaactcatttgtacttttaaaaaatttaaacacagacttctaaaattacttgatgtaagtaatttaaatcacttatgaccaagttattaaccttatgaatcagaagtctgacccttgtaggaaattatattcacatataaagtacatcagatctttgccatatattgatggttattatgcataaacacattgagttgtgttggaagcagatttataaacctgcatgttttctttgaatgatttctttttttcactgtaagacactcctttaaataatgcctatctttaactttttaagactatttggaaaaatgcagtgtctcagctgtccccagggaaattaagtggaattcaactaagatctgttaataagatgtcagaataactaataattttattaggaaaaaatcatgttttaaatttcaaaatgacacttatttgtcaagtaatatgatcttggaaaattttaaagaaaaataatcctacttataaactacttttttataattgttttcagaaaaaaagtttacagtcttaaggaaaatattcaggtctatcatatggtttgacagattttttaaaagttatttttggtaaggtcttcttttagaaaaaaattaatctcaagggttttttgtaccactataatctctaatacttactcagaattactgtgtatttacttaatttcttattatgtgccttattatgtgcttaagatacaataggttagagtttaatctaaatatcttgaaagctatattgtgggcttggtaagcattttgttttttctttctctgttttggtaaggatttaaaatttttttcattgcaattttaagtggttttcaataagtaatagtttttatcaaatttttggtgcttggtgcagagacggtgtggggaagggtgaatggttttgggaataattcagtgcacacctgtaggcctctttacattgtgactgataggggttattgcatatcaatttggggctgtagagtgcaatctcagtttcatctttttcacccatcagaatttgtctcaggattacttggtttttctcagtcctcaagcgagaacttgcttttctttgttaatgtgactttcattactgagtacccacgtatttggagtatgagaaggtgggttatttctcatactctgtccctctctttttcattgaatgtaagagtacattttaatgttgcttcagtgattgtataatgtaaaattgtttctttttaataagaaactttgctattatttcttcaattgttgatcagaattttttaaagcagaatttgtcaaaagggtcatttttttgtctaccccttttacacttttcagattctcaaagtgtctcatctcaacttttaaaagaataaagaatatcttgctgggcatggtggtgtgcgcctgtgcgcctgtagtcccagctacaggctgagcctgtaggcaggaggctacaggcaggaggatcacttgagcccaggagttcaaggctgcagtgcgctatgatcacatttgtgaatagccacttcactccagccctggaacatagtgtgaccccttctcttaaaagtaaaaattaagaaaatctcaatctctttgctgtattccagtgattaatttgaacatagggaggtttttacagaagaaattttaccaaaaaatagagactgcaagagatgatacagattgtttaaaaagcagaattcactcaccactgagcaacacttagttggtagaatagaaaggagggatactaagttaagacttttcaaatggatcagtttggctgaatagatagatatactcatgtatgtagttgtgggagtttttagttttttgtttttttacttatgaaataagttttgacctagacacaaggggtatatgaaggaggaaaaaaatttctttgcaaaatctcccaaaacttgcttttttttcccttccacacaggcactattataattttcagtgccatgttaaattggattatttcatttactttaagttaggaattactgtgtaatttattaattcatgattctcataacattcagcataagtgtagcaaagttgctaataacggaaggggatcatagtggtgttgaatgtaactttgaagtagggaatggccttttaagtctgagagagaacatttgaatccttttcagggatttgtgtaggggtgtgtttgtgtgtgtgtgtgaatgtgtgtgtgtgtagataagtgtatatacataaatacactcttctaaagttgtatatacatatgcacattacatacattttaatttattgacaaaattaaccaaattaagatttggagatgtgggatgttcttgttttaaaatagcatgtttgaaaccatcagtttgtgtctaaaattagctgtagcacatggatgttgtccatattaagctatttgctgtttgaattatagaggtctacagtatttgtgttggcatagtttttgtaaaaaaaagattaaaaaatatcaggatggtggaaaaactagatctgtgtatctctgttttggcatgcatttattcagtatcttctagcaatggtttttctctgttgatctaccgtagtatcctatttttaagtttattttatttttaaggagtattgtcatcacttttcaaggtgtcttgacttctacacaaagtatatatattcaggactttaaaaaatagcagtacacatttaacagtagcgaattacaccaaaatgatttactttgagatttgaataatttgcatagcagtaaaatgtgttttgtgtaacatacaaatagaaaaatgacccagtatcttaattgatacttactggagagtatcagaattacccagcagctcttacagaatgccataaattctttaagactaaatattgaaatcaattatttgaagtaatgtttctgatttactgttaaaagttgctgagctcagtttttggagatatcatttctgcctgcctgttcccttatgacagtgaggccttctttggctccacctagtatgataatcatgggttctgttttagttgatgagaagtggctcctatgaatgcctctgctcaatttctttttattttactttattttatttttaggggtctcgccaactcctgggctcaagtgattctcctgcttccacctccccacagtgctgggattacaggcatgagccaccacgcctggctctctgttcttttcagtgtctccgtgccatcagtcagcagtgcttacatgtttagcatattgtcatgcagtttctcttctgttcccacgagatatttttggacaaaaaattgacaaaagtacatgtgtttttccccacctatcccttagaaaacctaatgtgtactgctatttttaaaaccaaaaagagacagcgtgacgatgcgtaaagcatttttcttagcctttcctttgtcttgatctgttaatgagaacaaaactgccagactcaaaatactctactattgtgctgaaagaaatacaatttagattgcacaaaatttgaaaatataactcagctgtcttttaaaagagttgtgttgttatctacaagactattagcagtcttttttcagagcaaattttaacagctagttgtgagtggtttaaaatatagaaaattattaaaatcttagtttgaggggttttatagtgggagaaaaaacaggaccaaagtttatgtgccttcttcagtagtcttaattgaccttttcttcctatttgagactaaagtagtatcagtattctggttttcaggaaatatgtactatatagttttaaaagaatgttgtcccaccaactattcatccaagcaaagaattgtaactataaataaagtctcagttacacttttgcctttatcacataatattcattgtagagcattgtgcaggtccaagaatagagctgctcaaaatctttgtggtagtttccttagtttttgtaacctgaggcatatgttccagagaacagggatatttgtctggtccagtgaccttggtgatcatagtcataattgaaagatgcctatggcatgcttaaatcagcattgtcaactgatttgttgttgtattattttcacttcttggatctatgtagtagttgtaataacaaatatttaaatagctatttttttgatgccattaaaaaaatcatactctggccttttttcccccttactgttgtttcccagatcttttaaaaattcatcccatatccagaaagtaccagttataaagattgctgaccaagcaaagttttgcatcaaagtgtcacctcattgctctgaccaaagactgactgttgtggttttaactcctctctgtaaagcattttgcattttccccaagctcctttctgaaagaagacccagtgcagagcggcctttactttcaatttctactgctgaatagactacttagagaaaatgtgagtttcagtgtgaacagaatggattaggatgacgagtttgatgggcattttcagtactgtatctaagaaaaaaaaaatagcacagctaggagcctctgacattgtctggtgttttacgtggtctgttcatcaaaattccccttttcagtttttaagaatgttcgtctaacagaagaaaatgctgtaaatatttgtaacaacattttttttaacaaggccaaaaaagaaaaaaaggtttttgggaacaaatgaacttataaagtggttttatataaaacatcaattgtcttgtatattttggataagcagcagtaccagctttcatttgtaacagtctgtggcattggaaaaaaaggagtctgtgattgttgaagtgaattatgttataaatgcaaagagaagataaaatattaaaaaacatattttctaaa

SEQ ID NO: 415304 - DNA, 6868 bp, Homo sapiens
cccctgttcccactctccttccacctcggaccggccggggctccgcagagccaaagctcgcttgtccccggaaccgccctgctgccgccgcctgcttcctctgctcgcggttagcccgtcagtccctgctctgtgcgcgcctccatctgggccatggatggcggggatctgatgagcttctttcttctggcatcattaacggaccttttaccatgaatagttctactccttctacaggtgtgtatggctttcttagaaatggcttctgaggaagctgccgttactatggtgaattattacactcctattactcctcaccttcgaagccagcctgtttatattcagtattccaatcacagagaacttaagactgacaatctacctaatcaagctcgagcccaagctgcactgcaggctgtcagtgccgtccaatcaggaagcctggccctttctggaggtccttccaatgaaggcacagtcctacctgggcagagccctgtgcttcgaataattattgaaaacctcttttaccctgttaccctggaagttcttcatcagatattttctaaatttggcacagtcttgaagattatcacctttacaaagaataatcagtttcaagccttgcttcagtatgctgacccagtaaatgcacattatgccaaaatggctctggatggccagaatatctataatgcatgctgcactctgcgcattgacttctccaagctcaccagccttaatgtgaaatataataatgacaaaagcagagacttcactcgcttagaccttcctactggtgatggccagccatcccttgaaccccctatggctgctgcttttggtgcaccgggtataatttcttcaccatatgcaggggctgctggatttgccccagccattggatttcctcaagctacaggtctatcagttccagctgttcctggagctcttggtcctctcacaatcacctcttctgctgtcactggaaggatggccattcctggggctagtggtataccaggaaattctgttctactcgtcacaaatctcaatcctgatcttatcacaccacatgggctttttatcctatttggagtctatggtgatgtacatcgagtgaagattatgtttaataagaaagaaaatgccttggttcagatggcggatgcaaatcaagctcagctagcaatgaaccatctaagtggtcagagactttatgggaaagtgcttcgtgctacactgtccaaacatcaagcagtacagcttcctcgagagggacaagaagaccaaggtctgactaaggatttcagcaatagtcctttgcatcgctttaaaaagccgggctctaaaaacttccagaatatctttccaccatcagccactctgcatctttccaacattcccccttctgttacagtggatgatctgaagaaccttttcatagaagctggatgttcagtgaaggcttttaaattctttcagaaagatcgcaaaatggcgctcattcaattgggatctgtggaagaagcaattcaggccctcattgagcttcataaccatgaccttggagaaaatcaccacctcagagtttccttctcaaaatctacaatctgacttttctgtgaatttttctcctaaaactggaccataatttcagtaaaaccttcagacatagactgaagcagctcaagaccaattttgcctctttcacaaaaataactctttctgagtttgatattcaagtatattttaaaaatcaagggattttttttttttgtattccccctgcccccgccagtcaaaggtttcttttccctttttaccatggtttctacaaaaataaccttcaggaaaaagaaaatcaggaaaaaaattttttttcaataatcttattccctatattaaattagatttgaagaggattaacgttgttttagtttgggtccagatcagccttatacaacatttctaaactcatttgtacttttaaaaaatttaaacacagacttctaaaattacttgatgtaagtaatttaaatcacttatgaccaagttattaaccttatgaatcagaagtctgacccttgtaggaaattatattcacatataaagtacatcagatctttgccatatattgatggttattatgcataaacacattgagttgtgttggaagcagatttataaacctgcatgttttctttgaatgatttctttttttcactgtaagacactcctttaaataatgcctatctttaactttttaagactatttggaaaaatgcagtgtctcagctgtccccagggaaattaagtggaattcaactaagatctgttaataagatgtcagaataactaataattttattaggaaaaaatcatgttttaaatttcaaaatgacacttatttgtcaagtaatatgatcttggaaaattttaaagaaaaataatcctacttataaactacttttttataattgttttcagaaaaaaagtttacagtcttaaggaaaatattcaggtctatcatatggtttgacagattttttaaaagttatttttggtaaggtcttcttttagaaaaaaattaatctcaagggttttttgtaccactataatctctaatacttactcagaattactgtgtatttacttaatttcttattatgtgccttattatgtgcttaagatacaataggttagagtttaatctaaatatcttgaaagctatattgtgggcttggtaagcattttgttttttctttctctgttttggtaaggatttaaaatttttttcattgcaattttaagtggttttcaataagtaatagtttttatcaaatttttggtgcttggtgcagagacggtgtggggaagggtgaatggttttgggaataattcagtgcacacctgtaggcctctttacattgtgactgataggggttattgcatatcaatttggggctgtagagtgcaatctcagtttcatctttttcacccatcagaatttgtctcaggattacttggtttttctcagtcctcaagcgagaacttgcttttctttgttaatgtgactttcattactgagtacccacgtatttggagtatgagaaggtgggttatttctcatactctgtccctctctttttcattgaatgtaagagtacattttaatgttgcttcagtgattgtataatgtaaaattgtttctttttaataagaaactttgctattatttcttcaattgttgatcagaattttttaaagcagaatttgtcaaaagggtcatttttttgtctaccccttttacacttttcagattctcaaagtgtctcatctcaacttttaaaagaataaagaatatcttgctgggcatggtggtgtgcgcctgtgcgcctgtagtcccagctacaggctgagcctgtaggcaggaggctacaggcaggaggatcacttgagcccaggagttcaaggctgcagtgcgctatgatcacatttgtgaatagccacttcactccagccctggaacatagtgtgaccccttctcttaaaagtaaaaattaagaaaatctcaatctctttgctgtattccagtgattaatttgaacatagggaggtttttacagaagaaattttaccaaaaaatagagactgcaagagatgatacagattgtttaaaaagcagaattcactcaccactgagcaacacttagttggtagaatagaaaggagggatactaagttaagacttttcaaatggatcagtttggctgaatagatagatatactcatgtatgtagttgtgggagtttttagttttttgtttttttacttatgaaataagttttgacctagacacaaggggtatatgaaggaggaaaaaaatttctttgcaaaatctcccaaaacttgcttttttttcccttccacacaggcactattataattttcagtgccatgttaaattggattatttcatttactttaagttaggaattactgtgtaatttattaattcatgattctcataacattcagcataagtgtagcaaagttgctaataacggaaggggatcatagtggtgttgaatgtaactttgaagtagggaatggccttttaagtctgagagagaacatttgaatccttttcagggatttgtgtaggggtgtgtttgtgtgtgtgtgtgaatgtgtgtgtgtgtagataagtgtatatacataaatacactcttctaaagttgtatatacatatgcacattacatacattttaatttattgacaaaattaaccaaattaagatttggagatgtgggatgttcttgttttaaaatagcatgtttgaaaccatcagtttgtgtctaaaattagctgtagcacatggatgttgtccatattaagctatttgctgtttgaattatagaggtctacagtatttgtgttggcatagtttttgtaaaaaaaagattaaaaaatatcaggatggtggaaaaactagatctgtgtatctctgttttggcatgcatttattcagtatcttctagcaatggtttttctctgttgatctaccgtagtatcctatttttaagtttattttatttttaaggagtattgtcatcacttttcaaggtgtcttgacttctacacaaagtatatatattcaggactttaaaaaatagcagtacacatttaacagtagcgaattacaccaaaatgatttactttgagatttgaataatttgcatagcagtaaaatgtgttttgtgtaacatacaaatagaaaaatgacccagtatcttaattgatacttactggagagtatcagaattacccagcagctcttacagaatgccataaattctttaagactaaatattgaaatcaattatttgaagtaatgtttctgatttactgttaaaagttgctgagctcagtttttggagatatcatttctgcctgcctgttcccttatgacagtgaggccttctttggctccacctagtatgataatcatgggttctgttttagttgatgagaagtggctcctatgaatgcctctgctcaatttctttttattttactttattttatttttaggggtctcgccaactcctgggctcaagtgattctcctgcttccacctccccacagtgctgggattacaggcatgagccaccacgcctggctctctgttcttttcagtgtctccgtgccatcagtcagcagtgcttacatgtttagcatattgtcatgcagtttctcttctgttcccacgagatatttttggacaaaaaattgacaaaagtacatgtgtttttccccacctatcccttagaaaacctaatgtgtactgctatttttaaaaccaaaaagagacagcgtgacgatgcgtaaagcatttttcttagcctttcctttgtcttgatctgttaatgagaacaaaactgccagactcaaaatactctactattgtgctgaaagaaatacaatttagattgcacaaaatttgaaaatataactcagctgtcttttaaaagagttgtgttgttatctacaagactattagcagtcttttttcagagcaaattttaacagctagttgtgagtggtttaaaatatagaaaattattaaaatcttagtttgaggggttttatagtgggagaaaaaacaggaccaaagtttatgtgccttcttcagtagtcttaattgaccttttcttcctatttgagactaaagtagtatcagtattctggttttcaggaaatatgtactatatagttttaaaagaatgttgtcccaccaactattcatccaagcaaagaattgtaactataaataaagtctcagttacacttttgcctttatcacataatattcattgtagagcattgtgcaggtccaagaatagagctgctcaaaatctttgtggtagtttccttagtttttgtaacctgaggcatatgttccagagaacagggatatttgtctggtccagtgaccttggtgatcatagtcataattgaaagatgcctatggcatgcttaaatcagcattgtcaactgatttgttgttgtattattttcacttcttggatctatgtagtagttgtaataacaaatatttaaatagctatttttttgatgccattaaaaaaatcatactctggccttttttcccccttactgttgtttcccagatcttttaaaaattcatcccatatccagaaagtaccagttataaagattgctgaccaagcaaagttttgcatcaaagtgtcacctcattgctctgaccaaagactgactgttgtggttttaactcctctctgtaaagcattttgcattttccccaagctcctttctgaaagaagacccagtgcagagcggcctttactttcaatttctactgctgaatagactacttagagaaaatgtgagtttcagtgtgaacagaatggattaggatgacgagtttgatgggcattttcagtactgtatctaagaaaaaaaaaatagcacagctaggagcctctgacattgtctggtgttttacgtggtctgttcatcaaaattccccttttcagtttttaagaatgttcgtctaacagaagaaaatgctgtaaatatttgtaacaacattttttttaacaaggccaaaaaagaaaaaaaggtttttgggaacaaatgaacttataaagtggttttatataaaacatcaattgtcttgtatattttggataagcagcagtaccagctttcatttgtaacagtctgtggcattggaaaaaaaggagtctgtgattgttgaagtgaattatgttataaatgcaaagagaagataaaatattaaaaaacatattttctaaa

SEQ ID NO: 415305 - DNA, 6783 bp, Homo sapiens
cccctgttcccactctccttccacctcggaccggccggggctccgcagagccaaagctcgcttgtccccggaaccgccctgctgccgccgcctgcttcctctgctcgcggttagcccgtcagtccctgctctgtgcgcgcctccatctgggccatggatgggctttcttagaaatggcttctgaggaagctgccgttactatggtgaattattacactcctattactcctcaccttcgaagccagcctgtttatattcagtattccaatcacagagaacttaagactgacaatctacctaatcaagctcgagcccaagctgcactgcaggctgtcagtgccgtccaatcaggaagcctggccctttctggaggtccttccaatgaaggcacagtcctacctgggcagagccctgtgcttcgaataattattgaaaacctcttttaccctgttaccctggaagttcttcatcagatattttctaaatttggcacagtcttgaagattatcacctttacaaagaataatcagtttcaagccttgcttcagtatgctgacccagtaaatgcacattatgccaaaatggctctggatggccagaatatctataatgcatgctgcactctgcgcattgacttctccaagctcaccagccttaatgtgaaatataataatgacaaaagcagagacttcactcgcttagaccttcctactggtgatggccagccatcccttgaaccccctatggctgctgcttttggtgcaccgggtataatttcttcaccatatgcaggggctgctggatttgccccagccattggatttcctcaagctacaggtctatcagttccagctgttcctggagctcttggtcctctcacaatcacctcttctgctgtcactggaaggatggccattcctggggctagtggtataccaggaaattctgttctactcgtcacaaatctcaatcctgatcttatcacaccacatgggctttttatcctatttggagtctatggtgatgtacatcgagtgaagattatgtttaataagaaagaaaatgccttggttcagatggcggatgcaaatcaagctcagctagcaatgaaccatctaagtggtcagagactttatgggaaagtgcttcgtgctacactgtccaaacatcaagcagtacagcttcctcgagagggacaagaagaccaaggtctgactaaggatttcagcaatagtcctttgcatcgctttaaaaagccgggctctaaaaacttccagaatatctttccaccatcagccactctgcatctttccaacattcccccttctgttacagtggatgatctgaagaaccttttcatagaagctggatgttcagtgaaggcttttaaattctttcagaaagatcgcaaaatggcgctcattcaattgggatctgtggaagaagcaattcaggccctcattgagcttcataaccatgaccttggagaaaatcaccacctcagagtttccttctcaaaatctacaatctgacttttctgtgaatttttctcctaaaactggaccataatttcagtaaaaccttcagacatagactgaagcagctcaagaccaattttgcctctttcacaaaaataactctttctgagtttgatattcaagtatattttaaaaatcaagggattttttttttttgtattccccctgcccccgccagtcaaaggtttcttttccctttttaccatggtttctacaaaaataaccttcaggaaaaagaaaatcaggaaaaaaattttttttcaataatcttattccctatattaaattagatttgaagaggattaacgttgttttagtttgggtccagatcagccttatacaacatttctaaactcatttgtacttttaaaaaatttaaacacagacttctaaaattacttgatgtaagtaatttaaatcacttatgaccaagttattaaccttatgaatcagaagtctgacccttgtaggaaattatattcacatataaagtacatcagatctttgccatatattgatggttattatgcataaacacattgagttgtgttggaagcagatttataaacctgcatgttttctttgaatgatttctttttttcactgtaagacactcctttaaataatgcctatctttaactttttaagactatttggaaaaatgcagtgtctcagctgtccccagggaaattaagtggaattcaactaagatctgttaataagatgtcagaataactaataattttattaggaaaaaatcatgttttaaatttcaaaatgacacttatttgtcaagtaatatgatcttggaaaattttaaagaaaaataatcctacttataaactacttttttataattgttttcagaaaaaaagtttacagtcttaaggaaaatattcaggtctatcatatggtttgacagattttttaaaagttatttttggtaaggtcttcttttagaaaaaaattaatctcaagggttttttgtaccactataatctctaatacttactcagaattactgtgtatttacttaatttcttattatgtgccttattatgtgcttaagatacaataggttagagtttaatctaaatatcttgaaagctatattgtgggcttggtaagcattttgttttttctttctctgttttggtaaggatttaaaatttttttcattgcaattttaagtggttttcaataagtaatagtttttatcaaatttttggtgcttggtgcagagacggtgtggggaagggtgaatggttttgggaataattcagtgcacacctgtaggcctctttacattgtgactgataggggttattgcatatcaatttggggctgtagagtgcaatctcagtttcatctttttcacccatcagaatttgtctcaggattacttggtttttctcagtcctcaagcgagaacttgcttttctttgttaatgtgactttcattactgagtacccacgtatttggagtatgagaaggtgggttatttctcatactctgtccctctctttttcattgaatgtaagagtacattttaatgttgcttcagtgattgtataatgtaaaattgtttctttttaataagaaactttgctattatttcttcaattgttgatcagaattttttaaagcagaatttgtcaaaagggtcatttttttgtctaccccttttacacttttcagattctcaaagtgtctcatctcaacttttaaaagaataaagaatatcttgctgggcatggtggtgtgcgcctgtgcgcctgtagtcccagctacaggctgagcctgtaggcaggaggctacaggcaggaggatcacttgagcccaggagttcaaggctgcagtgcgctatgatcacatttgtgaatagccacttcactccagccctggaacatagtgtgaccccttctcttaaaagtaaaaattaagaaaatctcaatctctttgctgtattccagtgattaatttgaacatagggaggtttttacagaagaaattttaccaaaaaatagagactgcaagagatgatacagattgtttaaaaagcagaattcactcaccactgagcaacacttagttggtagaatagaaaggagggatactaagttaagacttttcaaatggatcagtttggctgaatagatagatatactcatgtatgtagttgtgggagtttttagttttttgtttttttacttatgaaataagttttgacctagacacaaggggtatatgaaggaggaaaaaaatttctttgcaaaatctcccaaaacttgcttttttttcccttccacacaggcactattataattttcagtgccatgttaaattggattatttcatttactttaagttaggaattactgtgtaatttattaattcatgattctcataacattcagcataagtgtagcaaagttgctaataacggaaggggatcatagtggtgttgaatgtaactttgaagtagggaatggccttttaagtctgagagagaacatttgaatccttttcagggatttgtgtaggggtgtgtttgtgtgtgtgtgtgaatgtgtgtgtgtgtagataagtgtatatacataaatacactcttctaaagttgtatatacatatgcacattacatacattttaatttattgacaaaattaaccaaattaagatttggagatgtgggatgttcttgttttaaaatagcatgtttgaaaccatcagtttgtgtctaaaattagctgtagcacatggatgttgtccatattaagctatttgctgtttgaattatagaggtctacagtatttgtgttggcatagtttttgtaaaaaaaagattaaaaaatatcaggatggtggaaaaactagatctgtgtatctctgttttggcatgcatttattcagtatcttctagcaatggtttttctctgttgatctaccgtagtatcctatttttaagtttattttatttttaaggagtattgtcatcacttttcaaggtgtcttgacttctacacaaagtatatatattcaggactttaaaaaatagcagtacacatttaacagtagcgaattacaccaaaatgatttactttgagatttgaataatttgcatagcagtaaaatgtgttttgtgtaacatacaaatagaaaaatgacccagtatcttaattgatacttactggagagtatcagaattacccagcagctcttacagaatgccataaattctttaagactaaatattgaaatcaattatttgaagtaatgtttctgatttactgttaaaagttgctgagctcagtttttggagatatcatttctgcctgcctgttcccttatgacagtgaggccttctttggctccacctagtatgataatcatgggttctgttttagttgatgagaagtggctcctatgaatgcctctgctcaatttctttttattttactttattttatttttaggggtctcgccaactcctgggctcaagtgattctcctgcttccacctccccacagtgctgggattacaggcatgagccaccacgcctggctctctgttcttttcagtgtctccgtgccatcagtcagcagtgcttacatgtttagcatattgtcatgcagtttctcttctgttcccacgagatatttttggacaaaaaattgacaaaagtacatgtgtttttccccacctatcccttagaaaacctaatgtgtactgctatttttaaaaccaaaaagagacagcgtgacgatgcgtaaagcatttttcttagcctttcctttgtcttgatctgttaatgagaacaaaactgccagactcaaaatactctactattgtgctgaaagaaatacaatttagattgcacaaaatttgaaaatataactcagctgtcttttaaaagagttgtgttgttatctacaagactattagcagtcttttttcagagcaaattttaacagctagttgtgagtggtttaaaatatagaaaattattaaaatcttagtttgaggggttttatagtgggagaaaaaacaggaccaaagtttatgtgccttcttcagtagtcttaattgaccttttcttcctatttgagactaaagtagtatcagtattctggttttcaggaaatatgtactatatagttttaaaagaatgttgtcccaccaactattcatccaagcaaagaattgtaactataaataaagtctcagttacacttttgcctttatcacataatattcattgtagagcattgtgcaggtccaagaatagagctgctcaaaatctttgtggtagtttccttagtttttgtaacctgaggcatatgttccagagaacagggatatttgtctggtccagtgaccttggtgatcatagtcataattgaaagatgcctatggcatgcttaaatcagcattgtcaactgatttgttgttgtattattttcacttcttggatctatgtagtagttgtaataacaaatatttaaatagctatttttttgatgccattaaaaaaatcatactctggccttttttcccccttactgttgtttcccagatcttttaaaaattcatcccatatccagaaagtaccagttataaagattgctgaccaagcaaagttttgcatcaaagtgtcacctcattgctctgaccaaagactgactgttgtggttttaactcctctctgtaaagcattttgcattttccccaagctcctttctgaaagaagacccagtgcagagcggcctttactttcaatttctactgctgaatagactacttagagaaaatgtgagtttcagtgtgaacagaatggattaggatgacgagtttgatgggcattttcagtactgtatctaagaaaaaaaaaatagcacagctaggagcctctgacattgtctggtgttttacgtggtctgttcatcaaaattccccttttcagtttttaagaatgttcgtctaacagaagaaaatgctgtaaatatttgtaacaacattttttttaacaaggccaaaaaagaaaaaaaggtttttgggaacaaatgaacttataaagtggttttatataaaacatcaattgtcttgtatattttggataagcagcagtaccagctttcatttgtaacagtctgtggcattggaaaaaaaggagtctgtgattgttgaagtgaattatgttataaatgcaaagagaagataaaatattaaaaaacatattttctaaa

SEQ ID NO: 415306 - DNA, 5732 bp, Homo sapiens
gagtttaacgataagcttgattggggatgggggatgcaatcaagctcagctagcaatgaaccatctaagtggtcagagactttatgggaaagtgcttcgtgctacactgtccaaacatcaagcagtacagcttcctcgagagggacaagaagaccaaggtctgactaaggatttcagcaatagtcctttgcatcgctttaaaaagccgggctctaaaaacttccagaatatctttccaccatcagccactctgcatctttccaacattcccccttctgttacagtggatgatctgaagaaccttttcatagaagctggatgttcagtgaaggcttttaaattctttcagaaagatcgcaaaatggcgctcattcaattgggatctgtggaagaagcaattcaggccctcattgagcttcataaccatgaccttggagaaaatcaccacctcagagtttccttctcaaaatctacaatctgacttttctgtgaatttttctcctaaaactggaccataatttcagtaaaaccttcagacatagactgaagcagctcaagaccaattttgcctctttcacaaaaataactctttctgagtttgatattcaagtatattttaaaaatcaagggattttttttttttgtattccccctgcccccgccagtcaaaggtttcttttccctttttaccatggtttctacaaaaataaccttcaggaaaaagaaaatcaggaaaaaaattttttttcaataatcttattccctatattaaattagatttgaagaggattaacgttgttttagtttgggtccagatcagccttatacaacatttctaaactcatttgtacttttaaaaaatttaaacacagacttctaaaattacttgatgtaagtaatttaaatcacttatgaccaagttattaaccttatgaatcagaagtctgacccttgtaggaaattatattcacatataaagtacatcagatctttgccatatattgatggttattatgcataaacacattgagttgtgttggaagcagatttataaacctgcatgttttctttgaatgatttctttttttcactgtaagacactcctttaaataatgcctatctttaactttttaagactatttggaaaaatgcagtgtctcagctgtccccagggaaattaagtggaattcaactaagatctgttaataagatgtcagaataactaataattttattaggaaaaaatcatgttttaaatttcaaaatgacacttatttgtcaagtaatatgatcttggaaaattttaaagaaaaataatcctacttataaactacttttttataattgttttcagaaaaaaagtttacagtcttaaggaaaatattcaggtctatcatatggtttgacagattttttaaaagttatttttggtaaggtcttcttttagaaaaaaattaatctcaagggttttttgtaccactataatctctaatacttactcagaattactgtgtatttacttaatttcttattatgtgccttattatgtgcttaagatacaataggttagagtttaatctaaatatcttgaaagctatattgtgggcttggtaagcattttgttttttctttctctgttttggtaaggatttaaaatttttttcattgcaattttaagtggttttcaataagtaatagtttttatcaaatttttggtgcttggtgcagagacggtgtggggaagggtgaatggttttgggaataattcagtgcacacctgtaggcctctttacattgtgactgataggggttattgcatatcaatttggggctgtagagtgcaatctcagtttcatctttttcacccatcagaatttgtctcaggattacttggtttttctcagtcctcaagcgagaacttgcttttctttgttaatgtgactttcattactgagtacccacgtatttggagtatgagaaggtgggttatttctcatactctgtccctctctttttcattgaatgtaagagtacattttaatgttgcttcagtgattgtataatgtaaaattgtttctttttaataagaaactttgctattatttcttcaattgttgatcagaattttttaaagcagaatttgtcaaaagggtcatttttttgtctaccccttttacacttttcagattctcaaagtgtctcatctcaacttttaaaagaataaagaatatcttgctgggcatggtggtgtgcgcctgtgcgcctgtagtcccagctacaggctgagcctgtaggcaggaggctacaggcaggaggatcacttgagcccaggagttcaaggctgcagtgcgctatgatcacatttgtgaatagccacttcactccagccctggaacatagtgtgaccccttctcttaaaagtaaaaattaagaaaatctcaatctctttgctgtattccagtgattaatttgaacatagggaggtttttacagaagaaattttaccaaaaaatagagactgcaagagatgatacagattgtttaaaaagcagaattcactcaccactgagcaacacttagttggtagaatagaaaggagggatactaagttaagacttttcaaatggatcagtttggctgaatagatagatatactcatgtatgtagttgtgggagtttttagttttttgtttttttacttatgaaataagttttgacctagacacaaggggtatatgaaggaggaaaaaaatttctttgcaaaatctcccaaaacttgcttttttttcccttccacacaggcactattataattttcagtgccatgttaaattggattatttcatttactttaagttaggaattactgtgtaatttattaattcatgattctcataacattcagcataagtgtagcaaagttgctaataacggaaggggatcatagtggtgttgaatgtaactttgaagtagggaatggccttttaagtctgagagagaacatttgaatccttttcagggatttgtgtaggggtgtgtttgtgtgtgtgtgtgaatgtgtgtgtgtgtagataagtgtatatacataaatacactcttctaaagttgtatatacatatgcacattacatacattttaatttattgacaaaattaaccaaattaagatttggagatgtgggatgttcttgttttaaaatagcatgtttgaaaccatcagtttgtgtctaaaattagctgtagcacatggatgttgtccatattaagctatttgctgtttgaattatagaggtctacagtatttgtgttggcatagtttttgtaaaaaaaagattaaaaaatatcaggatggtggaaaaactagatctgtgtatctctgttttggcatgcatttattcagtatcttctagcaatggtttttctctgttgatctaccgtagtatcctatttttaagtttattttatttttaaggagtattgtcatcacttttcaaggtgtcttgacttctacacaaagtatatatattcaggactttaaaaaatagcagtacacatttaacagtagcgaattacaccaaaatgatttactttgagatttgaataatttgcatagcagtaaaatgtgttttgtgtaacatacaaatagaaaaatgacccagtatcttaattgatacttactggagagtatcagaattacccagcagctcttacagaatgccataaattctttaagactaaatattgaaatcaattatttgaagtaatgtttctgatttactgttaaaagttgctgagctcagtttttggagatatcatttctgcctgcctgttcccttatgacagtgaggccttctttggctccacctagtatgataatcatgggttctgttttagttgatgagaagtggctcctatgaatgcctctgctcaatttctttttattttactttattttatttttaggggtctcgccaactcctgggctcaagtgattctcctgcttccacctccccacagtgctgggattacaggcatgagccaccacgcctggctctctgttcttttcagtgtctccgtgccatcagtcagcagtgcttacatgtttagcatattgtcatgcagtttctcttctgttcccacgagatatttttggacaaaaaattgacaaaagtacatgtgtttttccccacctatcccttagaaaacctaatgtgtactgctatttttaaaaccaaaaagagacagcgtgacgatgcgtaaagcatttttcttagcctttcctttgtcttgatctgttaatgagaacaaaactgccagactcaaaatactctactattgtgctgaaagaaatacaatttagattgcacaaaatttgaaaatataactcagctgtcttttaaaagagttgtgttgttatctacaagactattagcagtcttttttcagagcaaattttaacagctagttgtgagtggtttaaaatatagaaaattattaaaatcttagtttgaggggttttatagtgggagaaaaaacaggaccaaagtttatgtgccttcttcagtagtcttaattgaccttttcttcctatttgagactaaagtagtatcagtattctggttttcaggaaatatgtactatatagttttaaaagaatgttgtcccaccaactattcatccaagcaaagaattgtaactataaataaagtctcagttacacttttgcctttatcacataatattcattgtagagcattgtgcaggtccaagaatagagctgctcaaaatctttgtggtagtttccttagtttttgtaacctgaggcatatgttccagagaacagggatatttgtctggtccagtgaccttggtgatcatagtcataattgaaagatgcctatggcatgcttaaatcagcattgtcaactgatttgttgttgtattattttcacttcttggatctatgtagtagttgtaataacaaatatttaaatagctatttttttgatgccattaaaaaaatcatactctggccttttttcccccttactgttgtttcccagatcttttaaaaattcatcccatatccagaaagtaccagttataaagattgctgaccaagcaaagttttgcatcaaagtgtcacctcattgctctgaccaaagactgactgttgtggttttaactcctctctgtaaagcattttgcattttccccaagctcctttctgaaagaagacccagtgcagagcggcctttactttcaatttctactgctgaatagactacttagagaaaatgtgagtttcagtgtgaacagaatggattaggatgacgagtttgatgggcattttcagtactgtatctaagaaaaaaaaaatagcacagctaggagcctctgacattgtctggtgttttacgtggtctgttcatcaaaattccccttttcagtttttaagaatgttcgtctaacagaagaaaatgctgtaaatatttgtaacaacattttttttaacaaggccaaaaaagaaaaaaaggtttttgggaacaaatgaacttataaagtggttttatataaaacatcaattgtcttgtatattttggataagcagcagtaccagctttcatttgtaacagtctgtggcattggaaaaaaaggagtctgtgattgttgaagtgaattatgttataaatgcaaagagaagataaaatattaaaaaacatattttctaaa

SEQ ID NO: 415307 - DNA, 7210 bp, Homo sapiens
cccctgttcccactctccttccacctcggaccggccggggctccgcagagccaaagctcgcttgtccccggaaccgccctgctgccgccgcctgcttcctctgctcgcggttagcccgtcagtccctgctctgtgcgcgcctccatctgggccatggatggcggggatctgatgagcttctttcttctggcatcattaacggaccttttaccatgaatagttctactccttctacaggtgtgtatgctaatgggaatgacagcaagaaatttaaacgagatagacctccctgttcgccttcccgtgttctccatcttcgaaaaattccatgtgatgtcaccgaagcagagatcatatcattaggtctaccatttggcaaagtaactaatcttttgatgttgaaaggaaaaagccaggctttcttagaaatggcttctgaggaagctgccgttactatggtgaattattacactcctattactcctcaccttcgaagccagcctgtttatattcagtattccaatcacagagaacttaagactgacaatctacctaatcaagctcgagcccaagctgcactgcaggctgtcagtgccgtccaatcaggaagcctggccctttctggaggtccttccaatgaaggcacagtcctacctgggcagagccctgtgcttcgaataattattgaaaacctcttttaccctgttaccctggaagttcttcatcagatattttctaaatttggcacagtcttgaagattatcacctttacaaagaataatcagtttcaagccttgcttcagtatgctgacccagtaaatgcacattatgccaaaatggctctggatggccagaatatctataatgcatgctgcactctgcgcattgacttctccaagctcaccagccttaatgtgaaatataataatgacaaaagcagagacttcactcgcttagaccttcctactggtgatggccagccatcccttgaaccccctatggctgctgcttttggtgcaccgggtataatttcttcaccatatgcaggggctgctggatttgccccagccattggatttcctcaagctacaggtctatcagttccagctgttcctggagctcttggtcctctcacaatcacctcttctgctgtcactggaaggatggccattcctggggctagtggtataccaggaaattctgttctactcgtcacaaatctcaatcctgatcttatcacaccacatgggctttttatcctatttggagtctatggtgatgtacatcgagtgaagattatgtttaataagaaagaaaatgccttggttcagatggcggatgcaaatcaagctcagctagcaatgaaccatctaagtggtcagagactttatgggaaagtgcttcgtgctacactgtccaaacatcaagcagtacagcttcctcgagagggacaagaagaccaaggtctgactaaggatttcagcaatagtcctttgcatcgctttaaaaagccgggctctaaaaacttccagaatatctttccaccatcagccactctgcatctttccaacattcccccttctgttacagtggatgatctgaagaaccttttcatagaagctggatgttcagtgaaggcttttaaattctttcagaaagatcgcaaaatggcgctcattcaattgggatctgtggaagaagcaattcaggccctcattgagcttcataaccatgaccttggagaaaatcaccacctcagagtttccttctcaaaatctacaatctgacttttctgtgaatttttctcctaaaactggaccataatttcagtaaaaccttcagacatagactgaagcagctcaagaccaattttgcctctttcacaaaaataactctttctgagtttgatattcaagtatattttaaaaatcaagggattttttttttttgtattccccctgcccccgccagtcaaaggtttcttttccctttttaccatggtttctacaaaaataaccttcaggaaaaagaaaatcaggaaaaaaattttttttcaataatcttattccctatattaaattagatttgaagaggattaacgttgttttagtttgggtccagatcagccttatacaacatttctaaactcatttgtacttttaaaaaatttaaacacagacttctaaaattacttgatgtaagtaatttaaatcacttatgaccaagttattaaccttatgaatcagaagtctgacccttgtaggaaattatattcacatataaagtacatcagatctttgccatatattgatggttattatgcataaacacattgagttgtgttggaagcagatttataaacctgcatgttttctttgaatgatttctttttttcactgtaagacactcctttaaataatgcctatctttaactttttaagactatttggaaaaatgcagtgtctcagctgtccccagggaaattaagtggaattcaactaagatctgttaataagatgtcagaataactaataattttattaggaaaaaatcatgttttaaatttcaaaatgacacttatttgtcaagtaatatgatcttggaaaattttaaagaaaaataatcctacttataaactacttttttataattgttttcagaaaaaaagtttacagtcttaaggaaaatattcaggtctatcatatggtttgacagattttttaaaagttatttttggtaaggtcttcttttagaaaaaaattaatctcaagggttttttgtaccactataatctctaatacttactcagaattactgtgtatttacttaatttcttattatgtgccttattatgtgcttaagatacaataggttagagtttaatctaaatatcttgaaagctatattgtgggcttggtaagcattttgttttttctttctctgttttggtaaggatttaaaatttttttcattgcaattttaagtggttttcaataagtaatagtttttatcaaatttttggtgcttggtgcagagacggtgtggggaagggtgaatggttttgggaataattcagtgcacacctgtaggcctctttacattgtgactgataggggttattgcatatcaatttggggctgtagagtgcaatctcagtttcatctttttcacccatcagaatttgtctcaggattacttggtttttctcagtcctcaagcgagaacttgcttttctttgttaatgtgactttcattactgagtacccacgtatttggagtatgagaaggtgggttatttctcatactctgtccctctctttttcattgaatgtaagagtacattttaatgttgcttcagtgattgtataatgtaaaattgtttctttttaataagaaactttgctattatttcttcaattgttgatcagaattttttaaagcagaatttgtcaaaagggtcatttttttgtctaccccttttacacttttcagattctcaaagtgtctcatctcaacttttaaaagaataaagaatatcttgctgggcatggtggtgtgcgcctgtgcgcctgtagtcccagctacaggctgagcctgtaggcaggaggctacaggcaggaggatcacttgagcccaggagttcaaggctgcagtgcgctatgatcacatttgtgaatagccacttcactccagccctggaacatagtgtgaccccttctcttaaaagtaaaaattaagaaaatctcaatctctttgctgtattccagtgattaatttgaacatagggaggtttttacagaagaaattttaccaaaaaatagagactgcaagagatgatacagattgtttaaaaagcagaattcactcaccactgagcaacacttagttggtagaatagaaaggagggatactaagttaagacttttcaaatggatcagtttggctgaatagatagatatactcatgtatgtagttgtgggagtttttagttttttgtttttttacttatgaaataagttttgacctagacacaaggggtatatgaaggaggaaaaaaatttctttgcaaaatctcccaaaacttgcttttttttcccttccacacaggcactattataattttcagtgccatgttaaattggattatttcatttactttaagttaggaattactgtgtaatttattaattcatgattctcataacattcagcataagtgtagcaaagttgctaataacggaaggggatcatagtggtgttgaatgtaactttgaagtagggaatggccttttaagtctgagagagaacatttgaatccttttcagggatttgtgtaggggtgtgtttgtgtgtgtgtgtgaatgtgtgtgtgtgtagataagtgtatatacataaatacactcttctaaagttgtatatacatatgcacattacatacattttaatttattgacaaaattaaccaaattaagatttggagatgtgggatgttcttgttttaaaatagcatgtttgaaaccatcagtttgtgtctaaaattagctgtagcacatggatgttgtccatattaagctatttgctgtttgaattatagaggtctacagtatttgtgttggcatagtttttgtaaaaaaaagattaaaaaatatcaggatggtggaaaaactagatctgtgtatctctgttttggcatgcatttattcagtatcttctagcaatggtttttctctgttgatctaccgtagtatcctatttttaagtttattttatttttaaggagtattgtcatcacttttcaaggtgtcttgacttctacacaaagtatatatattcaggactttaaaaaatagcagtacacatttaacagtagcgaattacaccaaaatgatttactttgagatttgaataatttgcatagcagtaaaatgtgttttgtgtaacatacaaatagaaaaatgacccagtatcttaattgatacttactggagagtatcagaattacccagcagctcttacagaatgccataaattctttaagactaaatattgaaatcaattatttgaagtaatgtttctgatttactgttaaaagttgctgagctcagtttttggagatatcatttctgcctgcctgttcccttatgacagtgaggccttctttggctccacctagtatgataatcatgggttctgttttagttgatgagaagtggctcctatgaatgcctctgctcaatttctttttattttactttattttatttttaggggtctcgccaactcctgggctcaagtgattctcctgcttccacctccccacagtgctgggattacaggcatgagccaccacgcctggctctctgttcttttcagtgtctccgtgccatcagtcagcagtgcttacatgtttagcatattgtcatgcagtttctcttctgttcccacgagatatttttggacaaaaaattgacaaaagtacatgtgtttttccccacctatcccttagaaaacctaatgtgtactgctatttttaaaaccaaaaagagacagcgtgacgatgcgtaaagcatttttcttagcctttcctttgtcttgatctgttaatgagaacaaaactgccagactcaaaatactctactattgtgctgaaagaaatacaatttagattgcacaaaatttgaaaatataactcagctgtcttttaaaagagttgtgttgttatctacaagactattagcagtcttttttcagagcaaattttaacagctagttgtgagtggtttaaaatatagaaaattattaaaatcttagtttgaggggttttatagtgggagaaaaaacaggaccaaagtttatgtgccttcttcagtagtcttaattgaccttttcttcctatttgagactaaagtagtatcagtattctggttttcaggaaatatgtactatatagttttaaaagaatgttgtcccaccaactattcatccaagcaaagaattgtaactataaataaagtctcagttacacttttgcctttatcacataatattcattgtagagcattgtgcaggtccaagaatagagctgctcaaaatctttgtggtagtttccttagtttttgtaacctgaggcatatgttccagagaacagggatatttgtctggtccagtgaccttggtgatcatagtcataattgaaagatgcctatggcatgcttaaatcagcattgtcaactgatttgttgttgtattattttcacttcttggatctatgtagtagttgtaataacaaatatttaaatagctatttttttgatgccattaaaaaaatcatactctggccttttttcccccttactgttgtttcccagatcttttaaaaattcatcccatatccagaaagtaccagttataaagattgctgaccaagcaaagttttgcatcaaagtgtcacctcattgctctgaccaaagactgactgttgtggttttaactcctctctgtaaagcattttgcattttccccaagctcctttctgaaagaagacccagtgcagagcggcctttactttcaatttctactgctgaatagactacttagagaaaatgtgagtttcagtgtgaacagaatggattaggatgacgagtttgatgggcattttcagtactgtatctaagaaaaaaaaaatagcacagctaggagcctctgacattgtctggtgttttacgtggtctgttcatcaaaattccccttttcagtttttaagaatgttcgtctaacagaagaaaatgctgtaaatatttgtaacaacattttttttaacaaggccaaaaaagaaaaaaaggtttttgggaacaaatgaacttataaagtggttttatataaaacatcaattgtcttgtatattttggataagcagcagtaccagctttcatttgtaacagtctgtggcattggaaaaaaaggagtctgtgattgttgaagtgaattatgttataaatgcaaagagaagataaaatattaaaaaacatattttctaaatgcgtagtgcatggttaattcaagcttctgtacactacagtatattccattttcgttcagtttgtatatttgctgactattacttgatatctctaatctcttttcctaacaaatatagcattgtagcatgccttttaataaatgtcatgacatctgtactctcttaaaaaat

SEQ ID NO: 415308 - DNA, 7541 bp, Homo sapiens
cccctgttcccactctccttccacctcggaccggccggggctccgcagagccaaagctcgcttgtccccggaaccgccctgctgccgccgcctgcttcctctgctcgcggttagcccgtcagtccctgctctgtgcgcgcctccatctgggccatggatggcggggatctgatgagcttctttcttctggcatcattaacggaccttttaccatgaatagttctactccttctacaggtgtgtatgctaatgggaatgacagcaagaaatttaaacgagatagacctccctgttcgccttcccgtgttctccatcttcgaaaaattccatgtgatgtcaccgaagcagagatcatatcattaggtctaccatttggcaaagtaactaatcttttgatgttgaaaggaaaaagccaggctttcttagaaatggcttctgaggaagctgccgttactatggtgaattattacactcctattactcctcaccttcgaagccagcctgtttatattcagtattccaatcacagagaacttaagactgacaatctacctaatcaagctcgagcccaagctgcactgcaggctgtcagtgccgtccaatcaggaagcctggccctttctggaggtccttccaatgaaggcacagtcctacctgggcagagccctgtgcttcgaataattattgaaaacctcttttaccctgttaccctggaagttcttcatcagatattttctaaatttggcacagtcttgaagattatcacctttacaaagaataatcagtttcaagccttgcttcagtatgctgacccagtaaatgcacattatgccaaaatggctctggatggccagaatatctataatgcatgctgcactctgcgcattgacttctccaagctcaccagccttaatgtgaaatataataatgacaaaagcagagacttcactcgcttagaccttcctactggtgatggccagccatcccttgaaccccctatggctgctgcttttggtgcaccgggtataatttcttcaccatatgcaggggctgctggatttgccccagccattggatttcctcaagctacaggtctatcagttccagctgttcctggagctcttggtcctctcacaatcacctcttctgctgtcactggaaggatggccattcctggggctagtggtataccaggaaattctgttctactcgtcacaaatctcaatcctgatcttatcacaccacatgggctttttatcctatttggagtctatggtgatgtacatcgagtgaagattatgtttaataagaaagaaaatgccttggttcagatggcggatgcaaatcaagctcagctagcaatgaaccatctaagtggtcagagactttatgggaaagtgcttcgtgctacactgtccaaacatcaagcagtacagcttcctcgagagggacaagaagaccaaggtctgactaaggatttcagcaatagtcctttgcatcgctttaaaaagccgggctctaaaaacttccagaatatctttccaccatcagccactctgcatctttccaacattcccccttctgttacagtggatgatctgaagaaccttttcatagaagctggatgttcagtgaaggcttttaaattctttcagaaagatcgcaaaatggcgctcattcaattgggatctgtggaagaagcaattcaggccctcattgagcttcataaccatgaccttggagaaaatcaccacctcagagtttccttctcaaaatctacaatctgacttttctgtgaatttttctcctaaaactggaccataatttcagtaaaaccttcagacatagactgaagcagctcaagaccaattttgcctctttcacaaaaataactctttctgagtttgatattcaagtatattttaaaaatcaagggattttttttttttgtattccccctgcccccgccagtcaaaggtttcttttccctttttaccatggtttctacaaaaataaccttcaggaaaaagaaaatcaggaaaaaaattttttttcaataatcttattccctatattaaattagatttgaagaggattaacgttgttttagtttgggtccagatcagccttatacaacatttctaaactcatttgtacttttaaaaaatttaaacacagacttctaaaattacttgatgtaagtaatttaaatcacttatgaccaagttattaaccttatgaatcagaagtctgacccttgtaggaaattatattcacatataaagtacatcagatctttgccatatattgatggttattatgcataaacacattgagttgtgttggaagcagatttataaacctgcatgttttctttgaatgatttctttttttcactgtaagacactcctttaaataatgcctatctttaactttttaagactatttggaaaaatgcagtgtctcagctgtccccagggaaattaagtggaattcaactaagatctgttaataagatgtcagaataactaataattttattaggaaaaaatcatgttttaaatttcaaaatgacacttatttgtcaagtaatatgatcttggaaaattttaaagaaaaataatcctacttataaactacttttttataattgttttcagaaaaaaagtttacagtcttaaggaaaatattcaggtctatcatatggtttgacagattttttaaaagttatttttggtaaggtcttcttttagaaaaaaattaatctcaagggttttttgtaccactataatctctaatacttactcagaattactgtgtatttacttaatttcttattatgtgccttattatgtgcttaagatacaataggttagagtttaatctaaatatcttgaaagctatattgtgggcttggtaagcattttgttttttctttctctgttttggtaaggatttaaaatttttttcattgcaattttaagtggttttcaataagtaatagtttttatcaaatttttggtgcttggtgcagagacggtgtggggaagggtgaatggttttgggaataattcagtgcacacctgtaggcctctttacattgtgactgataggggttattgcatatcaatttggggctgtagagtgcaatctcagtttcatctttttcacccatcagaatttgtctcaggattacttggtttttctcagtcctcaagcgagaacttgcttttctttgttaatgtgactttcattactgagtacccacgtatttggagtatgagaaggtgggttatttctcatactctgtccctctctttttcattgaatgtaagagtacattttaatgttgcttcagtgattgtataatgtaaaattgtttctttttaataagaaactttgctattatttcttcaattgttgatcagaattttttaaagcagaatttgtcaaaagggtcatttttttgtctaccccttttacacttttcagattctcaaagtgtctcatctcaacttttaaaagaataaagaatatcttgctgggcatggtggtgtgcgcctgtgcgcctgtagtcccagctacaggctgagcctgtaggcaggaggctacaggcaggaggatcacttgagcccaggagttcaaggctgcagtgcgctatgatcacatttgtgaatagccacttcactccagccctggaacatagtgtgaccccttctcttaaaagtaaaaattaagaaaatctcaatctctttgctgtattccagtgattaatttgaacatagggaggtttttacagaagaaattttaccaaaaaatagagactgcaagagatgatacagattgtttaaaaagcagaattcactcaccactgagcaacacttagttggtagaatagaaaggagggatactaagttaagacttttcaaatggatcagtttggctgaatagatagatatactcatgtatgtagttgtgggagtttttagttttttgtttttttacttatgaaataagttttgacctagacacaaggggtatatgaaggaggaaaaaaatttctttgcaaaatctcccaaaacttgcttttttttcccttccacacaggcactattataattttcagtgccatgttaaattggattatttcatttactttaagttaggaattactgtgtaatttattaattcatgattctcataacattcagcataagtgtagcaaagttgctaataacggaaggggatcatagtggtgttgaatgtaactttgaagtagggaatggccttttaagtctgagagagaacatttgaatccttttcagggatttgtgtaggggtgtgtttgtgtgtgtgtgtgaatgtgtgtgtgtgtagataagtgtatatacataaatacactcttctaaagttgtatatacatatgcacattacatacattttaatttattgacaaaattaaccaaattaagatttggagatgtgggatgttcttgttttaaaatagcatgtttgaaaccatcagtttgtgtctaaaattagctgtagcacatggatgttgtccatattaagctatttgctgtttgaattatagaggtctacagtatttgtgttggcatagtttttgtaaaaaaaagattaaaaaatatcaggatggtggaaaaactagatctgtgtatctctgttttggcatgcatttattcagtatcttctagcaatggtttttctctgttgatctaccgtagtatcctatttttaagtttattttatttttaaggagtattgtcatcacttttcaaggtgtcttgacttctacacaaagtatatatattcaggactttaaaaaatagcagtacacatttaacagtagcgaattacaccaaaatgatttactttgagatttgaataatttgcatagcagtaaaatgtgttttgtgtaacatacaaatagaaaaatgacccagtatcttaattgatacttactggagagtatcagaattacccagcagctcttacagaatgccataaattctttaagactaaatattgaaatcaattatttgaagtaatgtttctgatttactgttaaaagttgctgagctcagtttttggagatatcatttctgcctgcctgttcccttatgacagtgaggccttctttggctccacctagtatgataatcatgggttctgttttagttgatgagaagtggctcctatgaatgcctctgctcaatttctttttattttactttattttatttttaggggtctcgccaactcctgggctcaagtgattctcctgcttccacctccccacagtgctgggattacaggcatgagccaccacgcctggctctctgttcttttcagtgtctccgtgccatcagtcagcagtgcttacatgtttagcatattgtcatgcagtttctcttctgttcccacgagatatttttggacaaaaaattgacaaaagtacatgtgtttttccccacctatcccttagaaaacctaatgtgtactgctatttttaaaaccaaaaagagacagcgtgacgatgcgtaaagcatttttcttagcctttcctttgtcttgatctgttaatgagaacaaaactgccagactcaaaatactctactattgtgctgaaagaaatacaatttagattgcacaaaatttgaaaatataactcagctgtcttttaaaagagttgtgttgttatctacaagactattagcagtcttttttcagagcaaattttaacagctagttgtgagtggtttaaaatatagaaaattattaaaatcttagtttgaggggttttatagtgggagaaaaaacaggaccaaagtttatgtgccttcttcagtagtcttaattgaccttttcttcctatttgagactaaagtagtatcagtattctggttttcaggaaatatgtactatatagttttaaaagaatgttgtcccaccaactattcatccaagcaaagaattgtaactataaataaagtctcagttacacttttgcctttatcacataatattcattgtagagcattgtgcaggtccaagaatagagctgctcaaaatctttgtggtagtttccttagtttttgtaacctgaggcatatgttccagagaacagggatatttgtctggtccagtgaccttggtgatcatagtcataattgaaagatgcctatggcatgcttaaatcagcattgtcaactgatttgttgttgtattattttcacttcttggatctatgtagtagttgtaataacaaatatttaaatagctatttttttgatgccattaaaaaaatcatactctggccttttttcccccttactgttgtttcccagatcttttaaaaattcatcccatatccagaaagtaccagttataaagattgctgaccaagcaaagttttgcatcaaagtgtcacctcattgctctgaccaaagactgactgttgtggttttaactcctctctgtaaagcattttgcattttccccaagctcctttctgaaagaagacccagtgcagagcggcctttactttcaatttctactgctgaatagactacttagagaaaatgtgagtttcagtgtgaacagaatggattaggatgacgagtttgatgggcattttcagtactgtatctaagaaaaaaaaaatagcacagctaggagcctctgacattgtctggtgttttacgtggtctgttcatcaaaattccccttttcagtttttaagaatgttcgtctaacagaagaaaatgctgtaaatatttgtaacaacattttttttaacaaggccaaaaaagaaaaaaaggtttttgggaacaaatgaacttataaagtggttttatataaaacatcaattgtcttgtatattttggataagcagcagtaccagctttcatttgtaacagtctgtggcattggaaaaaaaggagtctgtgattgttgaagtgaattatgttataaatgcaaagagaagataaaatattaaaaaacatattttctaaaaaaaaaaaaaaaaaaaaaaaaaaaaaaaaaaaaaaaagggggggggggtaaaaaatttccccgggggggcccaatttgtccccgtttttttgtgtacaagggggcctcctaataagggggatcgttattattaaagccataaggcagtaggaggcacgtcgtgttttaacagcgtctcgggagaatgtgggaaaaagtggttaagattggggaattattgtggctgcagagagagaaacgcttaatttgtgtggggggggggtggagaaattaagtggtggaacacaaagtgttaccagttacggaagaatttttataaggggctcgtaggagggggcaacgattaataataatttcttcaaaggcgtattattacatgggtggttttaaaccaaagacggtcgtgaaaattagtgtattggcagcgtctgagaagaagttttggggtaggaccgcgggggaagtaagtaaaattgtcgtgcatacttttttttacgaggagg

SEQ ID NO: 415309 - DNA, 5674 bp, Homo sapiens
  misc_feature (97)..(98): n is a, c, g, or t
  misc_feature (258)..(258): n is a, c, g, or t
aggctttccctcgaaggagggcacaaaagaaagacccaagggtcctgactaagggtatttccagccaaatagtccctttggcatccgcttttaaaanncgcccgggcttctaaaaaaacttccaggaatattcttttccaccatgcagccaactctggcatctttcccaacattccccccttctgttacagtggagatgattctggaaaggaaaacccccttttttttcccaataagagaaagcccttgggaattgtntctccagttggaaggtcttttaaattctttcagaaagatcgcaaaatggcgctcattcaattgggatctgtggaagaagcaattcaggccctcattgagcttcataaccatgaccttggagaaaatcaccacctcagagtttccttctcaaaatctacaatctgacttttctgtgaatttttctcctaaaactggaccataatttcagtaaaaccttcagacatagactgaagcagctcaagaccaattttgcctctttcacaaaaataactctttctgagtttgatattcaagtatattttaaaaatcaagggattttttttttttgtattccccctgcccccgccagtcaaaggtttcttttccctttttaccatggtttctacaaaaataaccttcaggaaaaagaaaatcaggaaaaaaattttttttcaataatcttattccctatattaaattagatttgaagaggattaacgttgttttagtttgggtccagatcagccttatacaacatttctaaactcatttgtacttttaaaaaatttaaacacagacttctaaaattacttgatgtaagtaatttaaatcacttatgaccaagttattaaccttatgaatcagaagtctgacccttgtaggaaattatattcacatataaagtacatcagatctttgccatatattgatggttattatgcataaacacattgagttgtgttggaagcagatttataaacctgcatgttttctttgaatgatttctttttttcactgtaagacactcctttaaataatgcctatctttaactttttaagactatttggaaaaatgcagtgtctcagctgtccccagggaaattaagtggaattcaactaagatctgttaataagatgtcagaataactaataattttattaggaaaaaatcatgttttaaatttcaaaatgacacttatttgtcaagtaatatgatcttggaaaattttaaagaaaaataatcctacttataaactacttttttataattgttttcagaaaaaaagtttacagtcttaaggaaaatattcaggtctatcatatggtttgacagattttttaaaagttatttttggtaaggtcttcttttagaaaaaaattaatctcaagggttttttgtaccactataatctctaatacttactcagaattactgtgtatttacttaatttcttattatgtgccttattatgtgcttaagatacaataggttagagtttaatctaaatatcttgaaagctatattgtgggcttggtaagcattttgttttttctttctctgttttggtaaggatttaaaatttttttcattgcaattttaagtggttttcaataagtaatagtttttatcaaatttttggtgcttggtgcagagacggtgtggggaagggtgaatggttttgggaataattcagtgcacacctgtaggcctctttacattgtgactgataggggttattgcatatcaatttggggctgtagagtgcaatctcagtttcatctttttcacccatcagaatttgtctcaggattacttggtttttctcagtcctcaagcgagaacttgcttttctttgttaatgtgactttcattactgagtacccacgtatttggagtatgagaaggtgggttatttctcatactctgtccctctctttttcattgaatgtaagagtacattttaatgttgcttcagtgattgtataatgtaaaattgtttctttttaataagaaactttgctattatttcttcaattgttgatcagaattttttaaagcagaatttgtcaaaagggtcatttttttgtctaccccttttacacttttcagattctcaaagtgtctcatctcaacttttaaaagaataaagaatatcttgctgggcatggtggtgtgcgcctgtgcgcctgtagtcccagctacaggctgagcctgtaggcaggaggctacaggcaggaggatcacttgagcccaggagttcaaggctgcagtgcgctatgatcacatttgtgaatagccacttcactccagccctggaacatagtgtgaccccttctcttaaaagtaaaaattaagaaaatctcaatctctttgctgtattccagtgattaatttgaacatagggaggtttttacagaagaaattttaccaaaaaatagagactgcaagagatgatacagattgtttaaaaagcagaattcactcaccactgagcaacacttagttggtagaatagaaaggagggatactaagttaagacttttcaaatggatcagtttggctgaatagatagatatactcatgtatgtagttgtgggagtttttagttttttgtttttttacttatgaaataagttttgacctagacacaaggggtatatgaaggaggaaaaaaatttctttgcaaaatctcccaaaacttgcttttttttcccttccacacaggcactattataattttcagtgccatgttaaattggattatttcatttactttaagttaggaattactgtgtaatttattaattcatgattctcataacattcagcataagtgtagcaaagttgctaataacggaaggggatcatagtggtgttgaatgtaactttgaagtagggaatggccttttaagtctgagagagaacatttgaatccttttcagggatttgtgtaggggtgtgtttgtgtgtgtgtgtgaatgtgtgtgtgtgtagataagtgtatatacataaatacactcttctaaagttgtatatacatatgcacattacatacattttaatttattgacaaaattaaccaaattaagatttggagatgtgggatgttcttgttttaaaatagcatgtttgaaaccatcagtttgtgtctaaaattagctgtagcacatggatgttgtccatattaagctatttgctgtttgaattatagaggtctacagtatttgtgttggcatagtttttgtaaaaaaaagattaaaaaatatcaggatggtggaaaaactagatctgtgtatctctgttttggcatgcatttattcagtatcttctagcaatggtttttctctgttgatctaccgtagtatcctatttttaagtttattttatttttaaggagtattgtcatcacttttcaaggtgtcttgacttctacacaaagtatatatattcaggactttaaaaaatagcagtacacatttaacagtagcgaattacaccaaaatgatttactttgagatttgaataatttgcatagcagtaaaatgtgttttgtgtaacatacaaatagaaaaatgacccagtatcttaattgatacttactggagagtatcagaattacccagcagctcttacagaatgccataaattctttaagactaaatattgaaatcaattatttgaagtaatgtttctgatttactgttaaaagttgctgagctcagtttttggagatatcatttctgcctgcctgttcccttatgacagtgaggccttctttggctccacctagtatgataatcatgggttctgttttagttgatgagaagtggctcctatgaatgcctctgctcaatttctttttattttactttattttatttttaggggtctcgccaactcctgggctcaagtgattctcctgcttccacctccccacagtgctgggattacaggcatgagccaccacgcctggctctctgttcttttcagtgtctccgtgccatcagtcagcagtgcttacatgtttagcatattgtcatgcagtttctcttctgttcccacgagatatttttggacaaaaaattgacaaaagtacatgtgtttttccccacctatcccttagaaaacctaatgtgtactgctatttttaaaaccaaaaagagacagcgtgacgatgcgtaaagcatttttcttagcctttcctttgtcttgatctgttaatgagaacaaaactgccagactcaaaatactctactattgtgctgaaagaaatacaatttagattgcacaaaatttgaaaatataactcagctgtcttttaaaagagttgtgttgttatctacaagactattagcagtcttttttcagagcaaattttaacagctagttgtgagtggtttaaaatatagaaaattattaaaatcttagtttgaggggttttatagtgggagaaaaaacaggaccaaagtttatgtgccttcttcagtagtcttaattgaccttttcttcctatttgagactaaagtagtatcagtattctggttttcaggaaatatgtactatatagttttaaaagaatgttgtcccaccaactattcatccaagcaaagaattgtaactataaataaagtctcagttacacttttgcctttatcacataatattcattgtagagcattgtgcaggtccaagaatagagctgctcaaaatctttgtggtagtttccttagtttttgtaacctgaggcatatgttccagagaacagggatatttgtctggtccagtgaccttggtgatcatagtcataattgaaagatgcctatggcatgcttaaatcagcattgtcaactgatttgttgttgtattattttcacttcttggatctatgtagtagttgtaataacaaatatttaaatagctatttttttgatgccattaaaaaaatcatactctggccttttttcccccttactgttgtttcccagatcttttaaaaattcatcccatatccagaaagtaccagttataaagattgctgaccaagcaaagttttgcatcaaagtgtcacctcattgctctgaccaaagactgactgttgtggttttaactcctctctgtaaagcattttgcattttccccaagctcctttctgaaagaagacccagtgcagagcggcctttactttcaatttctactgctgaatagactacttagagaaaatgtgagtttcagtgtgaacagaatggattaggatgacgagtttgatgggcattttcagtactgtatctaagaaaaaaaaaatagcacagctaggagcctctgacattgtctggtgttttacgtggtctgttcatcaaaattccccttttcagtttttaagaatgttcgtctaacagaagaaaatgctgtaaatatttgtaacaacattttttttaacaaggccaaaaaagaaaaaaaggtttttgggaacaaatgaacttataaagtggttttatataaaacatcaattgtcttgtatattttggataagcagcagtaccagctttcatttgtaacagtctgtggcattggaaaaaaaggagtctgtgattgttgaagtgaattatgttataaatgcaaagagaagataaaatattaaaaaacatattttctaaa

SEQ ID NO: 415310 - DNA, 3582 bp, Homo sapiens
  misc_feature (91)..(91): n is a, c, g, or t
ttttgtccgaaaatatctcgtgggacaagaagagaaactgcatgacaatatgctaaacatgtaagcactgctgactgatggcacggagacnctgaaaagaacagagagccaggcgtggtggctcatgcctgtaatcccagcactgtggggaggtggaagcaggaggatcacttgagcccaggagttcaaggctgcagtgcgctatgatcacatttgtgaatagccacttcactccagccctggaacatagtgtgaccccttctcttaaaagtaaaaattaagaaaatctcaatctctttgctgtattccagtgattaatttgaacatagggaggtttttacagaagaaattttaccaaaaaatagagactgcaagagatgatacagattgtttaaaaagcagaattcactcaccactgagcaacacttagttggtagaatagaaaggagggatactaagttaagacttttcaaatggatcagtttggctgaatagatagatatactcatgtatgtagttgtgggagtttttagttttttgtttttttacttatgaaataagttttgacctagacacaaggggtatatgaaggaggaaaaaaatttctttgcaaaatctcccaaaacttgcttttttttcccttccacacaggcactattataattttcagtgccatgttaaattggattatttcatttactttaagttaggaattactgtgtaatttattaattcatgattctcataacattcagcataagtgtagcaaagttgctaataacggaaggggatcatagtggtgttgaatgtaactttgaagtagggaatggccttttaagtctgagagagaacatttgaatccttttcagggatttgtgtaggggtgtgtttgtgtgtgtgtgtgaatgtgtgtgtgtgtagataagtgtatatacataaatacactcttctaaagttgtatatacatatgcacattacatacattttaatttattgacaaaattaaccaaattaagatttggagatgtgggatgttcttgttttaaaatagcatgtttgaaaccatcagtttgtgtctaaaattagctgtagcacatggatgttgtccatattaagctatttgctgtttgaattatagaggtctacagtatttgtgttggcatagtttttgtaaaaaaaagattaaaaaatatcaggatggtggaaaaactagatctgtgtatctctgttttggcatgcatttattcagtatcttctagcaatggtttttctctgttgatctaccgtagtatcctatttttaagtttattttatttttaaggagtattgtcatcacttttcaaggtgtcttgacttctacacaaagtatatatattcaggactttaaaaaatagcagtacacatttaacagtagcgaattacaccaaaatgatttactttgagatttgaataatttgcatagcagtaaaatgtgttttgtgtaacatacaaatagaaaaatgacccagtatcttaattgatacttactggagagtatcagaattacccagcagctcttacagaatgccataaattctttaagactaaatattgaaatcaattatttgaagtaatgtttctgatttactgttaaaagttgctgagctcagtttttggagatatcatttctgcctgcctgttcccttatgacagtgaggccttctttggctccacctagtatgataatcatgggttctgttttagttgatgagaagtggctcctatgaatgcctctgctcaatttctttttattttactttattttatttttaggggtctcgccaactcctgggctcaagtgattctcctgcttccacctccccacagtgctgggattacaggcatgagccaccacgcctggctctctgttcttttcagtgtctccgtgccatcagtcagcagtgcttacatgtttagcatattgtcatgcagtttctcttctgttcccacgagatatttttggacaaaaaattgacaaaagtacatgtgtttttccccacctatcccttagaaaacctaatgtgtactgctatttttaaaaccaaaaagagacagcgtgacgatgcgtaaagcatttttcttagcctttcctttgtcttgatctgttaatgagaacaaaactgccagactcaaaatactctactattgtgctgaaagaaatacaatttagattgcacaaaatttgaaaatataactcagctgtcttttaaaagagttgtgttgttatctacaagactattagcagtcttttttcagagcaaattttaacagctagttgtgagtggtttaaaatatagaaaattattaaaatcttagtttgaggggttttatagtgggagaaaaaacaggaccaaagtttatgtgccttcttcagtagtcttaattgaccttttcttcctatttgagactaaagtagtatcagtattctggttttcaggaaatatgtactatatagttttaaaagaatgttgtcccaccaactattcatccaagcaaagaattgtaactataaataaagtctcagttacacttttgcctttatcacataatattcattgtagagcattgtgcaggtccaagaatagagctgctcaaaatctttgtggtagtttccttagtttttgtaacctgaggcatatgttccagagaacagggatatttgtctggtccagtgaccttggtgatcatagtcataattgaaagatgcctatggcatgcttaaatcagcattgtcaactgatttgttgttgtattattttcacttcttggatctatgtagtagttgtaataacaaatatttaaatagctatttttttgatgccattaaaaaaatcatactctggccttttttcccccttactgttgtttcccagatcttttaaaaattcatcccatatccagaaagtaccagttataaagattgctgaccaagcaaagttttgcatcaaagtgtcacctcattgctctgaccaaagactgactgttgtggttttaactcctctctgtaaagcattttgcattttccccaagctcctttctgaaagaagacccagtgcagagcggcctttactttcaatttctactgctgaatagactacttagagaaaatgtgagtttcagtgtgaacagaatggattaggatgacgagtttgatgggcattttcagtactgtatctaagaaaaaaaaaatagcacagctaggagcctctgacattgtctggtgttttacgtggtctgttcatcaaaattccccttttcagtttttaagaatgttcgtctaacagaagaaaatgctgtaaatatttgtaacaacattttttttaacaaggccaaaaaagaaaaaaaggtttttgggaacaaatgaacttataaagtggttttatataaaacatcaattgtcttgtatattttggataagcagcagtaccagctttcatttgtaacagtctgtggcattggaaaaaaaggagtctgtgattgttgaagtgaattatgttataaatgcaaagagaagataaaatattaaaaaacatattttctaaa

SEQ ID NO: 415311 - DNA, 7071 bp, Homo sapiens
cccctgttcccactctccttccacctcggaccggccggggctccgcagagccaaagctcgcttgtccccggaaccgccctgctgccgccgcctgcttcctctgctcgcggttagcccgtcagtccctgctctgtgcgcgcctccatctgggccatggatggcggggatctgatgagcttctttcttctggcatcattaacggaccttttaccatgaatagttctactccttctacaggtgtgtatgctaatgggaatgacagcaagaaatttaaacgagatagacctccctgttcgccttcccgtgttctccatcttcgaaaaattccatgtgatgtcaccgaagcagagatcatatcattaggtctaccatttggcaaagtaactaatcttttgatgttgaaaggaaaaagccaggctttcttagaaatggcttctgaggaagctgccgttactatggtgaattattacactcctattactcctcaccttcgaagccagcctgtttatattcagtattccaatcacagagaacttaagactgacaatctacctaatcaagctcgagcccaagctgcactgcaggctgtcagtgccgtccaatcaggaagcctggccctttctggaggtccttccaatgaaggcacagtcctacctgggcagagccctgtgcttcgaataattattgaaaacctcttttaccctgttaccctggaagttcttcatcagatattttctaaatttggcacagtcttgaagattatcacctttacaaagaataatcagtttcaagccttgcttcagtatgctgacccagtaaatgcacattatgccaaaatggctctggatggccagaatatctataatgcatgctgcactctgcgcattgacttctccaagctcaccagccttaatgtgaaatataataatgacaaaagcagagacttcactcgcttagaccttcctactggtgatggccagccatcccttgaaccccctatggctgctgcttttggtgcaccgggtataatttcttcaccatatgcaggggctgctggatttgccccagccattggatttcctcaagctacaggtctatcagttccagctgttcctggagctcttggtcctctcacaatcacctcttctgctgtcactggaaggatggccattcctggggctagtggtataccaggaaattctgttctactcgtcacaaatctcaatcctgatcttatcacaccacatgggctttttatcctatttggagtctatggtgatgtacatcgagtgaagattatgtttaataagaaagaaaatgccttggttcagatggcggatgcaaatcaagctcagctagcaatgaaccatctaagtggtcagagactttatgggaaagtgcttcgtgctacactgtccaaacatcaagcagtacagcttcctcgagagggacaagaagaccaaggtctgactaaggatttcagcaatagtcctttgcatcgctttaaaaagccgggctctaaaaacttccagaatatctttccaccatcagccactctgcatctttccaacattcccccttctgttacagtggatgatctgaagaaccttttcatagaagctggatgttcagtgaaggcttttaaattctttcagaaagatcgcaaaatggcgctcattcaattgggatctgtggaagaagcaattcaggccctcattgagcttcataaccatgaccttggagaaaatcaccacctcagagtttccttctcaaaatctacaatctgacttttctgtgaatttttctcctaaaactggaccataatttcagtaaaaccttcagacatagactgaagcagctcaagaccaattttgcctctttcacaaaaataactctttctgagtttgatattcaagtatattttaaaaatcaagggattttttttttttgtattccccctgcccccgccagtcaaaggtttcttttccctttttaccatggtttctacaaaaataaccttcaggaaaaagaaaatcaggaaaaaaattttttttcaataatcttattccctatattaaattagatttgaagaggattaacgttgttttagtttgggtccagatcagccttatacaacatttctaaactcatttgtacttttaaaaaatttaaacacagacttctaaaattacttgatgtaagtaatttaaatcacttatgaccaagttattaaccttatgaatcagaagtctgacccttgtaggaaattatattcacatataaagtacatcagatctttgccatatattgatggttattatgcataaacacattgagttgtgttggaagcagatttataaacctgcatgttttctttgaatgatttctttttttcactgtaagacactcctttaaataatgcctatctttaactttttaagactatttggaaaaatgcagtgtctcagctgtccccagggaaattaagtggaattcaactaagatctgttaataagatgtcagaataactaataattttattaggaaaaaatcatgttttaaatttcaaaatgacacttatttgtcaagtaatatgatcttggaaaattttaaagaaaaataatcctacttataaactacttttttataattgttttcagaaaaaaagtttacagtcttaaggaaaatattcaggtctatcatatggtttgacagattttttaaaagttatttttggtaaggtcttcttttagaaaaaaattaatctcaagggttttttgtaccactataatctctaatacttactcagaattactgtgtatttacttaatttcttattatgtgccttattatgtgcttaagatacaataggttagagtttaatctaaatatcttgaaagctatattgtgggcttggtaagcattttgttttttctttctctgttttggtaaggatttaaaatttttttcattgcaattttaagtggttttcaataagtaatagtttttatcaaatttttggtgcttggtgcagagacggtgtggggaagggtgaatggttttgggaataattcagtgcacacctgtaggcctctttacattgtgactgataggggttattgcatatcaatttggggctgtagagtgcaatctcagtttcatctttttcacccatcagaatttgtctcaggattacttggtttttctcagtcctcaagcgagaacttgcttttctttgttaatgtgactttcattactgagtacccacgtatttggagtatgagaaggtgggttatttctcatactctgtccctctctttttcattgaatgtaagagtacattttaatgttgcttcagtgattgtataatgtaaaattgtttctttttaataagaaactttgctattatttcttcaattgttgatcagaattttttaaagcagaatttgtcaaaagggtcatttttttgtctaccccttttacacttttcagattctcaaagtgtctcatctcaacttttaaaagaataaagaatatcttgctgggcatggtggtgtgcgcctgtgcgcctgtagtcccagctacaggctgagcctgtaggcaggaggctacaggcaggaggatcacttgagcccaggagttcaaggctgcagtgcgctatgatcacatttgtgaatagccacttcactccagccctggaacatagtgtgaccccttctcttaaaagtaaaaattaagaaaatctcaatctctttgctgtattccagtgattaatttgaacatagggaggtttttacagaagaaattttaccaaaaaatagagactgcaagagatgatacagattgtttaaaaagcagaattcactcaccactgagcaacacttagttggtagaatagaaaggagggatactaagttaagacttttcaaatggatcagtttggctgaatagatagatatactcatgtatgtagttgtgggagtttttagttttttgtttttttacttatgaaataagttttgacctagacacaaggggtatatgaaggaggaaaaaaatttctttgcaaaatctcccaaaacttgcttttttttcccttccacacaggcactattataattttcagtgccatgttaaattggattatttcatttactttaagttaggaattactgtgtaatttattaattcatgattctcataacattcagcataagtgtagcaaagttgctaataacggaaggggatcatagtggtgttgaatgtaactttgaagtagggaatggccttttaagtctgagagagaacatttgaatccttttcagggatttgtgtaggggtgtgtttgtgtgtgtgtgtgaatgtgtgtgtgtgtagataagtgtatatacataaatacactcttctaaagttgtatatacatatgcacattacatacattttaatttattgacaaaattaaccaaattaagatttggagatgtgggatgttcttgttttaaaatagcatgtttgaaaccatcagtttgtgtctaaaattagctgtagcacatggatgttgtccatattaagctatttgctgtttgaattatagaggtctacagtatttgtgttggcatagtttttgtaaaaaaaagattaaaaaatatcaggatggtggaaaaactagatctgtgtatctctgttttggcatgcatttattcagtatcttctagcaatggtttttctctgttgatctaccgtagtatcctatttttaagtttattttatttttaaggagtattgtcatcacttttcaaggtgtcttgacttctacacaaagtatatatattcaggactttaaaaaatagcagtacacatttaacagtagcgaattacaccaaaatgatttactttgagatttgaataatttgcatagcagtaaaatgtgttttgtgtaacatacaaatagaaaaatgacccagtatcttaattgatacttactggagagtatcagaattacccagcagctcttacagaatgccataaattctttaagactaaatattgaaatcaattatttgaagtaatgtttctgatttactgttaaaagttgctgagctcagtttttggagatatcatttctgcctgcctgttcccttatgacagtgaggccttctttggctccacctagtatgataatcatgggttctgttttagttgatgagaagtggctcctatgaatgcctctgctcaatttctttttattttactttattttatttttaggggtctcgccaactcctgggctcaagtgattctcctgcttccacctccccacagtgctgggattacaggcatgagccaccacgcctggctctctgttcttttcagtgtctccgtgccatcagtcagcagtgcttacatgtttagcatattgtcatgcagtttctcttctgttcccacgagatatttttggacaaaaaattgacaaaagtacatgtgtttttccccacctatcccttagaaaacctaatgtgtactgctatttttaaaaccaaaaagagacagcgtgacgatgcgtaaagcatttttcttagcctttcctttgtcttgatctgttaatgagaacaaaactgccagactcaaaatactctactattgtgctgaaagaaatacaatttagattgcacaaaatttgaaaatataactcagctgtcttttaaaagagttgtgttgttatctacaagactattagcagtcttttttcagagcaaattttaacagctagttgtgagtggtttaaaatatagaaaattattaaaatcttagtttgaggggttttatagtgggagaaaaaacaggaccaaagtttatgtgccttcttcagtagtcttaattgaccttttcttcctatttgagactaaagtagtatcagtattctggttttcaggaaatatgtactatatagttttaaaagaatgttgtcccaccaactattcatccaagcaaagaattgtaactataaataaagtctcagttacacttttgcctttatcacataatattcattgtagagcattgtgcaggtccaagaatagagctgctcaaaatctttgtggtagtttccttagtttttgtaacctgaggcatatgttccagagaacagggatatttgtctggtccagtgaccttggtgatcatagtcataattgaaagatgcctatggcatgcttaaatcagcattgtcaactgatttgttgttgtattattttcacttcttggatctatgtagtagttgtaataacaaatatttaaatagctatttttttgatgccattaaaaaaatcatactctggccttttttcccccttactgttgtttcccagatcttttaaaaattcatcccatatccagaaagtaccagttataaagattgctgaccaagcaaagttttgcatcaaagtgtcacctcattgctctgaccaaagactgactgttgtggttttaactcctctctgtaaagcattttgcattttccccaagctcctttctgaaagaagacccagtgcagagcggcctttactttcaatttctactgctgaatagactacttagagaaaatgtgagtttcagttttttaagaatgttcgtctaacagaagaaaatgctgtaaatatttgtaacaacattttttttaacaaggccaaaaaagaaaaaaaggtttttgggaacaaatgaacttataaagtggttttatataaaacatcaattgtcttgtatattttggataagcagcagtaccagctttcatttgtaacagtctgtggcattggaaaaaaaggagtctgtgattgttgaagtgaattatgttataaatgcaaagagaagataaaatattaaaaaacatattttctaaatgcgtagtgcatggttaattcaagcttctgtacactacagtatattccattttcgttcagtttgtatatttgctgactattacttgatatctctaatctcttttcctaacaaatatagcattgtagcatgccttttaataaatgtcatgacatctgtactctcttaaaaaat

SEQ ID NO: 415312 - DNA, 1011 bp, Homo sapiens
ttagaggaccccctgatatttctgggtagagcattgtgcaggtccaagaatagagctgctcaaaatctttgtggtagtttccttagtttttgtaacctgaggcatatgttccagagaacagggatatttgtctggtccagtgaccttggtgatcatagtcataattgaaagatgcctatggcatgcttaaatcagcattgtcaactgatttgttgttgtattattttcacttcttggatctatgtagtagttgtaataacaaatatttaaatagctatttttttgatgccattaaaaaaatcatactctggccttttttcccccttactgttgtttcccagatcttttaaaaattcatcccatatccagaaagtaccagttataaagattgctgaccaagcaaagttttgcatcaaagtgtcacctcattgctctgaccaaagactgactgttgtggttttaactcctctctgtaaagcattttgcattttccccaagctcctttctgaaagaagacccagtgcagagcggcctttactttcaatttctactgctgaatagactacttagagaaaatgtgagtttcagtgtgaacagaatggattaggatgacgagtttgatgggcattttcagtactgtatctaagaaaaaaaaaatagcacagctaggagcctctgacattgtctggtgttttacgtggtctgttcatcaaaattccccttttcagtttttaagaatgttcgtctaacagaagaaaatgctgtaaatatttgtaacaacattttttttaacaaggccaaaaaagaaaaaaaggtttttgggaacaaatgaacttataaagtggttttatataaaacatcaattgtcttgtatattttggataagcagcagtaccagctttcatttgtaacagtctgtggcattggaaaaaaaggagtctgtgattgttgaagtgaattatgttataaatgcaaagagaagataaaatattaaaaaacatattttctaaa

SEQ ID NO: 415313 - DNA, 2379 bp, Homo sapiens
cccctgttcccactctccttccacctcggaccggccggggctccgcagagccaaagctcgcttgtccccggaaccgccctgctgccgccgcctgcttcctctgctcgcggttagcccgtcagtccctgctctgtgcgcgcctccatctgggccatggatggcggggatctgatgagcttctttcttctggcatcattaacggaccttttaccatgaatagttctactccttctacaggtgtgtatgctaatgggaatgacagcaagaaatttaaacgagatagacctccctgttcgccttcccgtgttctccatcttcgaaaaattccatgtgatgtcaccgaagcagagatcatatcattaggtctaccatttggcaaagtaactaatcttttgatgttgaaaggaaaaagccaggctttcttagaaatggcttctgaggaagctgccgttactatggtgaattattacactcctattactcctcaccttcgaagccagcctgtttatattcagtattccaatcacagagaacttaagactgacaatctacctaatcaagctcgagcccaagctgcactgcaggctgtcagtgccgtccaatcaggaagcctggccctttctggaggtccttccaatgaaggcacagtcctacctgggcagagccctgtgcttcgaataattattgaaaacctcttttaccctgttaccctggaagttcttcatcagatattttctaaatttggcacagtcttgaagattatcacctttacaaagaataatcagtttcaagccttgcttcagtatgctgacccagtaaatgcacattatgccaaaatggctctggatggccagaatatctataatgcatgctgcactctgcgcattgacttctccaagctcaccagccttaatgtgaaatataataatgacaaaagcagagacttcactcgcttagaccttcctactggtgatggccagccatcccttgaaccccctatggctgctgcttttggtgcaccgggtataatttcttcaccatatgcaggggctgctggatttgccccagccattggatttcctcaagctacaggtctatcagttccagctgttcctggagctcttggtcctctcacaatcacctcttctgctgtcactggaaggatggccattcctggggctagtggtataccaggaaattctgttctactcgtcacaaatctcaatcctgatcttatcacaccacatgggctttttatcctatttggagtctatggtgatgtacatcgagtgaagattatgtttaataagaaagaaaatgccttggttcagatggcggatgcaaatcaagctcagctagcaatgaaccatctaagtggtcagagactttatgggaaagtgcttcgtgctacactgtccaaacatcaagcagtacagcttcctcgagagggacaagaagaccaaggtctgactaaggatttcagcaatagtcctttgcatcgctttaaaaagccgggctctaaaaacttccagaatatctttccaccatcagccactctgcatctttccaacattcccccttctgttacagtggatgatctgaagaaccttttcatagaagctggatgttcagtgaaggcttttaaattctttcagaaagatcgcaaaatggcgctcattcaattgggatctgtggaagaagcaattcaggccctcattgagcttcataaccatgaccttggagaaaatcaccacctcagagtttccttctcaaaatctacaatctgacttttctgtgaatttttctcctaaaactggaccataatttcagtaaaaccttcagacatagactgaagcagctcaagaccaattttgcctctttcacaaaaataactctttctgagtttgatattcaagtatattttaaaaatcaagggattttttttttttgtattccccctgcccccgccagtcaaaggtttcttttccctttttaccatggtttctacaaaaataaccttcaggaaaaagaaaatcaggaaaaaaattttttttcaataatcttattccctatattaaattagatttgaagaggattaacgttgttttagtttgggtccagatcagccttatacaacatttctaaactcatttgtacttttaaaaaatttaaacacagacttctaaaattacttgatgtaagtaatttaaatcacttatgaccaagttattaaccttatgaatcagaagtctgacccttgtaggaaattatattcacatataaagtacatcagatctttgccatatattgatggttattatgcataaacacattgagttgtgttggaagcagatttataaacctgcatgttttctttga

SEQ ID NO: 415314 - DNA, 1426 bp, Homo sapiens
cccctgttcccactctccttccacctcggaccggccggggctccgcagagccaaagctcgcttgtccccggaaccgccctgctgccgccgcctgcttcctctgctcgcggttagcccgtcagtccctgctctgtgcgcgcctccatctgggccatggatggcggggatctgatgagcttctttcttctggcatcattaacggaccttttaccatgaatagttctactccttctacaggtgtgtatggctttcttagaaatggcttctgaggaagctgccgttactatggtgaattattacactcctattactcctcaccttcgaagccagcctgtttatattcagtattccaatcacagagaacttaagactgacaatctacctaatcaagctcgagcccaagctgcactgcaggctgtcagtgccgtccaatcaggaagcctggccctttctggaggtccttccaatgaaggcacagtcctacctgggcagagccctgtgcttcgaataattattgaaaacctcttttaccctgttaccctggaagttcttcatcagatattttctaaatttggcacagtcttgaagattatcacctttacaaagaataatcagtttcaagccttgcttcagtatgctgacccagtaaatgcacattatgccaaaatggctctggatggccagaatatctataatgcatgctgcactctgcgcattgacttctccaagctcaccagccttaatgtgaaatataataatgacaaaagcagagacttcactcgcttagaccttcctactggtgatggccagccatcccttgaaccccctatggctgctgcttttggtgcaccgggtataatttcttcaccatatgcaggggctgctggatttgccccagccattggatttcctcaagctacaggtgattcttttaagttggatttgaaatgacttttaatgaagttgtatattttctaggaacttaccaagatgaagaatgttatcatatttgaagaatttaccataaagcattatgcatatcagctgtagaagtgtagtgatttgtatgatatatagcttccttgttatttacaaattattctctctggtcctatttttaattccagtaatcagtatgtgttctgcatcatttatgtttgcttttggcacaaataactataggctaactacattaaataaccttagatttgcctttccagttgttatataaaatgtataagctgctctgtctttactgataaacttatcaattatgtgttgaacagacctgtcttatctttgggccttcaatgcctttgacagtactcaacaaataatatgcagtcatactatacattcactattcatctttggaaaaccttttgtcattaatgggttttgaagattacgatagaggggtatgcat

SEQ ID NO: 415315 - DNA, 619 bp, Homo sapiens
cccctgttcccactctccttccacctcggaccggccggggctccgcagagccaaagctcgcttgtccccggaaccgccctgctgccgccgcctgcttcctctgctcgcggttagcccgtcagtccctgctctgtgcgcgcctccatctgggccatggatggcggggatctgatgagcttctttcttctggcatcattaacggaccttttaccatgaatagttctactccttctacaggtgtgtatgctaatgggaatgacagcaagaaatttaaacgagatagacctccctgttcgccttcccgtgttctccatcttcgaaaaattccatgtgatgtcaccgaagcagagatcatatcattaggtctaccatttggcaaagtaactaatcttttgatgttgaaaggaaaaagccaggctttcttagaaatggcttctgaggaagctgccgttactatggtgaattattacactcctattactcctcaccttcgaagccagcctgtttatattcagtattccaatcacagagaacttaagactgacaatctacctaatcaagctcgatgcggccacgccccctttccctcccccacctcccagccgcgcactcaacgcac

SEQ ID NO: 415316 - DNA, 809 bp, Homo sapiens
ttacagaggatacctgtgctttctatgggaggggaataaacaagggcatgaatatgagcaggcaagagtaattgggggccaccttagagcctgacagccacatacacacattcagaattaccctgcaaacagttgaaaatatggaactccagactgtagcagacaagtcagagctaggaaactttggaagtactacagttgattactaaagccagtggtatgactaataagaataaatatagattccaggcacagctgcattaaaagaaaaaagaatatagaaagatttttcttgccctttgtatacctgcacatgtcttctgcaaggattgagacaaaattccattgcttgacgatacatgtcagtttttgaacatctttcagggaacttccaaatcaagtctttgtcatatggcttaataattctgtttgaaatgtactctagagatttgatgattgcaagagttaatctgcttcacttgagaatgcggcccaggtagttgactccctctgatgttttcacagcccttctgttacagtggatgatctgaagaaccttttcatagaagctggatgttcagtgaaggcttttaaattctttcagtaagtctttgctttcaagaaatacattaaaattatttaatatggtatgcaaattttaaaggtagttcagtgaagtcttctggtggaggaaggagtttggaagcaaaattcattctaaatactttctgtatttcttataccattttcaggaaagatcgcaaaatggcgctcattcaattgggatctgtggaagaagcaattcaggc

SEQ ID NO: 415317 - DNA, 2223 bp, Homo sapiens
gagtgctgtggcgcgatctcggcttactgcaacctcccactccctggtttcactgtattctcctgcctcagcctctgagtagctgggattgcaggcgtgagccactgcgcccggcctatactgtatatatttttaaagactgttctaatagatataaaaactgtaaaaaataagtatttttatatagctctcatggattttattaaacagaattggctcaaaaatactatgttacagactgttgggtacccttgcctaacgtgaactggcagtgttaccttgcttttgcagtaatagtctacagattgcaggtctcatcaattccatccaaagtttaaaagcatttaaaattaccaaatctttaaaatcactttggtggtgattccaaattggtaccaagcaaactttctggatgcccaacatgattttcagtaaccaccctttagagtatttgtttactaagttcaccacattttgaacatggtagttttagactgcaataatatttagacttacattattacttactgctaagtaaaatctaaatcctgcaaatgcacagaattcaagctgaaatataatgatttatgtttagctcacattgaagtattggttggttacttatgtattaatgcagtgtgcattcacatttaatcaggtttagtctgtttctattttaataattttaaaaaattatacaagcaaattagatattagacatgttagttacaatggtaacacatttttaggtgtcgaaacacaattttcaaaattcctaatgaaagttataaaaatgtaaacaagaattgtaaaaatggacaaagtagtcaaatatattttcaaagcacaattttattagacaggcataatttacattttgcttttctagtgggtttgaaaatgtttattggagattgggctatgtagtttataatttttaattcataaaaaagtaatcatacatgagaaggtagacctgtgccctaggatcatgtcacatatacagataatgccatttccttgtgtgtgtgatgtgtgttttgatgacctccacaggccttactgtatcaagcttttataatgatgactccttcattatttaaattcctatactttttatttgttatcacgcaactactttgttcaatgtgaaaatgtgctaactcatgggagaagagtgccaattgatagttcttttagcaattaagaatatggtatttgggaagaaaagtttgaaatgcaacaaatggatatttcaacacagtagtattatattatcagttctttagtaagtgattttagagatgttgtaggctacttttacggtggaatatatagtatagagatgcaaaacttaaatgtttacatcaatttatattgaatgtcacataatttcatggaaggaaaggtagcttgatatttagattctaagatataatctgaaaggaaactaattatgttctctacacttactgtaatactgattattcttacatatcaaattattgaactttaaaaatttcattgtatagtcattaaactgagttgggtttttttcttaaagggtttagcatcactcatttgatttacacattcacattataatatttaattatcatgggtgtatgctttacataaaaaaggtttataaaagttatttatgctatattgaaagtcatcttaagaatctccaggttatttaaagtagttataggagcagagaacaagcacctttatcaaaatctggtcctatgtgccttgctttaccaaatacctgatttttctggagggtgttcctgtaattcacaactgtagacacatgggcaaaattaggatttttaagaataaatacatttctatttttttggttgtttcaacattagctcttcaaattcattaacaaaattaaaataggtatattacaaaagcataaacatttgtgaacagtacttaaataaattgtgatactattgctccatcattgaactttttgaaactttaacaattgtataaaactgtcagtttgttgtttcatttgtaattacaaaataatttaaaaactttttaaaataatttggatcctgactttgtctatatctgtatttcatttgtttagaaagattcttttgggtttgataatgtaatttgtatatttaaattttttatggacataattcaaaggaatgtataaattggtcttttgttaaatggctttttaattga

SEQ ID NO: 415318 - DNA, 2312 bp, Homo sapiens
gagtgctgtggcgcgatctcggcttactgcaacctcccactccctggtttcactgtattctcctgcctcagcctctgagtagctgggattgcaggcgtgagccactgcgcccggcctatactgtatatatttttaaagactgttctaatagatataaaaactgtaaaaaataagtatttttatatagctctcatggattttattaaacagaattggctcaaaaatactatgttacagactgttgggtacccttgcctaacgtgaactggcagtgttaccttgcttttgcagtaatagtctacagattgcaggtctcatcaattccatccaaagtttaaaagcatttaaaattaccaaatctttaaaatcactttggtggtgattccaaattggtaccaagcaaactttctggatgcccaacatgattttcagtaaccaccctttagagtatttgtttactaagttcaccacattttgaacatggtagttttagactgcaataatatttagacttacattattacttactgctaagtaaaatctaaatcctgcaaatgcacagaattcaagctgaaatataatgatttatgtttagctcacattgaagtattggttggttacttatgtattaatgcagtgtgcattcacatttaatcaggtttagtctgtttctattttaataattttaaaaaattatacaagcaaattagatattagacatgttagttacaatggtaacacatttttaggtgtcgaaacacaattttcaaaattcctaatgaaagttataaaaatgtaaacaagaattgtaaaaatggacaaagtagtcaaatatattttcaaagcacaattttattagacaggcataatttacattttgcttttctagtgggtttgaaaatgtttattggagattgggctatgtagtttataatttttaattcataaaaaagtaatcatacatgagaaggtagacctgtgccctaggatcatgtcacatatacagataatgccatttccttgtgtgtgtgatgtgtgttttgatgacctccacaggccttactgtatcaagcttttataatgatgactccttcattatttaaattcctatactttttatttgttatcacgcaactactttgttcaatgtgaaaatgtgctaactcatgggagaagagtgccaattgatagttcttttagcaattaagaatatggtatttgggaagaaaagtttgaaatgcaacaaatggatatttcaacacagtagtattatattatcagttctttagtaagtgattttagagatgttgtaggctacttttacggtggaatatatagtatagagatgcaaaacttaaatgtttacatcaatttatattgaatgtcacataatttcatggaaggaaaggtagcttgatatttagattctaagatataatctgaaaggaaactaattatgttctctacacttactgtaatactgattattcttacatatcaaattattgaactttaaaaatttcattgtatagtcattaaactgagttgggtttttttcttaaagggtttagcatcactcatttgatttacacattcacattataatatttaattatcatgggtgtatgctttacataaaaaaggtttataaaagttatttatgctatattgaaagtcatcttaagaatctccaggttatttaaagtagttataggagcagagaacaagcacctttatcaaaatctggtcctatgtgccttgctttaccaaatacctgatttttctggagggtgttcctgtaattcacaactgtagacacatgggcaaaattaggatttttaagaataaatacatttctatttttttggttgtttcaacattagctcttcaaattcattaacaaaattaaaataggtatattacaaaagcataaacatttgtgaacagtacttaaataaattgtgatactattgctccatcattgaactttttgaaactttaacaattgtataaaactgtcagtttgttgtttcatttgtaattacaaaataatttaaaaactttttaaaataatttggatcctgactttgtctatatctgtatttcatttgtttagaaagattcttttgggtttgataatgtaatttgtatatttaaattttttatggacataattcaaaggaatgtataaattggtcttttgttaaatggctttttaattgataaacttctcttgtcattttttggtatccagctattacctatttaatagatttattgaaatagattattttcataaagaactctataca

SEQ ID NO: 415319 - DNA, 2148 bp, Homo sapiens
ccgagcgcagccgggcgcgcgccaccgcccactcgccctgtgcccgccgcagcccgaaactggccacggccgggagcggaggggacagcggggatcgtgagctccggcccgggcgagcgggtgcgtctgccgcagagtcggcacctgaaggacatggagacagggtcttgctctgttgcccaggctggaatgcggtggcacaatcatggctcactgcagcctcaaccttccagggcttaagtgatcctctcacctcatcctcctgagtagctggactataggcgtgcaccaccaacacccagagatgcaccaagacgctaccaaatgcaaattaataagaccaatcctggctgggtgcaatggctcactcctgtaatctcagcactttgggaggccgaggcaggtggatcacagaagctcgggagtttgagaccaccctgaccaacatgaagaaaccccgtctctactaaaaatacaaaattagccgggcatggtggtgcatgcctgtaatcccagatactcaggaggctgaggcaggagaatcgcttgaacctgggaggtgaagtttgcggtgagccgagatcgcgccattgcactccagcctggtcaacaagagtgaaactctgtctcaaaaaaataagaataagacacaatccttgccctcaagattcatacagtctgaaggtaaagaggggacataaatgaaagaagtaattacaaaacagtgtgattggttctgaaaaggcagtgagtaaacagtcctgttgcataaataacaggacaggctagtgttgctgtaaccatgccacaatcttagtggctgaaaacaacaaaggtttacttttcacccctgctgcaagtccattgagggttggctgggggctctgctctggctcatttcttgtcctccctctgagacctaagctgtgggagcagctacccctttgcttgttgtcatggcagaaggaaggaaagttctggaagactcacgctggccattaaatgctctcttttggaaggttcctaactatccacatggctccaattaaccataggggcaggaagtaccatcctctcatggcctccaaatgatgagagctagaagtacttcacaaacattgttagtggcctgatagagtcttagaagccttcacaaagcagacgatctttgagctgtgtctggaagtaagactgtgtctttcaggctgacaagagggggaaagccgagggagaaagtgtttatctgcaccactcagggctcattcgcttgagtcttacacggcttttgtggtcggagatgttcttgcagattgaaatgaaaactgcttcataagcacaaataatgttttcaatgatgtcagctgttcttcatgctttgggggtgattgagagaggcaagtaggtttgaacgagaagctaggggtgcagatatgcaggaaaatatatcagagaaatataaacataagcgttaagggcatctgtttagactgtttctcaagtttcttagtcctggaacagccaattccatggagcatgccaccaggagttgcaacttatagcctaggtggctcttgggaggtgaacgtctttgtggctatgtgagcagcatggaattgtctacgccttttgattggaatgcactcccccttggtgaaagggaatctatgtcttttttctacatgcagttatataacacttagaatcaccattctttcccataaggcttgtacataagccctaccttttgtccctaaggaaggagttggtgaaagtcggcctgtgagtaacattggaattaggcagtagaatttgaagaaatggtagcaacagacagccctctgctcccttaagtctttctttgcctgattattgaatttgtagtagatcaagggggatgccatgcagagaaagaccatcaatcctgggttttaggttcagggtcagttaccagcctcaggatcccggtcagttccgtgctctgtaaaaccgatacctgctttacctaccttccaaggttattttgaaaaggaagtaagattatgcatgtaataaatatcttatgaaagtaccttgaagcgttcaattatttcacaaatgcatggtggtggtgttattagtatttattaaactgatattgtgaaaaattgt

SEQ ID NO: 415320 - DNA, 1783 bp, Homo sapiens
ccgagcgcagccgggcgcgcgccaccgcccactcgccctgtgcccgccgcagcccgaaactggccacggccgggagcggaggggacagcggggatcgtgagctccggcccgggcgagcgggtgcgtctgccgcagagtcggcacctgaaggacatggaggaggctgaggcaggagaatcgcttgaacctgggaggtgaagtttgcggtgagccgagatcgcgccattgcactccagcctggtcaacaagagtgaaactctgtctcaaaaaaataagaataagacacaatccttgccctcaagattcatacagtctgaaggtaaagaggggacataaatgaaagaagtaattacaaaacagtgtgattggttctgaaaaggcagtgagtaaacagtcctgttgcataaataacaggacaggctagtgttgctgtaaccatgccacaatcttagtggctgaaaacaacaaaggtttacttttcacccctgctgcaagtccattgagggttggctgggggctctgctctggctcatttcttgtcctccctctgagacctaagctgtgggagcagctacccctttgcttgttgtcatggcagaaggaaggaaagttctggaagactcacgctggccattaaatgctctcttttggaaggttcctaactatccacatggctccaattaaccataggggcaggaagtaccatcctctcatggcctccaaatgatgagagctagaagtacttcacaaacattgttagtggcctgatagagtcttagaagccttcacaaagcagacgatctttgagctgtgtctggaagtaagactgtgtctttcaggctgacaagagggggaaagccgagggagaaagtgtttatctgcaccactcagggctcattcgcttgagtcttacacggcttttgtggtcggagatgttcttgcagattgaaatgaaaactgcttcataagcacaaataatgttttcaatgatgtcagctgttcttcatgctttgggggtgattgagagaggcaagtaggtttgaacgagaagctaggggtgcagatatgcaggaaaatatatcagagaaatataaacataagcgttaagggcatctgtttagactgtttctcaagtttcttagtcctggaacagccaattccatggagcatgccaccaggagttgcaacttatagcctaggtggctcttgggaggtgaacgtctttgtggctatgtgagcagcatggaattgtctacgccttttgattggaatgcactcccccttggtgaaagggaatctatgtcttttttctacatgcagttatataacacttagaatcaccattctttcccataaggcttgtacataagccctaccttttgtccctaaggaaggagttggtgaaagtcggcctgtgagtaacattggaattaggcagtagaatttgaagaaatggtagcaacagacagccctctgctcccttaagtctttctttgcctgattattgaatttgtagtagatcaagggggatgccatgcagagaaagaccatcaatcctgggttttaggttcagggtcagttaccagcctcaggatcccggtcagttccgtgctctgtaaaaccgatacctgctttacctaccttccaaggttattttgaaaaggaagtaagattatgcatgtaataaatatcttatgaaagtaccttgaagcgttcaattatttcacaaatgcatggtggtggtgttattagtatttattaaactgatattgtgaaaaattgt

SEQ ID NO: 415321 - DNA, 1128 bp, Homo sapiens
ccgagcgcagccgggcgcgcgccaccgcccactcgccctgtgcccgccgcagcccgaaactggccacggccgggagcggaggggacagcggggatcgtgagctccggcccgggcgagcgggtgcgtctgccgcagagtcggcacctgaaggacatggagaggccatctgcaactcttgaaggccagagttgtatggccctggattctgctccatggacagtaggaaactctgagaggtgttgaggcagctggcagcagtgatgtagccgggatgatacagcaaaaatgccacttcatggagtgagcaagggaaccaggaaaggatgctgaggctttgagatgcttaaatgatgtgcccagggtctagaaggacctgtgtcattggatcaggacctacgttgataatccaggatgatctcttcatctcaaaattgacagggtcttgctctgttgcccaggctggaatgcggtggcacaatcatggctcactgcagcctcaaccttccagggcttaagtgatcctctcacctcatcctcctgagtagctggactataggcgtgcaccaccaacacccagagatgcaccaagacgctaccaaatgcaaattaataagaccaatcctggctgggtgcaatggctcactcctgtaatctcagcactttgggaggccgaggcaggtggatcacagaagctcgggagtttgagaccaccctgaccaacatgaagaaaccccgtctctactaaaaatacaaaattagccgggcatggtggtgcatgcctgtaatcccagatactcaggaggctgaggcaggagaatcgctggaccgggggggcgacactacgggggagcccgaaatacgcccatgggccacacctgggtcgccaagggaagacgtgtggttgtgaacagagaataaagagaaaagtgggcgccgggaaaaaactggggcaaggggggggatagatgaatataacaagcggaggggtgtgtagaggggagagaggcgggcataaataaagaagaaggtgtgggttgcacatgtgttgtagtatgaatactagccagctgatgttagtagttgtgtagtgtgtagagccaaccaggtgaaaaaagaattgtgaagtgg

SEQ ID NO: 415322 - DNA, 454 bp, Homo sapiens
ccgagcgcagccgggcgcgcgccaccgcccactcgccctgtgcccgccgcagcccgaaactggccacggccgggagcggaggggacagcggggatcgtgagctccggcccgggcgagcgggtgcgtctgccgcagagtcggcacctgaaggacatggagtaaaggaccccggagggagacgcggggctgagcggtgagcggtgtatcgggcgccccttccccgggcggctgcccctgccctgagcatggagcacgcggctcatcgctgctgccaactagaagggcaaatgcctgctgttccgacgcctccttgaccaactccgaaggatcgtccctggtcccacctaggacacccgggttgggaggctggggttggtaaggaaagatctcagagggagagaaaagggctttcctagaggcccgggtattttggctaggaacttaaatgctaaaa

SEQ ID NO: 415323 - DNA, 806 bp, Homo sapiens
ccgagcgcagccgggcgcgcgccaccgcccactcgccctgtgcccgccgcagcccgaaactggccacggccgggagcggaggggacagcggggatcgtgagctccggcccgggcgagcgggtgcgtctgccgcagagtcggcacctgaaggacatggagggcatcaatttgctggttggacagtggctgcttttgaagtttctttgtccaaatgcctggaaaacaaaaaacaacaaaaacgaaacaaacaaacaaaaaaacaacatgcaactgctagtgaagaaagtaaagaggaaatctaggggccagggaagtgaccattcttagccaggaagtaaacttttcatggtgaagcatgatatgcaggagttggatttgggggtttctgaaaatctcagagtaaaaccctcttttgagaggtgaaactcagttttgggacatgaaagggctactgtatctggaaagaaattaagttatattacttctcagtactaggaatccaaaccagaccaacgagggttactcaatattcattctctaaagctcacgtattattggaagtctttgagagatctttttttaaagtcactgttaccattatcaacaacatcaatcttcatccctcataaagccctgtggaataaacaaagtatagatgccatctgatccctgccttttaaaagctcacaacccaataaagggactatatcctgtcacatatataatcttcaaatgcataaatgccagttgaatactgctgcagatcatgagttctgcaggagttcagactagattaggttcagaag

SEQ ID NO: 415324 - DNA, 2950 bp, Homo sapiens
ccgagcgcagccgggcgcgcgccaccgcccactcgccctgtgcccgccgcagcccgaaactggccacggccgggagcggaggggacagcggggatcgtgagctccggcccgggcgagcgggtgcgtctgccgcagagtcggcacctgaaggacatggaggaaagaccggcagagaccaatgccaatgtggacaactcggcgtccccctcggtggcccagctggccgggcggtttagggagcaggcggctgcagccaaggagacaccagccagtaaaccaacccgaaggaaaccgccctgttccctccccctgttcccccccaaggtagacctgggccagaatggtgaggagaaatcaccacccaatgcgagccaccctcctaaattcaaggtcaagagctcgcctctgattgagaagcttcaggccaatttaacctttgacccagctgctctactgcctggggcctcacccaagagtcctggactcaaggctatggtgtcgccatttcacagcccaccttctacccccagcagccctggtgtgcgatctaggcccagcgaggcagaggaggtgcctgtcagcttcgaccagccccctgaaggcagtcatctgccctgttacaacaaggtgcggacgaggggctcaataaaaaggcgccctccctccaggcgattccgaaggtcacagtcagactgtggagaacttggagatttcagggcggtggagtcatctcagcagaacggtgctaaggaagaggatggggatgaagtgttgccatccaagagcaaggccccaggatcccctttgtccagtgagggagcagcgggagagggagtgagaaccctgggacctgctgaaaagcctcctctgaggaggtcacccagcaggacagagaagcaggaggaggacagggccacagaggaagccaagaacggtgaaaaggccaggcggagttcagaggaggtggacggccagcacccggcccaagaggaggtcccggaatcgccccagacctctggcccagaggcagaaaataggtgtgggagccccagggaggaaaagccagctggagaggaagcagagatggaaaaggctacagaggtgaagggggagagggtgcaaaatgaagaggtgggacctgaacatgacagccaagaaacaaagaagctggaggagggagctgcagtgaaggagaccccccacagtccccctggaggagtgaagggcggagatgtccccaagcaggaaaaaggcaaggaaaaacaacaggagggggcagtgctcgagccaggctgcagcccccagaccggccctgcccagctggagaccagcagtgaggtccagagcgagccagcagtccccaagccggaggatgacactcctgtccaggacactaaaatgtgaagaacagctcattgtgccccagtgatgaagttgctggacacatctctttgcaggtagcagcaacagttgtagcagcagcagacgaagccattgcagaggcagaatatgctgagtgtctggagtcagcctgaagacacagggtggattatttcctggcctccacaccaaacgttcccttgcagatggagactgaatctgagggcagcagacttttatcagcttgagtttatgtcatttgatggacttggttcaacaacaagaacttacttaaaacaatgtactgtggtgatgagtcccaggggcactggtcagcctgtggagccctggatgctatccacacccacctatccctgcagctaatttagctgatctctaatttaactgagctctaatttagctgatcagattttgcttgggtaaagttcctttttaatgttctaaagtgtttacggttctcaaatatcagttaaaaactaattttaggtggccataaacataaaatagaaaccctgtaagttacagaagaccctaaattgtatcaaaaccctagagacaacttttcaatttgatccaaatttgaactggccaaccagtctttaaaacactggactagaagagataatgattgaaacatttaaaaaaaaaaagtgctccattcgcaggagcttttcctgtcctgtggttttccagttggtgaccaccatgggaggtcgctggctcggctcactcccttctcccacccttgagaatgtggagaactcccatggagaggcagaatggcaggaggtttcatgtcccgcgttgcatctcctcctgaaagaaaagcagtgatacctgaataatgctggctctccgattgatcctgtgaggatgaatttgcatttccagaatccttgagcatggattagatgtttcctgggaggtgccttgagtaccattatgtgcaagctacataattaaaacatttttcttagtttccctgggaagcttttcttgactcacagcccaggttcttctgcccaacacaaaaggagtgagttggggtctttagtctcttcttattgggtagctcttgctttaatattctgtttggtgagtgtaagggattctgcaagggacagggggcctgactacccagtctttgacttgtatcctctcccctcttcatacactcctgctgaaaaatgttaatccaaatacacatttaaacttagggtcggtccttattctgatttgagtattttaatgtctcagtgtgctgatttggtagttggaagaattattcttctggaggtctgttagactacatcctacactgacttcagaaaacagtctgtcagacaaaaaggccttatgtcaccactggtacctcagtttcctcatcccatttacagtttttctaactccagggtagtgtttagtgttaatatttgggatatattttttttcaaaactgtttttaagtagtttgtaatttgtaacaaacttgtaacctggttgggactgatattgtcatagctatgataaactttggatattagcagaa

SEQ ID NO: 415325 - DNA, 3091 bp, Homo sapiens
ccgagcgcagccgggcgcgcgccaccgcccactcgccctgtgcccgccgcagcccgaaactggccacggccgggagcggaggggacagcggggatcgtgagctccggcccgggcgagcgggtgcgtctgccgcagagtcggcacctgaaggacatggaggaaagaccggcagagaccaatgccaatgtggacaactcggcgtccccctcggtggcccagctggccgggcggtttagggagcaggcggctgcagccaaggagacaccagccagtaaaccaacccgaaggaaaccgccctgttccctccccctgttcccccccaaggtagacctgggccagaatggtgaggagaaatcaccacccaatgcgagccaccctcctaaattcaaggtcaagagctcgcctctgattgagaagcttcaggccaatttaacctttgacccagctgctctactgcctggggcctcacccaagagtcctggactcaaggctatggtgtcgccatttcacagcccaccttctacccccagcagccctggtgtgcgatctaggcccagcgaggcagaggaggtgcctgtcagcttcgaccagccccctgaaggcagtcatctgccctgttacaacaaggtgcggacgaggggctcaataaaaaggcgccctccctccaggcgattccgaaggtcacagtcagactgtggagaacttggagatttcagggcggtggagtcatctcagcagaacggtgctaaggaagaggatggggatgaagtgttgccatccaagagcaaggccccaggatcccctttgtccagtgagggagcagcgggagagggagtgagaaccctgggacctgctgaaaagcctcctctgaggaggtcacccagcaggacagagaagcaggaggaggacagggccacagaggaagccaagaacggtgaaaaggccaggcggagttcagaggaggtggacggccagcacccggcccaagaggaggtcccggaatcgccccagacctctggcccagaggcagaaaataggtgtgggagccccagggaggaaaagccagctggagaggaagcagagatggaaaaggctacagaggtgaagggggagagggtgcaaaatgaagaggtgggacctgaacatgacagccaagaaacaaagaagctggaggagggagctgcagtgaaggagaccccccacagtccccctggaggagtgaagggcggagatgtccccaagcaggaaaaaggcaaggaaaaacaacaggagggggcagtgctcgagccaggctgcagcccccagaccggccctgcccagctggagaccagcagtgaggtccagagcgagccagcagtccccaagccggaggatgacactcctgtccaggacactaaaatgtgaagaacagctcattgtgccccagtgatgaagttgctggacacatctctttgcaggtagcagcaacagttgtagcagcagcagacgaagccattgcagaggcagaatatgctgagtgtctggagtcagcctgaagacacagggtggattatttcctggcctccacaccaaacgttcccttgcagatggagactgaatctgagggcagcagacttttatcagcttgagtttatgtcatttgatggacttggttcaacaacaagaacttacttaaaacaatgtactgtggtgatgagtcccaggggcactggtcagcctgtggagccctggatgctatccacacccacctatccctgcagctaatttagctgatctctaatttaactgagctctaatttagctgatcagattttgcttgggtaaagttcctttttaatgttctaaagtgtttacggttctcaaatatcagttaaaaactaattttaggtggccataaacataaaatagaaaccctgtaagttacagaagaccctaaattgtatcaaaaccctagagacaacttttcaatttgatccaaatttgaactggccaaccagtctttaaaacactggactagaagagataatgattgaaacatttaaaaaaaaaaagtgctccattcgcaggagcttttcctgtcctgtggttttccagttggtgaccaccatgggaggtcgctggctcggctcactcccttctcccacccttgagaatgtggagaactcccatggagaggcagaatggcaggaggtttcatgtcccgcgttgcatctcctcctgaaagaaaagcagtgatacctgaataatgctggctctccgattgatcctgtgaggatgaatttgcatttccagaatccttgagcatggattagatgtttcctgggaggtgccttgagtaccattatgtgcaagctacataattaaaacatttttcttagtttccctgggaagcttttcttgactcacagcccaggttcttctgcccaacacaaaaggagtgagttggggtctttagtctcttcttattgggtagctcttgctttaatattctgtttggtgagtgtaagggattctgcaagggacagggggcctgactacccagtctttgacttgtatcctctcccctcttcatacactcctgctgaaaaatgttaatccaaatacacatttaaacttagggtcggtccttattctgatttgagtattttaatgtctcagtgtgctgatttggtagttggaagaattattcttctggaggtctgttagactacatcctacactgacttcagaaaacagtctgtcagacaaaaaggccttatgtcaccactggtacctcagtttcctcatcccatttacagtttttctaactccagggtagtgtttagtgttaatatttgggatatattttttttcaaaactgtttttaagtagtttgtaatttgtaacaaacttgtaacctggttgggactgatattgtcatagctatgataaactttggatattagcagaaaaaaaaaaaaaaaaaaaactcaagggggggccgggtccccatttccccttatgggggggttacaaattaccggccgcgttttaaaccccggaatggaaaaacccggggccccacttaaaagttgtggaaaaaccctttttc

SEQ ID NO: 415326 - DNA, 1622 bp, Homo sapiens
cctcaccattttcctaattaattctttcctcccctgttcacaggatgacactcctgtccaggacactaaaatgtgaagaacagctcattgtgccccagtgatgaagttgctggacacatctctttgcaggtagcagcaacagttgtagcagcagcagacgaagccattgcagaggcagaatatgctgagtgtctggagtcagcctgaagacacagggtggattatttcctggcctccacaccaaacgttcccttgcagatggagactgaatctgagggcagcagacttttatcagcttgagtttatgtcatttgatggacttggttcaacaacaagaacttacttaaaacaatgtactgtggtgatgagtcccaggggcactggtcagcctgtggagccctggatgctatccacacccacctatccctgcagctaatttagctgatctctaatttaactgagctctaatttagctgatcagattttgcttgggtaaagttcctttttaatgttctaaagtgtttacggttctcaaatatcagttaaaaactaattttaggtggccataaacataaaatagaaaccctgtaagttacagaagaccctaaattgtatcaaaaccctagagacaacttttcaatttgatccaaatttgaactggccaaccagtctttaaaacactggactagaagagataatgattgaaacatttaaaaaaaaaaagtgctccattcgcaggagcttttcctgtcctgtggttttccagttggtgaccaccatgggaggtcgctggctcggctcactcccttctcccacccttgagaatgtggagaactcccatggagaggcagaatggcaggaggtttcatgtcccgcgttgcatctcctcctgaaagaaaagcagtgatacctgaataatgctggctctccgattgatcctgtgaggatgaatttgcatttccagaatccttgagcatggattagatgtttcctgggaggtgccttgagtaccattatgtgcaagctacataattaaaacatttttcttagtttccctgggaagcttttcttgactcacagcccaggttcttctgcccaacacaaaaggagtgagttggggtctttagtctcttcttattgggtagctcttgctttaatattctgtttggtgagtgtaagggattctgcaagggacagggggcctgactacccagtctttgacttgtatcctctcccctcttcatacactcctgctgaaaaatgttaatccaaatacacatttaaacttagggtcggtccttattctgatttgagtattttaatgtctcagtgtgctgatttggtagttggaagaattattcttctggaggtctgttagactacatcctacactgacttcagaaaacagtctgtcagacaaaaaggccttatgtcaccactggtacctcagtttcctcatcccatttacagtttttctaactccagggtagtgtttagtgttaatatttgggatatattttttttcaaaactgtttttaagtagtttgtaatttgtaacaaacttgtaacctggttgggactgatattgtcatagctatgataaactttggatattagcagaa

SEQ ID NO: 415327 - DNA, 1302 bp, Homo sapiens
tccccgtacgcccaatcccctgtacgcccaaatgtactgtggtgatgagtcccaggggcactggtcagcctgtggagccctggatgctatccacacccacctatccctgcagctaatttagctgatctctaatttaactgagctctaatttagctgatcagattttgcttgggtaaagttcctttttaatgttctaaagtgtttacggttctcaaatatcagttaaaaactaattttaggtggccataaacataaaatagaaaccctgtaagttacagaagaccctaaattgtatcaaaaccctagagacaacttttcaatttgatccaaatttgaactggccaaccagtctttaaaacactggactagaagagataatgattgaaacatttaaaaaaaaaaagtgctccattcgcaggagcttttcctgtcctgtggttttccagttggtgaccaccatgggaggtcgctggctcggctcactcccttctcccacccttgagaatgtggagaactcccatggagaggcagaatggcaggaggtttcatgtcccgcgttgcatctcctcctgaaagaaaagcagtgatacctgaataatgctggctctccgattgatcctgtgaggatgaatttgcatttccagaatccttgagcatggattagatgtttcctgggaggtgccttgagtaccattatgtgcaagctacataattaaaacatttttcttagtttccctgggaagcttttcttgactcacagcccaggttcttctgcccaacacaaaaggagtgagttggggtctttagtctcttcttattgggtagctcttgctttaatattctgtttggtgagtgtaagggattctgcaagggacagggggcctgactacccagtctttgacttgtatcctctcccctcttcatacactcctgctgaaaaatgttaatccaaatacacatttaaacttagggtcggtccttattctgatttgagtattttaatgtctcagtgtgctgatttggtagttggaagaattattcttctggaggtctgttagactacatcctacactgacttcagaaaacagtctgtcagacaaaaaggccttatgtcaccactggtacctcagtttcctcatcccatttacagtttttctaactccagggtagtgtttagtgttaatatttgggatatattttttttcaaaactgtttttaagtagtttgtaatttgtaacaaacttgtaacctggttgggactgatattgtcatagctatgataaactttggatattagcagaa

SEQ ID NO: 415328 - DNA, 1740 bp, Homo sapiens
ccgagcgcagccgggcgcgcgccaccgcccactcgccctgtgcccgccgcagcccgaaactggccacggccgggagcggaggggacagcggggatcgtgagctccggcccgggcgagcgggtgcgtctgccgcagagtcggcacctgaaggacatggaggaaagaccggcagagaccaatgccaatgtggacaactcggcgtccccctcggtggcccagctggccgggcggtttagggagcaggcggctgcagccaaggagacaccagccagtaaaccaacccgaaggaaaccgccctgttccctccccctgttcccccccaaggtagacctgggccagaatggtgaggagaaatcaccacccaatgcgagccaccctcctaaattcaaggtcaagagctcgcctctgattgagaagcttcaggccaatttaacctttgacccagctgctctactgcctggggcctcacccaagagtcctggactcaaggctatggtgtcgccatttcacagcccaccttctacccccagcagccctggtgtgcgatctaggcccagcgaggcagaggaggtgcctgtcagcttcgaccagccccctgaaggcagtcatctgccctgttacaacaaggtgcggacgaggggctcaataaaaaggcgccctccctccaggcgattccgaaggtcacagtcagactgtggagaacttggagatttcagggcggtggagtcatctcagcagaacggtgctaaggaagaggatggggatgaagtgttgccatccaagagcaaggccccaggatcccctttgtccagtgagggagcagcgggagagggagtgagaaccctgggacctgctgaaaagcctcctctgaggaggtcacccagcaggacagagaagcaggaggaggacagggccacagaggaagccaagaacggtgaaaaggccaggcggagttcagaggaggtggacggccagcacccggcccaagaggaggtcccggaatcgccccagacctctggcccagaggcagaaaataggtgtgggagccccagggaggaaaagccagctggagaggaagcagagatggaaaaggctacagaggtgaagggggagagggtgcaaaatgaagaggtgggacctgaacatgacagccaagaaacaaagaagctggaggagggagctgcagtgaaggagaccccccacagtccccctggaggagtgaagggcggagatgtccccaagcaggaaaaaggcaaggaaaaacaacaggagggggcagtgctcgagccaggctgcagcccccagaccggccctgcccagctggagaccagcagtgaggtccagagcgagccagcagtccccaagccggaggatgacactcctgtccaggacactaaaatgtgaagaacagctcattgtgccccagtgatgaagttgctggacacatctctttgcaggtagcagcaacagttgtagcagcagcagacgaagccattgcagaggcagaatatgctgagtgtctggagtcagcctgaagacacagggtggattatttcctggcctccacaccaaacgttcccttgcagatggagactgaatcgcattgaggcagccagcgcaggggctctggctgagggggcaggcggacgtttgaggaaaccgcaagataggttttttctctttgaacagatagagattataacaactacttaaaaaatatagtcataggttactacgatt

SEQ ID NO: 415329 - DNA, 2423 bp, Homo sapiens
ccgagcgcagccgggcgcgcgccaccgcccactcgccctgtgcccgccgcagcccgaaactggccacggccgggagcggaggggacagcggggatcgtgagctccggcccgggcgagcgggtgcgtctgccgcagagtcggcacctgaaggacatggagaggccatctgcaactcttgaaggccagagttgtatggccctggattctgctccatggacagtaggaaactctgagaggtgttgaggcagctggcagcagtgatgtagccgggatgatacagcaaaaatgccacttcatggagtgagcaagggaaccaggaaaggatgctgaggctttgagatgcttaaatgatgtgcccagggtctagaaggacctgtgtcattggatcaggacctacgttgataatccaggatgatctcttcatctcaaaattgacagggtcttgctctgttgcccaggctggaatgcggtggcacaatcatggctcactgcagcctcaaccttccagggcttaagtgatcctctcacctcatcctcctgagtagctggactataggcgtgcaccaccaacacccagagatgcaccaagacgctaccaaatgcaaattaataagaccaatcctggctgggtgcaatggctcactcctgtaatctcagcactttgggaggccgaggcaggtggatcacagaagctcgggagtttgagaccaccctgaccaacatgaagaaaccccgtctctactaaaaatacaaaattagccgggcatggtggtgcatgcctgtaatcccagatactcaggaggctgaggcaggagaatcgcttgaacctgggaggtgaagtttgcggtgagccgagatcgcgccattgcactccagcctggtcaacaagagtgaaactctgtctcaaaaaaataagaataagacacaatccttgccctcaagattcatacagtctgaaggtaaagaggggacataaatgaaagaagtaattacaaaacagtgtgattggttctgaaaaggcagtgagtaaacagtcctgttgcataaataacaggacaggctagtgttgctgtaaccatgccacaatcttagtggctgaaaacaacaaaggtttacttttcacccctgctgcaagtccattgagggttggctgggggctctgctctggctcatttcttgtcctccctctgagacctaagctgtgggagcagctacccctttgcttgttgtcatggcagaaggaaggaaagttctggaagactcacgctggccattaaatgctctcttttggaaggttcctaactatccacatggctccaattaaccataggggcaggaagtaccatcctctcatggcctccaaatgatgagagctagaagtacttcacaaacattgttagtggcctgatagagtcttagaagccttcacaaagcagacgatctttgagctgtgtctggaagtaagactgtgtctttcaggctgacaagagggggaaagccgagggagaaagtgtttatctgcaccactcagggctcattcgcttgagtcttacacggcttttgtggtcggagatgttcttgcagattgaaatgaaaactgcttcataagcacaaataatgttttcaatgatgtcagctgttcttcatgctttgggggtgattgagagaggcaagtaggtttgaacgagaagctaggggtgcagatatgcaggaaaatatatcagagaaatataaacataagcgttaagggcatctgtttagactgtttctcaagtttcttagtcctggaacagccaattccatggagcatgccaccaggagttgcaacttatagcctaggtggctcttgggaggtgaacgtctttgtggctatgtgagcagcatggaattgtctacgccttttgattggaatgcactcccccttggtgaaagggaatctatgtcttttttctacatgcagttatataacacttagaatcaccattctttcccataaggcttgtacataagccctaccttttgtccctaaggaaggagttggtgaaagtcggcctgtgagtaacattggaattaggcagtagaatttgaagaaatggtagcaacagacagccctctgctcccttaagtctttctttgcctgattattgaatttgtagtagatcaagggggatgccatgcagagaaagaccatcaatcctgggttttaggttcagggtcagttaccagcctcaggatcccggtcagttccgtgctctgtaaaaccgatacctgctttacctaccttccaaggttattttgaaaaggaagtaagattatgcatgtaataaatatcttatgaaagtaccttgaagcgttcaattatttcacaaatgcatggtggtggtgttattagtatttattaaactgatattgtgaaaaattgt

SEQ ID NO: 415330 - DNA, 1704 bp, Homo sapiens
gcatgagccacaccactcctggccctggttgtgttttctaagctagactctgtgcttgccggcaaagcttcatgacttctctaaaggggcaataagtttgtcctttagagaagtcagggagctatattcaggcatccagcccagccagttgtcttcaaggaacagggaatcaccttcaaggagactttatagactgcaagaaccactggagtctaatatggaccctccacagaaacatttgcaaggccaggaagctctggcagattagggctggcggtgaggcacgcacacagcgaagctcagcaggtggtgtgcacacatccacccaaagatcacacaaacacaaaacaacagggttctctctgagctggccactgcttcagggcagaggagggaaatggcccaggcaacacccagcttcttgggttgggtgaagtctccttaagaaattgttttagaagtggcttccctcttctggaagtgtacaaactgccttaggccccaggctgcagattcactatgatgtatggcctgtctaacctcttgaagaaacggattggagataagagaaaagcaactcttagacttcaagcaggttgctgctggagggccaaatgcaagtgtcaactttgttctaggaaaacaaggagggtctccttccacagaggcagtttctcccccctcagatgaggaaggaatagtgtatggcagaggccctgaaactatcagctgagcaacttcctgtgtggcttggggggtggaggggattgcagtaaaagagaaggccctcccttattgagatgtgtagtaacttatgcaggattccaccaagataccaaaatcactcccgtgctagggtttgggagggacgcagggagggaatagctcagccagccagaagcctgacaaatcaccctgcgtctcacatccaggcatcaatttgctggttggacagtggctgcttttgaagtttctttgtccaaatgcctggaaaacaaaaaacaacaaaaacgaaacaaacaaacaaaaaaacaacatgcaactgctagtgaagaaagtaaagaggaaatctaggggccagggaagtgaccattcttagccaggaagtaaacttttcatggtgaagcatgatatgcaggagttggatttgggggtttctgaaaatctcagagtaaaaccctcttttgagaggtgaaactcagttttgggacatgaaagggctactgtatctggaaagaaattaagttatattacttctcagtactaggaatccaaaccagaccaacgagggttactcaatattcattctctaaagctcacgtattattggaagtctttgagagatctttttttaaagtcactgttaccattatcaacaacatcaatcttcatccctcataaagccctgtggaataaacaaagtatagatgccatctgatccctgccttttaaaagctcacaacccaataaagggactatatcctgtcaaaaaaaatagagtactactgctggcgtaactgagactcaatgccatagagtacctgcttgaaaggccactaaagaaaaaacatgtcggccgcttgggcccagtcgactttatattcgacaggcttatgcagcggcccaaattgggctaatttggccaatgcgcctatagggggcgttttcaattaattgcccgcctttacaacgacttgactgtga

SEQ ID NO: 415331 - DNA, 1172 bp, Homo sapiens
cagtaacagaaaaaaatgaaagtaataagataaatccaaggtcactgagtatagtagatgcccagctaagtgggtgagtgggagctgaaatccaagtcacttggaggaaaaggttactttttgttcatacaaaatctccttgcctagttgagcctcaaacgggtggctttttctaattcatgcagaggccatctgcaactcttgaaggccagagttgtatggccctggattctgctccatggacagtaggaaactctgagaggtgttgaggcagctggcagcagtgatgtagccgggatgatacagcaaaaatgccacttcatggagtgagcaagggaaccaggtgagaaagcatcttttcgagtacaggtatattctgacttcaggatacaataagaatggagaagatggaaaagagtaaagaccatgcgctggaagggaagtcagaaatcaccaagctgcccagaagagtgaagttctctatggtgccagggaaaatggcagtaccaacttttacagctccatacaaagccttttgcaggcagattttctcattggtctttgagtctccagaatgagcacggtgcctggcatatagtcatataatttctcaataaaagtttgcttgataaatgattaaagaaaaagaaaaaaacaaaaacaaaaaaaaaaaaaaaaacaaacaaaaaagcacaacaaagcaaaacacaacaacaaaaaaaaaagaacaaaaacgacaaaacaccgcaaggcaacagccgcaacccaagagacaatagacacatagtagataacaataaataccaaccaatagagagaggaggagacgagaatgcacaaccggagcagccaccacaaacacaaacaatgacaactagcgcctgtagacgacgggcgagacgacggagaatggagtaaaagaagacgagccagcaaccgtgagagtgaccgcgagaggacccgaaatgtgctagaagacagagaggacgaggatggctcaagtaaaagaaaaggagtagtagtctccgcagacaagggagagaaagagaagacaaaagcagcgcgacgatacacgagaacgcgacggaagacgacgcgacaacaaagcataagagcaggggaggcagagacacagccaaacacaagcagcaccaggcgcagggcccagcagg

SEQ ID NO: 415332 - DNA, 397 bp, Homo sapiens
ctcaagctctgatccctgggttaaaatcctgacttcaccacttactagctgtgtgacctaggggaaataacctctctgtgccttcattgcctcacctatgatagagttaataaaagtaactacctcatattgcttttgtgaggattaaataagtcaatgcataaaaaaaactaagttgggcacatagcattcttatgactatcattcttactattactcctactgttactattattgccagatccatcatccccaaggagggatgctgagtgtcaggatttcctcaccattttcctaattaattctttcctcccctgttcacaggatgacactcctgtccaggacactaaaatgtgaagaacagctcattgtgccccagtgatgaagttgctggaca

SEQ ID NO: 415333 - DNA, 603 bp, Homo sapiens
cagtgcggaagtgctgcccaggtggagaatctgatgccagtggagttggcaggtgtatgagtttgcgagggctgctgccgtaacagattaccacaaactgggtggctcaaaacaacagaaacgtctcctttcatggttctggaggccggatgtctaaaagcagagtgtcagcaggacctcattccccactaaggctcgaggggcggctccattccatgtttcttttggctcctggtggttgccagcttccttgacttgtggccacatcactccagtctgcctcatctttgccacaccttctcctctgtgtgtctcttataaggacctgtgtcattggatcaggacctacgttgataatccaggatgatctcttcatctcaaaattggtaactacctctgctaagactgtttttgcacataaggtaacattcacaggttccagggattaggaagtgagcatatctttttttttcctcctcaagacagggtcttgctctgttgcccaggctggaatgcggtggcacaatcatggctcactgcagcctcaaccttccagggcttaagtgatcctctcacctcatcctcctgagtagctggactata

SEQ ID NO: 415334 - DNA, 505 bp, Homo sapiens
ctcttgctttaatattctgtttggtgagtgtaagggattctgcaagggacagggggcctgactacccagtctttgacttgtatcctctcccctcttcatacactcctgctgaaaaatgttaatccaaatacacatttaaacttagggtcggtccttattctgatttgagtattttaatgtctcagtgtgctgatttggtagttggaagaattattcttctggaggtctgttagactacatcctacactgacttcagaaaacagtctgtcagacaaaaaggccttatgtcaccactggtacctcagtttcctcatcccatttacagtttttctaactccagggtagtgtttagtgttaatatttgggatatattttttttcaaaactgtttttaagtagtttgtaatttgtaacaaacttgtaacctggttgggactgatattgtcatagctatgataaactttggatattagcagaatttgggagatgtgtgtgtcaattatttt

SEQ ID NO: 415335 - DNA, 235 bp, Homo sapiens
aaagatttattagttcctaattatatatagaaaaagactttgaaaattacttaagccatgattctaccaagatgtaaccacttttattttcttttttccttcccaatgttgactggttatatgcatattaatggagctataataataattgtatactttttatcttactttctaaaccacattattattccttaaatattgctctttcttctgacacagtcttctcatgtatcat

SEQ ID NO: 415336 - DNA, 1572 bp, Homo sapiens
ggcggctttcttcccgagggcggcacgagggctgggcggtggggtgcgggtgcccgggtgaggggcggagctgggggcatggcgtccggagcggctcgctggctagtattggcacccgtcaggtccggggctctccggagcgggcctagcttgaggaaagatggcgatgtctccgccgcatggagcggctcaggccggagcctggtaccgtcgaggtcagtcatcgttacccgcagcggcgccattttgcccaaaccggtgaaaatgtccttcggccttctccgtgtgttctccattgtgatcccctttctctatgtcgggacactcattagcaagaactttgctgctctacttgaggaacatgacatttttgttccagaggatgatgatgatgatgactaacaggaattacagaaaggagaaagcactaactgaagaaatggtgatgctctcagtttctctgccttccctatcagcagaaaggctcggggaaggccctcagcctcccagtctggtgaagcttcctgtatggtccatgaccgtattccaccccaggctctgggaggctccctgagatgtgctgtccactaagcactgcacaaacaagcaatcaaattatgaataaacataataaatatcagccgtgcgtgactgagtgatggctgcagtttctcagtatccctaggttctagttggtgcagttgtctctgctgtcctttatttatgggagaaacataggcccaggctatccaggctgcagtggagcctggtgaactattcttgggggccctgggaactattttcattgtttacaaaagcccaacagaaactgtgcattttcccttaagaaagcttcatgggctaactaaagcctcatgccattctgtgttcagtgccagtcatgacagctctgcttgttagcatactacttaaatataactagaatgattcaaaactcgggttctgtgatatgaggatatagataggttttcatctatttcctggcttataactcccaaaacccttgttttaggcttttgttataatgttgggcacttcgggcctcagaaaacagcaggctgtttctcagatcttctcctgacctcctttcacctgctgctttttctccccaaggcaggccatagaaactaaaagtataatcttcctttgcccgtcttccagttggccataaaaagaatcctctgacctaccttgtctgattttaggtcatgagacccccatttcagaagggattctgccccatacctgagaggaagaaatgtagacaggccttgttggacttccccactccatctgtattagattatgcctcttttgtccaatcccatttctccagtgttgtccatgcttcaatcatccctatccaatgaggtctccataaaaggcccaagaagacaggtttagagagctttcggagaacagaacacttggctttgcaaagtggcacgcctggagagaacttggaagctccacgccccttctatacctcaccctatgcatctcttcagctgtatcttttgtgatatcctttataataaaccagtaaacgga

SEQ ID NO: 415337 - DNA, 1039 bp, Homo sapiens
  misc_feature (793)..(793): n is a, c, g, or t
  misc_feature (806)..(807): n is a, c, g, or t
ggcggctttcttcccgagggcggcacgagggctgggcggtggggtgcgggtgcccgggtgaggggcggagctgggggcatggcgtccggagcggctcgctggctagtattggcacccgtcaggtccggggctctccggagcgggcctagcttgaggaaagatggcgatgtctccgccgcatggagcggctcaggccggagcctggtaccgtcgaggtcagtcatcgttacccgcagcggcgccattttgcccaaaccggtgaaaatgtccttcggccttctccgtgtgttctccattgtgatcccctttctctatgtcgggacactcattagcaagaactttgctgctctacttgaggaacatgacatttttgttccagaggatgatgatgatgatgactaacaggaattacagaaaggagaaagcactaactgaagaaatggtgatgctctcagtttctctgccttccctatcagcagaaaggctcggggaaggccctcagcctcccagtctggtgaagcttcctgtatggtccatgaccgtattccaccccaggctctgggaggctccctgagatgtgctgtccactaagcactgcacaaacaagcaatcaaattatgaataaacataataaatatcgtcgccagccgagccacatcgctcagacaccatggggaaggtgaaggtcggagtcaacggatttggtcgtattgggcgcctggtcaccagggctgcttttaactctggtaaagtggatattgttgccatcaatgaccccttcattgacctcaantacatggtttacnntgttccaatatgattccacccatggcacatcccatggcaccgtcaaggctgagaaccgggaagcttgtcatccattggacatcccatcaaccatctttccacgagcgagataccctcaaaatcagtggggcgatgctgcgctgagtacgtcggggagccccctgggtttcacaccatgaaaagcggggccattgcaggggagccacaggtctcaccttgcccttgtgttccc

SEQ ID NO: 415338 - DNA, 1523 bp, Homo sapiens
ggcggctttcttcccgagggcggcacgagggctgggcggtggggtgcgggtgcccgggtgaggggcggagctgggggcatggcgtccggagcggctcgctggctagtattggcacccgtcaggtccggggctctccggagcgggcctagcttgaggaaagatggcgatgtctccgccgcatggagcggctcaggccggagcctggtaccgtcgagatgtccttcggccttctccgtgtgttctccattgtgatcccctttctctatgtcgggacactcattagcaagaactttgctgctctacttgaggaacatgacatttttgttccagaggatgatgatgatgatgactaacaggaattacagaaaggagaaagcactaactgaagaaatggtgatgctctcagtttctctgccttccctatcagcagaaaggctcggggaaggccctcagcctcccagtctggtgaagcttcctgtatggtccatgaccgtattccaccccaggctctgggaggctccctgagatgtgctgtccactaagcactgcacaaacaagcaatcaaattatgaataaacataataaatatcagccgtgcgtgactgagtgatggctgcagtttctcagtatccctaggttctagttggtgcagttgtctctgctgtcctttatttatgggagaaacataggcccaggctatccaggctgcagtggagcctggtgaactattcttgggggccctgggaactattttcattgtttacaaaagcccaacagaaactgtgcattttcccttaagaaagcttcatgggctaactaaagcctcatgccattctgtgttcagtgccagtcatgacagctctgcttgttagcatactacttaaatataactagaatgattcaaaactcgggttctgtgatatgaggatatagataggttttcatctatttcctggcttataactcccaaaacccttgttttaggcttttgttataatgttgggcacttcgggcctcagaaaacagcaggctgtttctcagatcttctcctgacctcctttcacctgctgctttttctccccaaggcaggccatagaaactaaaagtataatcttcctttgcccgtcttccagttggccataaaaagaatcctctgacctaccttgtctgattttaggtcatgagacccccatttcagaagggattctgccccatacctgagaggaagaaatgtagacaggccttgttggacttccccactccatctgtattagattatgcctcttttgtccaatcccatttctccagtgttgtccatgcttcaatcatccctatccaatgaggtctccataaaaggcccaagaagacaggtttagagagctttcggagaacagaacacttggctttgcaaagtggcacgcctggagagaacttggaagctccacgccccttctatacctcaccctatgcatctcttcagctgtatcttttgtgatatcctttataataaaccagtaaacgga

SEQ ID NO: 415339 - DNA, 1868 bp, Homo sapiens
ctcaaactcccgacctcaggtgatccacccaccttggcctcccaaagtgctgtgattacaggcgtgagccactgcgcccagccaacttcatgtgctctaatatgtgctgcatggcattctgtcaagagatgaggacactcctgttccttagcctggcattcaaggcttgccataatctggtcacacctcttattccagtctcatcttccatatttccagccacacaccgattcccagtattcaccatttcttgagttttcacactcatacccacccccaaacattggctcattgttcctcccacatggaaggctccttcccagagctctgggtcttaattccacccattctacagtgtctttgaagtcttcgttcctcctttcatttgaaagttgacggctccttcctctaagcaaccagtacctctcttcaaatactcggtattatgtggctaaacacacacaaagcaaaattttactagactctgagcttcttgctggcaggggacgttttttatacattgcggcccccagtgcctggcctgtggtgaatgcccagttaacgtgcgcatgaacaaccaaacgtgctcaaagctgcctttctcctgccatgtttgatagaagcactttgtggaattctttcagtctgcggatggaagactacgctgttgcccagttcactgctgctttcctttcttacaggaattacagaaaggagaaagcactaactgaagaaatggtgatgctctcagtttctctgccttccctatcagcagaaaggctcggggaaggccctcagcctcccagtctggtgaagcttcctgtatggtccatgaccgtattccaccccaggctctgggaggctccctgagatgtgctgtccactaagcactgcacaaacaagcaatcaaattatgaataaacataataaatatcagccgtgcgtgactgagtgatggctgcagtttctcagtatccctaggttctagttggtgcagttgtctctgctgtcctttatttatgggagaaacataggcccaggctatccaggctgcagtggagcctggtgaactattcttgggggccctgggaactattttcattgtttacaaaagcccaacagaaactgtgcattttcccttaagaaagcttcatgggctaactaaagcctcatgccattctgtgttcagtgccagtcatgacagctctgcttgttagcatactacttaaatataactagaatgattcaaaactcgggttctgtgatatgaggatatagataggttttcatctatttcctggcttataactcccaaaacccttgttttaggcttttgttataatgttgggcacttcgggcctcagaaaacagcaggctgtttctcagatcttctcctgacctcctttcacctgctgctttttctccccaaggcaggccatagaaactaaaagtataatcttcctttgcccgtcttccagttggccataaaaagaatcctctgacctaccttgtctgattttaggtcatgagacccccatttcagaagggattctgccccatacctgagaggaagaaatgtagacaggccttgttggacttccccactccatctgtattagattatgcctcttttgtccaatcccatttctccagtgttgtccatgcttcaatcatccctatccaatgaggtctccataaaaggcccaagaagacaggtttagagagctttcggagaacagaacacttggctttgcaaagtggcacgcctggagagaacttggaagctccacgccccttctatacctcaccctatgcatctcttcagctgtatcttttgtgatatcctttataataaaccagtaaacgga

SEQ ID NO: 415340 - DNA, 1814 bp, Homo sapiens
ctcaaactcccgacctcaggtgatccacccaccttggcctcccaaagtgctgtgattacaggcgtgagccactgcgcccagccaacttcatgtgctctaatatgtgctgcatggcattctgtcaagagatgaggacactcctgttccttagcctggcattcaaggcttgccataatctggtcacacctcttattccagtctcatcttccatatttccagccacacaccgattcccagtattcaccatttcttgagttttcacactcatacccacccccaaacattggctcattgttcctcccacatggaaggctccttcccagagctctgggtcttaattccacccattctacagtgtctttgaagtcttcgttcctcctttcatttgaaagttgacggctccttcctctaagcaaccagtacctctcttcaaatactcggtattatgtggctaaacacacacaaagcgcggcccccagtgcctggcctgtggtgaatgcccagttaacgtgcgcatgaacaaccaaacgtgctcaaagctgcctttctcctgccatgtttgatagaagcactttgtggaattctttcagtctgcggatggaagactacgctgttgcccagttcactgctgctttcctttcttacaggaattacagaaaggagaaagcactaactgaagaaatggtgatgctctcagtttctctgccttccctatcagcagaaaggctcggggaaggccctcagcctcccagtctggtgaagcttcctgtatggtccatgaccgtattccaccccaggctctgggaggctccctgagatgtgctgtccactaagcactgcacaaacaagcaatcaaattatgaataaacataataaatatcagccgtgcgtgactgagtgatggctgcagtttctcagtatccctaggttctagttggtgcagttgtctctgctgtcctttatttatgggagaaacataggcccaggctatccaggctgcagtggagcctggtgaactattcttgggggccctgggaactattttcattgtttacaaaagcccaacagaaactgtgcattttcccttaagaaagcttcatgggctaactaaagcctcatgccattctgtgttcagtgccagtcatgacagctctgcttgttagcatactacttaaatataactagaatgattcaaaactcgggttctgtgatatgaggatatagataggttttcatctatttcctggcttataactcccaaaacccttgttttaggcttttgttataatgttgggcacttcgggcctcagaaaacagcaggctgtttctcagatcttctcctgacctcctttcacctgctgctttttctccccaaggcaggccatagaaactaaaagtataatcttcctttgcccgtcttccagttggccataaaaagaatcctctgacctaccttgtctgattttaggtcatgagacccccatttcagaagggattctgccccatacctgagaggaagaaatgtagacaggccttgttggacttccccactccatctgtattagattatgcctcttttgtccaatcccatttctccagtgttgtccatgcttcaatcatccctatccaatgaggtctccataaaaggcccaagaagacaggtttagagagctttcggagaacagaacacttggctttgcaaagtggcacgcctggagagaacttggaagctccacgccccttctatacctcaccctatgcatctcttcagctgtatcttttgtgatatcctttataataaaccagtaaacgga

SEQ ID NO: 415341 - DNA, 1431 bp, Homo sapiens
ggcggctttcttcccgagggcggcacgagggctgggcggtggggtgcgggtgcccgggtgaggggcggagctgggggcatggcgtccggagcggctcgctggctagtattggcacccgtcaggtccggggctctccggagcgggcctagcttgaggaaagatggcgatgtctccgccgcatggagcggctcaggccggagcctggtaccgtcgaggtcagtcatcgttacccgcagcggcgccattttgcccaaaccggtgaaagaattacagaaaggagaaagcactaactgaagaaatggtgatgctctcagtttctctgccttccctatcagcagaaaggctcggggaaggccctcagcctcccagtctggtgaagcttcctgtatggtccatgaccgtattccaccccaggctctgggaggctccctgagatgtgctgtccactaagcactgcacaaacaagcaatcaaattatgaataaacataataaatatcagccgtgcgtgactgagtgatggctgcagtttctcagtatccctaggttctagttggtgcagttgtctctgctgtcctttatttatgggagaaacataggcccaggctatccaggctgcagtggagcctggtgaactattcttgggggccctgggaactattttcattgtttacaaaagcccaacagaaactgtgcattttcccttaagaaagcttcatgggctaactaaagcctcatgccattctgtgttcagtgccagtcatgacagctctgcttgttagcatactacttaaatataactagaatgattcaaaactcgggttctgtgatatgaggatatagataggttttcatctatttcctggcttataactcccaaaacccttgttttaggcttttgttataatgttgggcacttcgggcctcagaaaacagcaggctgtttctcagatcttctcctgacctcctttcacctgctgctttttctccccaaggcaggccatagaaactaaaagtataatcttcctttgcccgtcttccagttggccataaaaagaatcctctgacctaccttgtctgattttaggtcatgagacccccatttcagaagggattctgccccatacctgagaggaagaaatgtagacaggccttgttggacttccccactccatctgtattagattatgcctcttttgtccaatcccatttctccagtgttgtccatgcttcaatcatccctatccaatgaggtctccataaaaggcccaagaagacaggtttagagagctttcggagaacagaacacttggctttgcaaagtggcacgcctggagagaacttggaagctccacgccccttctatacctcaccctatgcatctcttcagctgtatcttttgtgatatcctttataataaaccagtaaacgga

SEQ ID NO: 415342 - DNA, 566 bp, Homo sapiens
  misc_feature (426)..(426): n is a, c, g, or t
  misc_feature (471)..(471): n is a, c, g, or t
  misc_feature (513)..(513): n is a, c, g, or t
  misc_feature (540)..(540): n is a, c, g, or t
ggcggctttcttcccgagggcggcacgagggctgggcggtggggtgcgggtgcccgggtgaggggcggagctgggggcatggcgtccggagcggctcgctggctagtattggcacccgtcaggtccggggctctccggagcgggcctagcttgaggaaagatggcgatgtctccgccgcatggagcggctcaggccggagcctggtaccgtcgaggtcagtcatcgttacccgcagcggcgccattttgcccaaaccggtgaaaatgtccttcggccttctccgtgtgttctccattgtgatcccctttctctatgtcgggacactcattagcaagaactttgctgctctacttgaggaacatgacatttttgttccagaggatgatgatgatgatgactaacagaattacagaaaggagaaagcnctaactgaagaaatagtttatgctgtaatagtttatgctgtaatngtttatgctgtaatagtttatgctgtaatagtttatgctgtnatagtttatgctgtaatagttatgctntaatcagtctatgctgtaatagttat

SEQ ID NO: 415343 - DNA, 353 bp, Homo sapiens
ttttctaattacttttcttgccctgaatttttccaaggactttaaaatcaagttgcttatgatgggtctgagggtatgtctgtgagagggccaggtcttctttggtcctgccagagtgggctctggagctcacagctgccactctgaccctctgcagatgtccttcggccttctccgtgtgttctccattgtgatcccctttctctatgtcgggacactcattagcaagaactttgctgctctacttgaggaacatgacatttttgttccagaggatgatgatgatgatgactaacaggtaagacttgctttaccctagatggagcaggaagcagggtggagcatctgtctgt

SEQ ID NO: 415344 - DNA, 2845 bp, Homo sapiens
ggccatcgctagctgggggcggggccggaagctctttccccgcgactgcgccacgtctgaggcggctgtggccacgtctgaggcggctgtggccgcgtcggtgtccgcgtcgaggagccggggcagggcacgatggcggactgggctcgggctcagagcccgggcgctgtggaagagattctagaccgggagaacaagcgaatggctgacagcctggcctccaaagtcaccaggctcaaatcgctcgccctggacatcgatagggatgcagaggatcagaaccggtacctggatggcatggactcggatttcacaagcatgaccagcctgcttacagggagcgtgaagcgcttttccacaatggcaaggtccggacaagacaaccggaagcttctatgtggcatggccgtgggtctaattgtggccttcttcatcctctcctacttcttgtccagggcaaggacgtgagccagtgggagctggtgtctgtgggtgccaagggcagccagggtcttccctgcctggtgttttgggctccagaggacttacctacaaaatactcctttgcaattataattgtgggtcaggaatcttcttcctgtgtggcaggaggctgcggctgcctgtgacctgatgagctcatgttggctggtcccatgtgtgaaagggactctctcggggaaaccaaggcccagcccctcccccctcccccaggtgctagagagccaggcagagctggggccacagcgtgtctggagaagccaggtctgagcagagcagctgttgaatcccagacgtggccacctgtggcttgcagcccttctccccgcgcttgggactctgacatcttaaggctgcacggtcgtgtccttgtctgggtgaggccatgtctgtgatccaaggttcctggaactgacacaggaaggggctgtgaaccctaagtgggtgtcatctcctccgaccgaggcttctcaccctggagatggcagttactcctggccatggttgctgagcatgggcagaccagtggaggccaccctactgtgttatctgcgccttcgatgaagtgagacccttggggagaacgggctgtggatgaaggagtggactgcagccttggcctagccactgggctgggatcttctgggtcatgtgactgtgtatccaggagcagaaacttgtattctcaggattcaggatctacccagcaccaaagatgtattttcaggagaacagacctagaaatgggcctgtctggcatttcagagtcaggcaaagcaggcagggccagggagcttctgtgggtctacacaagaaggttcctgtgagggctatcagttgttgccttctagcttgctggtaactttggcgcctccgccaagccctgccagactcccctggctgtgatggcattctgtgccatcctccttgtccccagcctctgcaggatgccctccctacccacctctccctgggccttccctgtccactgggctggattcatgttcaaaccactggactggcagggcaacgacttcttcccacctcaagatgaggtcctcgcccccttgtcttggcataaaaacacctttaaagcatgagccatgtgcttctttgcccttctctgtcctgttccaatcttctgcctcccagtcactccctggggactatgggatcactgtccccccacctgtgtggccacaccatgtgtcctgtcaatccagaactgcctctgagctccaggctgaccacagatcagccacagcctgatgcctgcagccccactttgctcacccttcccctcccctcctccttccttccacacagcaagcctacctttctccatccatgctcaccatagcccccttccttgtgacctggaccctccattgtacctggctgagactgtcagcctcctggaggagtggggtccaccttcttcttgccctatgcagtgcaagctcacttctcacccagcaaggttgactcatctgcctccatgtctctggggctttgctgttgccctgaaacctagctgggctggtcttgctcccagcttgcttccccctcctcggatgtccctttgcaggcccctgtcgttcctccggcaccagtgtccttggctgccatggcaagctcatcaggggcttgtaccctggtcaccaagcatggtagcagctgcctgcattgtatctccatctggtcactgcaggtgccaacccttcatcccccatgttttcctgggccatggagggctgacctccgtttctggggaatgtggctgagctgtggtaaccagctacaccccaggtgctctttccatggtggtgcctgctcatcttgctgatgcaaactaggaagttaggctgcatctcggagtggctttcgctggagaggtgctttgctgtctctcagactcagtcactgtgttccctccccgcctctcttatctccatggctgtttgcagctctcccaggtactttggggtctgagctggaattcctttgtggtttgctcttctgcttctcactcttgtattaagaaggattccacaaagggagagtggcatccctgctgctgctgtgccagaccagagtttcctgaggggccctgaccctaaccctccagctcagccctgtacacctgaccctgtaaatgagtggggtttgctgactgtaatccctgacaccagtaaaaccaaaaggactcttgggggctcagtgtgagagccagggttacctactctgccaagtgaggacaaactgctaggctgtatcccataatttcaggatgagaaacattaacaataaaaatttgtagtaaacataacctcatgaagactaa

SEQ ID NO: 415345 - DNA, 837 bp, Homo sapiens
  misc_feature (711)..(711): n is a, c, g, or t
  misc_feature (729)..(729): n is a, c, g, or t
  misc_feature (734)..(734): n is a, c, g, or t
  misc_feature (755)..(755): n is a, c, g, or t
  misc_feature (774)..(775): n is a, c, g, or t
  misc_feature (799)..(799): n is a, c, g, or t
ggccatcgctagctgggggcggggccggaagctctttccccgcgactgcgccacgtctgaggcggctgtggccgcgtcggtgtccgcgtcgaggagccggggcagggcacgatggcggactgggctcgggctcagagcccgggcgctgtggaagagattctagaccgggagaacaagcgaatggctgacagcctggcctccaaagtcaccaggctcaaatcgctcgccctggacatcgatagggatgcagaggatcagaaccggtacctggatggcatggactcggatttcacaagcatgaccagcctgcttacagggagcgtgaagcgcttttccacaatggcaaggtccggacaagacaaccggaagcttctatgtggcatggccgtgggtctaattgtggccttcttcatcctctcctacttcttgtccagggcaaggacgtgagccagtgggagctggtgtctgtgggtgccaagggcagccagggtcttccctgcctggtgttttgggctccagaggacttacctacaaaatactcctttgcaattataattgtgggtcaggaatcttcttcctgtgtggcaggaggctgcggctgcctgtgacctgatgagctcatgttggctggtcccatgtgtgaaagggactctctcggggaaaccaaggcccagcccctcccccctcccccaggtgggggaggtggtaganaagaaggagagttggggnaaagngtgtttggagaaggaggtttnaagagagagttgttgaatnnaaaagtggaaattgtggttggagngtttttggggggttggatttgagatttaagggtgaggt

SEQ ID NO: 415346 - DNA, 395 bp, Homo sapiens
  misc_feature (4)..(4): n is a, c, g, or t
gggncccccccccccttttgggggttttaaaaaaatttttcccttttcccccaaaaaaacccccaaccccttttttttttggggggaaaaaaaggttccaaaaagggggtgcaggtgatggtcctaccagtgtgtctgttgaggtcacccgtcctaaagtgacctccctgaaagcctgagttgaaatccagactccacttcttgaggcctggccttggactcttgggcagcctctggaaatcctcctcttcaggcccagcggataccccaccttccctgtccatgtcttccttgtactccctgtattacccattgatgtgtaacaggtcaccctaaaacttcacctaaaatagcaatgatttatcatgtctcattgaatttgagacggggcacgc

SEQ ID NO: 415347 - DNA, 574 bp, Homo sapiens
gtgagcacaggattagggctaacgttacaggttaacagcatctcaaagcagaacaatttttctttgtacagatcaagatggagtttcttttgtcttccttttctaggtaggcacagtaacagtctgatctttgccccacactcacccacttcctgctgtgttacccttccctgcccaagttcctgaaacgcagatggggatcctgatagcatcaccacttagggaataagtgagttggccgggcgcggtggctcatgcctgtaatctcaacactttgggaagtcaaggtgcaggtgatggtcctaccagtgtgtctgttgaggtcacccgtcctaaagtgacctccctgaaagcctgagttgaaatccagactccacttcttgaggcctggccttggactcttgggcagcctctggaaatcctcctcttcaggcccagcggataccccaccttccctgtccatgtcttccttgtactccctgtattacccattgatgtgtaacaggtcaccctaaaacttcacctaaaatagcaatgatttatcatgtctcattgaatttgagacggggcacgc

SEQ ID NO: 415348 - DNA, 2815 bp, Homo sapiens
  misc_feature (46)..(46): n is a, c, g, or t
  misc_feature (48)..(48): n is a, c, g, or t
tggctaggtcgaggccggtgctaatcggccgagggcacgctgaggngntgtggcggctgtggccgcgtcggtgtccgcgtcgaggagccggggcagggcacgatggcggactgggctcgggctcagagcccgggcgctgtggaagagattctagaccgggagaacaagcgaatggctgacagcctggcctccaaagtcaccaggctcaaatcgctcgccctggacatcgatagggatgcagaggatcagaaccggtacctggatggcatggactcggatttcacaagcatgaccagcctgcttacagggagcgtgaagcgcttttccacaatggcaaggtccggacaagacaaccggaagcttctatgtggcatggccgtgggtctaattgtggccttcttcatcctctcctacttcttgtccagggcaaggacgtgagccagtgggagctggtgtctgtgggtgccaagggcagccagggtcttccctgcctggtgttttgggctccagaggacttacctacaaaatactcctttgcaattataattgtgggtcaggaatcttcttcctgtgtggcaggaggctgcggctgcctgtgacctgatgagctcatgttggctggtcccatgtgtgaaagggactctctcggggaaaccaaggcccagcccctcccccctcccccaggtgctagagagccaggcagagctggggccacagcgtgtctggagaagccaggtctgagcagagcagctgttgaatcccagacgtggccacctgtggcttgcagcccttctccccgcgcttgggactctgacatcttaaggctgcacggtcgtgtccttgtctgggtgaggccatgtctgtgatccaaggttcctggaactgacacaggaaggggctgtgaaccctaagtgggtgtcatctcctccgaccgaggcttctcaccctggagatggcagttactcctggccatggttgctgagcatgggcagaccagtggaggccaccctactgtgttatctgcgccttcgatgaagtgagacccttggggagaacgggctgtggatgaaggagtggactgcagccttggcctagccactgggctgggatcttctgggtcatgtgactgtgtatccaggagcagaaacttgtattctcaggattcaggatctacccagcaccaaagatgtattttcaggagaacagacctagaaatgggcctgtctggcatttcagagtcaggcaaagcaggcagggccagggagcttctgtgggtctacacaagaaggttcctgtgagggctatcagttgttgccttctagcttgctggtaactttggcgcctccgccaagccctgccagactcccctggctgtgatggcattctgtgccatcctccttgtccccagcctctgcaggatgccctccctacccacctctccctgggccttccctgtccactgggctggattcatgttcaaaccactggactggcagggcaacgacttcttcccacctcaagatgaggtcctcgcccccttgtcttggcataaaaacacctttaaagcatgagccatgtgcttctttgcccttctctgtcctgttccaatcttctgcctcccagtcactccctggggactatgggatcactgtccccccacctgtgtggccacaccatgtgtcctgtcaatccagaactgcctctgagctccaggctgaccacagatcagccacagcctgatgcctgcagccccactttgctcacccttcccctcccctcctccttccttccacacagcaagcctacctttctccatccatgctcaccatagcccccttccttgtgacctggaccctccattgtacctggctgagactgtcagcctcctggaggagtggggtccaccttcttcttgccctatgcagtgcaagctcacttctcacccagcaaggttgactcatctgcctccatgtctctggggctttgctgttgccctgaaacctagctgggctggtcttgctcccagcttgcttccccctcctcggatgtccctttgcaggcccctgtcgttcctccggcaccagtgtccttggctgccatggcaagctcatcaggggcttgtaccctggtcaccaagcatggtagcagctgcctgcattgtatctccatctggtcactgcaggtgccaacccttcatcccccatgttttcctgggccatggagggctgacctccgtttctggggaatgtggctgagctgtggtaaccagctacaccccaggtgctctttccatggtggtgcctgctcatcttgctgatgcaaactaggaagttaggctgcatctcggagtggctttcgctggagaggtgctttgctgtctctcagactcagtcactgtgttccctccccgcctctcttatctccatggctgtttgcagctctcccaggtactttggggtctgagctggaattcctttgtggtttgctcttctgcttctcactcttgtattaagaaggattccacaaagggagagtggcatccctgctgctgctgtgccagaccagagtttcctgaggggccctgaccctaaccctccagctcagccctgtacacctgaccctgtaaatgagtggggtttgctgactgtaatccctgacaccagtaaaaccaaaaggactcttgggggctcagtgtgagagccagggttacctactctgccaagtgaggacaaactgctaggctgtatcccataatttcaggatgagaaacattaacaataaaaatttgtagtaaacataacctcatgaagactaa

SEQ ID NO: 415349 - DNA, 2956 bp, Homo sapiens
  misc_feature (46)..(46): n is a, c, g, or t
  misc_feature (48)..(48): n is a, c, g, or t
tggctaggtcgaggccggtgctaatcggccgagggcacgctgaggngntgtggcggctgtggccgcgtcggtgtccgcgtcgaggagccggggcagggcacgatggcggactgggctcgggctcagagcccgggcgctgtggaagagattctagaccgggagaacaagcgaatggctgacagcctggcctccaaagtcaccaggctcaaatcgctcgccctggacatcgatagggatgcagaggatcagaaccggtacctggatggcatggtaagggcccacggtgtgcgtgtatcagtgccctgccctagcactacctgctgcagagcctgcagtgtctccttcagcactggtgcgggtgggtggtcaaatcaccacttctgtgtgatcttgctgggattcctcccttaggactcggatttcacaagcatgaccagcctgcttacagggagcgtgaagcgcttttccacaatggcaaggtccggacaagacaaccggaagcttctatgtggcatggccgtgggtctaattgtggccttcttcatcctctcctacttcttgtccagggcaaggacgtgagccagtgggagctggtgtctgtgggtgccaagggcagccagggtcttccctgcctggtgttttgggctccagaggacttacctacaaaatactcctttgcaattataattgtgggtcaggaatcttcttcctgtgtggcaggaggctgcggctgcctgtgacctgatgagctcatgttggctggtcccatgtgtgaaagggactctctcggggaaaccaaggcccagcccctcccccctcccccaggtgctagagagccaggcagagctggggccacagcgtgtctggagaagccaggtctgagcagagcagctgttgaatcccagacgtggccacctgtggcttgcagcccttctccccgcgcttgggactctgacatcttaaggctgcacggtcgtgtccttgtctgggtgaggccatgtctgtgatccaaggttcctggaactgacacaggaaggggctgtgaaccctaagtgggtgtcatctcctccgaccgaggcttctcaccctggagatggcagttactcctggccatggttgctgagcatgggcagaccagtggaggccaccctactgtgttatctgcgccttcgatgaagtgagacccttggggagaacgggctgtggatgaaggagtggactgcagccttggcctagccactgggctgggatcttctgggtcatgtgactgtgtatccaggagcagaaacttgtattctcaggattcaggatctacccagcaccaaagatgtattttcaggagaacagacctagaaatgggcctgtctggcatttcagagtcaggcaaagcaggcagggccagggagcttctgtgggtctacacaagaaggttcctgtgagggctatcagttgttgccttctagcttgctggtaactttggcgcctccgccaagccctgccagactcccctggctgtgatggcattctgtgccatcctccttgtccccagcctctgcaggatgccctccctacccacctctccctgggccttccctgtccactgggctggattcatgttcaaaccactggactggcagggcaacgacttcttcccacctcaagatgaggtcctcgcccccttgtcttggcataaaaacacctttaaagcatgagccatgtgcttctttgcccttctctgtcctgttccaatcttctgcctcccagtcactccctggggactatgggatcactgtccccccacctgtgtggccacaccatgtgtcctgtcaatccagaactgcctctgagctccaggctgaccacagatcagccacagcctgatgcctgcagccccactttgctcacccttcccctcccctcctccttccttccacacagcaagcctacctttctccatccatgctcaccatagcccccttccttgtgacctggaccctccattgtacctggctgagactgtcagcctcctggaggagtggggtccaccttcttcttgccctatgcagtgcaagctcacttctcacccagcaaggttgactcatctgcctccatgtctctggggctttgctgttgccctgaaacctagctgggctggtcttgctcccagcttgcttccccctcctcggatgtccctttgcaggcccctgtcgttcctccggcaccagtgtccttggctgccatggcaagctcatcaggggcttgtaccctggtcaccaagcatggtagcagctgcctgcattgtatctccatctggtcactgcaggtgccaacccttcatcccccatgttttcctgggccatggagggctgacctccgtttctggggaatgtggctgagctgtggtaaccagctacaccccaggtgctctttccatggtggtgcctgctcatcttgctgatgcaaactaggaagttaggctgcatctcggagtggctttcgctggagaggtgctttgctgtctctcagactcagtcactgtgttccctccccgcctctcttatctccatggctgtttgcagctctcccaggtactttggggtctgagctggaattcctttgtggtttgctcttctgcttctcactcttgtattaagaaggattccacaaagggagagtggcatccctgctgctgctgtgccagaccagagtttcctgaggggccctgaccctaaccctccagctcagccctgtacacctgaccctgtaaatgagtggggtttgctgactgtaatccctgacaccagtaaaaccaaaaggactcttgggggctcagtgtgagagccagggttacctactctgccaagtgaggacaaactgctaggctgtatcccataatttcaggatgagaaacattaacaataaaaatttgtagtaaacataacctcatgaagactaa

SEQ ID NO: 415350 - DNA, 2813 bp, Homo sapiens
ctcggactgatgtggccacgttcatgaggctggctagtgtgcctggcgatcgtgatgtcctgcagctcgatgtgacgcctgggggcagcgtcactgatgtgcgtgactgggtctcggtgctcagagcccgggcgctgtggaagagattctagaccgggagaacaagcgaatggctgacagcctggcctccaaagtcaccaggctcaaatcgctcgccctggacatcgatagggatgcagaggatcagaaccggtacctggatggcatggactcggatttcacaagcatgaccagcctgcttacagggagcgtgaagcgcttttccacaatggcaaggtccggacaagacaaccggaagcttctatgtggcatggccgtgggtctaattgtggccttcttcatcctctcctacttcttgtccagggcaaggacgtgagccagtgggagctggtgtctgtgggtgccaagggcagccagggtcttccctgcctggtgttttgggctccagaggacttacctacaaaatactcctttgcaattataattgtgggtcaggaatcttcttcctgtgtggcaggaggctgcggctgcctgtgacctgatgagctcatgttggctggtcccatgtgtgaaagggactctctcggggaaaccaaggcccagcccctcccccctcccccaggtgctagagagccaggcagagctggggccacagcgtgtctggagaagccaggtctgagcagagcagctgttgaatcccagacgtggccacctgtggcttgcagcccttctccccgcgcttgggactctgacatcttaaggctgcacggtcgtgtccttgtctgggtgaggccatgtctgtgatccaaggttcctggaactgacacaggaaggggctgtgaaccctaagtgggtgtcatctcctccgaccgaggcttctcaccctggagatggcagttactcctggccatggttgctgagcatgggcagaccagtggaggccaccctactgtgttatctgcgccttcgatgaagtgagacccttggggagaacgggctgtggatgaaggagtggactgcagccttggcctagccactgggctgggatcttctgggtcatgtgactgtgtatccaggagcagaaacttgtattctcaggattcaggatctacccagcaccaaagatgtattttcaggagaacagacctagaaatgggcctgtctggcatttcagagtcaggcaaagcaggcagggccagggagcttctgtgggtctacacaagaaggttcctgtgagggctatcagttgttgccttctagcttgctggtaactttggcgcctccgccaagccctgccagactcccctggctgtgatggcattctgtgccatcctccttgtccccagcctctgcaggatgccctccctacccacctctccctgggccttccctgtccactgggctggattcatgttcaaaccactggactggcagggcaacgacttcttcccacctcaagatgaggtcctcgcccccttgtcttggcataaaaacacctttaaagcatgagccatgtgcttctttgcccttctctgtcctgttccaatcttctgcctcccagtcactccctggggactatgggatcactgtccccccacctgtgtggccacaccatgtgtcctgtcaatccagaactgcctctgagctccaggctgaccacagatcagccacagcctgatgcctgcagccccactttgctcacccttcccctcccctcctccttccttccacacagcaagcctacctttctccatccatgctcaccatagcccccttccttgtgacctggaccctccattgtacctggctgagactgtcagcctcctggaggagtggggtccaccttcttcttgccctatgcagtgcaagctcacttctcacccagcaaggttgactcatctgcctccatgtctctggggctttgctgttgccctgaaacctagctgggctggtcttgctcccagcttgcttccccctcctcggatgtccctttgcaggcccctgtcgttcctccggcaccagtgtccttggctgccatggcaagctcatcaggggcttgtaccctggtcaccaagcatggtagcagctgcctgcattgtatctccatctggtcactgcaggtgccaacccttcatcccccatgttttcctgggccatggagggctgacctccgtttctggggaatgtggctgagctgtggtaaccagctacaccccaggtgctctttccatggtggtgcctgctcatcttgctgatgcaaactaggaagttaggctgcatctcggagtggctttcgctggagaggtgctttgctgtctctcagactcagtcactgtgttccctccccgcctctcttatctccatggctgtttgcagctctcccaggtactttggggtctgagctggaattcctttgtggtttgctcttctgcttctcactcttgtattaagaaggattccacaaagggagagtggcatccctgctgctgctgtgccagaccagagtttcctgaggggccctgaccctaaccctccagctcagccctgtacacctgaccctgtaaatgagtggggtttgctgactgtaatccctgacaccagtaaaaccaaaaggactcttgggggctcagtgtgagagccagggttacctactctgccaagtgaggacaaactgctaggctgtatcccataatttcaggatgagaaacattaacaataaaaatttgtagtaaacataacctcatgaagactaa

SEQ ID NO: 415351 - DNA, 2909 bp, Homo sapiens
ctctggcccagctggggtgacctcggccgagaggaccctgtcaggggggcggattcggatccttccgggtccgagcagggccgggtttcggccggcactgccgttaggaccgaaggcgcgcgtggcggcccagcagctccagcgaggggtcgcgcagcagcggggtctccccactccccgccgccccctgtgagatcgttctgcatgggttcgggctcagagcccgggcgctgtggaagagattctagaccgggagaacaagcgaatggctgacagcctggcctccaaagtcaccaggctcaaatcgctcgccctggacatcgatagggatgcagaggatcagaaccggtacctggatggcatggactcggatttcacaagcatgaccagcctgcttacagggagcgtgaagcgcttttccacaatggcaaggtccggacaagacaaccggaagcttctatgtggcatggccgtgggtctaattgtggccttcttcatcctctcctacttcttgtccagggcaaggacgtgagccagtgggagctggtgtctgtgggtgccaagggcagccagggtcttccctgcctggtgttttgggctccagaggacttacctacaaaatactcctttgcaattataattgtgggtcaggaatcttcttcctgtgtggcaggaggctgcggctgcctgtgacctgatgagctcatgttggctggtcccatgtgtgaaagggactctctcggggaaaccaaggcccagcccctcccccctcccccaggtgctagagagccaggcagagctggggccacagcgtgtctggagaagccaggtctgagcagagcagctgttgaatcccagacgtggccacctgtggcttgcagcccttctccccgcgcttgggactctgacatcttaaggctgcacggtcgtgtccttgtctgggtgaggccatgtctgtgatccaaggttcctggaactgacacaggaaggggctgtgaaccctaagtgggtgtcatctcctccgaccgaggcttctcaccctggagatggcagttactcctggccatggttgctgagcatgggcagaccagtggaggccaccctactgtgttatctgcgccttcgatgaagtgagacccttggggagaacgggctgtggatgaaggagtggactgcagccttggcctagccactgggctgggatcttctgggtcatgtgactgtgtatccaggagcagaaacttgtattctcaggattcaggatctacccagcaccaaagatgtattttcaggagaacagacctagaaatgggcctgtctggcatttcagagtcaggcaaagcaggcagggccagggagcttctgtgggtctacacaagaaggttcctgtgagggctatcagttgttgccttctagcttgctggtaactttggcgcctccgccaagccctgccagactcccctggctgtgatggcattctgtgccatcctccttgtccccagcctctgcaggatgccctccctacccacctctccctgggccttccctgtccactgggctggattcatgttcaaaccactggactggcagggcaacgacttcttcccacctcaagatgaggtcctcgcccccttgtcttggcataaaaacacctttaaagcatgagccatgtgcttctttgcccttctctgtcctgttccaatcttctgcctcccagtcactccctggggactatgggatcactgtccccccacctgtgtggccacaccatgtgtcctgtcaatccagaactgcctctgagctccaggctgaccacagatcagccacagcctgatgcctgcagccccactttgctcacccttcccctcccctcctccttccttccacacagcaagcctacctttctccatccatgctcaccatagcccccttccttgtgacctggaccctccattgtacctggctgagactgtcagcctcctggaggagtggggtccaccttcttcttgccctatgcagtgcaagctcacttctcacccagcaaggttgactcatctgcctccatgtctctggggctttgctgttgccctgaaacctagctgggctggtcttgctcccagcttgcttccccctcctcggatgtccctttgcaggcccctgtcgttcctccggcaccagtgtccttggctgccatggcaagctcatcaggggcttgtaccctggtcaccaagcatggtagcagctgcctgcattgtatctccatctggtcactgcaggtgccaacccttcatcccccatgttttcctgggccatggagggctgacctccgtttctggggaatgtggctgagctgtggtaaccagctacaccccaggtgctctttccatggtggtgcctgctcatcttgctgatgcaaactaggaagttaggctgcatctcggagtggctttcgctggagaggtgctttgctgtctctcagactcagtcactgtgttccctccccgcctctcttatctccatggctgtttgcagctctcccaggtactttggggtctgagctggaattcctttgtggtttgctcttctgcttctcactcttgtattaagaaggattccacaaagggagagtggcatccctgctgctgctgtgccagaccagagtttcctgaggggccctgaccctaaccctccagctcagccctgtacacctgaccctgtaaatgagtggggtttgctgactgtaatccctgacaccagtaaaaccaaaaggactcttgggggctcagtgtgagagccagggttacctactctgccaagtgaggacaaactgctaggctgtatcccataatttcaggatgagaaacattaacaataaaaatttgtagtaaacataacctcatgaagactaa

SEQ ID NO: 415352 - DNA, 3030 bp, Homo sapiens
ggccatcgctagctgggggcggggccggaagctctttccccgcgactgcgccacgtctgaggcggctgtggccacgtctgaggcggctgtggccgcgtcggtgtccgcgtcgaggagccggggcagggcacgatggcggactgggctcgggctcagagcccgggcgctgtggaagagattctagaccgggagaacaagcgaatggctgacagcctggcctccaaagtcaccaggctcaaatcgctcgccctggacatcgatagggatgcagaggatcagaaccggtacctggatggcatggactcggatttcacaagcatgaccagcctgcttacagggagcgtgaagcgcttttccacaatggcaaggtccggacaagacaaccggaagcttctatgtggcatggccgtgggtctaattgtggccttcttcatcctctcctacttcttgtccagggcaaggacgtgagccagtgggagctggtgtctgtgggtgccaagggcagccagggtcttccctgcctggtgttttgggctccagaggacttacctacaaaatactcctttgcaattataattgtgggtcaggaatcttcttcctgtgtggcaggaggctgcggctgcctgtgacctgatgagctcatgttggctggtcccatgtgtgaaagggactctctcggggaaaccaaggcccagcccctcccccctcccccaggtgctagagagccaggcagagctggggccacagcgtgtctggagaagccaggtctgagcagagcagctgttgaatcccagacgtggccacctgtggcttgcagcccttctccccgcgcttgggactctgacatcttaaggctgcacggtcgtgtccttgtctgggtgaggccatgtctgtgatccaaggttcctggaactgacacaggaaggggctgtgaaccctaagtgggtgtcatctcctccgaccgaggcttctcaccctggagatggcagttactcctggccatggttgctgagcatgggcagaccagtggaggccaccctactgtgttatctgcgccttcgatgaagtgagacccttggggagaacgggctgtggatgaaggagtggactgcagccttggcctagccactgggctgggatcttctgggtcatgtgactgtgtatccaggagcagaaacttgtattctcaggattcaggatctacccagcaccaaagatgtattttcaggagaacagacctagaaatgggcctgtctggcatttcagagtcaggcaaagcaggcagggccagggagcttctgtgggtctacacaagaaggttcctgtgagggctatcagttgttgccttctagcttgctggtaactttggcgcctccgccaagccctgccagactcccctggctgtgatggcattctgtgccatcctccttgtccccagcctctgcaggatgccctccctacccacctctccctgggccttccctgtccactgggctggattcatgttcaaaccactggactggcagggcaacgacttcttcccacctcaagatgaggtcctcgcccccttgtcttggcataaaaacacctttaaagcatgagccatgtgcttctttgcccttctctgtcctgttccaatcttctgcctcccagtcactccctggggactatgggatcactgtccccccacctgtgtggccacaccatgtgtcctgtcaatccagaactgcctctgagctccaggctgaccacagatcagccacagcctgatgcctgcagccccactttgctcacccttcccctcccctcctccttccttccacacagcaagcctacctttctccatccatgctcaccatagcccccttccttgtgacctggaccctccattgtacctggctgagactgtcagcctcctggaggagtggggtccaccttcttcttgccctatgcagtgcaagctcacttctcacccagcaaggttgactcatctgcctccatgtctctggggctttgctgttgccctgaaacctagctgggctggtcttgctcccagcttgcttccccctcctcggatgtccctttgcaggcccctgtcgttcctccggcaccagtgtccttggctgccatggcaagctcatcaggggcttgtaccctggtcaccaagcatggtagcagctgcctgcattgtatctccatctggtcactgcaggtgccaacccttcatcccccatgttttcctgggccatggagggctgacctccgtttctggggaatgtggctgagctgtggtaaccagctacaccccaggtgctctttccatggtggtgcctgctcatcttgctgatgcaaactaggaagttaggctgcatctcggagtggctttcgctggagaggtgctttgctgtctctcagactcagtcactgtgttccctccccgcctctcttatctccatggctgtttgcagctctcccaggtactttggggtctgagctggaattcctttgtggtttgctcttctgcttctcactcttgtattaagaaggattccacaaagggagagtggcatccctgctgctgctgtgccagaccagagtttcctgaggggccctgaccctaaccctccagctcagccctgtacacctgaccctgtaaatgagtggggtttgctgactgtaatccctgacaccagtaaaaccaaaaggactcttgggggctcagtgtgagagccagggttacctactctgccaagtgaggacaaactgctaggctgtatcccataatttcaggatgagaaacattaacaataaaaatttgtagtaaacataacctcatgaagactaaaaaagaaaagaaaagagatcttatttagcggcgcagctatcccttagtgaggtattagctgcactgcggcgtttcacgtctgatggcgacttgcgtacgacttactgcttagaatctcttgcagctgtatacgaaggccgatcgtctcaagtcgtgatgatgggccgctttcggatagggggttt

SEQ ID NO: 415353 - DNA, 2749 bp, Homo sapiens
ggccatcgctagctgggggcggggccggaagctctttccccgcgactgcgccacgtctgaggcggctgtggccacgtctgaggcggctgtggccgcgtcggtgtccgcgtcgaggagccggggcagggcacgatggcggactgggctcgggctcagagcccgggcgctgtggaagagattctagaccgggagaacaagcgaatggctgacagcctggcctccaaagtcaccaggctcaaatcgctcgccctggacatcgatagggatgcagaggatcagaaccggtacctggatggcatggactcggatttcacaagcatgaccagcctgcttacagggagcgtgaagcgcttttccacaatggcaaggtccggacaagacaaccggaagcttctatgtggcatggccgtgggtctaattgtggccttcttcatcctctcctacttcttgtccagggcaaggacgtgagccagtgggagctggtgtctgtgggtgccaagggcagccagggtcttccctgcctggtgttttgggctccagaggacttacctacaaaatactcctttgcaattataattgtgggtcaggaatcttcttcctgtgtggcaggaggctgcggctgcctgtgacctgatgagctcatgttggctggtcccatgtgtgaaagggactctctcggggaaaccaaggcccagcccctcccccctcccccaggtgctagagagccaggcagagctggggccacagcgtgtctggagaagccaggtctgagcagagcagctgttgaatcccagacgtggccacctgtggcttgcagcccttctccccgcgcttgggactctgacatcttaaggctgcacggtcgtgtccttgtctgggtgaggccatgtctgtgatccaaggttcctggaactgacacaggaaggggctgtgaaccctaagtgggtgtcatctcctccgaccgaggcttctcaccctggagatggcagttactcctggccatggttgctgagcatgggcagaccagtggaggccaccctactgtgttatctgcgccttcgatgaagtgagacccttggggagaacgggctgtggatgaaggagtggactgcagccttggcctagccactgggctgggatcttctgggtcatgtgactgtgtatccaggagcagaaacttgtattctcaggattcaggatctacccagcaccaaagatgtattttcaggagaacagacctagaaatgggcctgtctggcatttcagagtcaggcaaagcaggcagggccagggagcttctgtgggtctacacaagaaggttcctgtgagggctatcagttgttgccttctagcttgctggtaactttggcgcctccgccaagccctgccagactcccctggctgtgatggcattctgtgccatcctccttgtccccagcctctgcaggatgccctccctacccacctctccctgggccttccctgtccactgggctggattcatgttcaaaccactggactggcagggcaacgacttcttcccacctcaagatgaggtcctcgcccccttgtcttggcataaaaacacctttaaagcatgagccatgtgcttctttgcccttctctgtcctgttccaatcttctgcctcccagtcactccctggggactatgggatcactgtccccccacctgtgtggccacaccatgtgtcctgtcaatccagaactgcctctgagctccaggctgaccacagatcagccacagcctgatgcctgcagccccactttgctcacccttcccctcccctcctccttccttccacacagcaagcctacctttctccatccatgctcaccatagcccccttccttgtgacctggaccctccattgtacctggctgagactgtcagcctcctggaggagtggggtccaccttcttgggctggtcttgctcccagcttgcttccccctcctcggatgtccctttgcaggcccctgtcgttcctccggcaccagtgtccttggctgccatggcaagctcatcaggggcttgtaccctggtcaccaagcatggtagcagctgcctgcattgtatctccatctggtcactgcaggtgccaacccttcatcccccatgttttcctgggccatggagggctgacctccgtttctggggaatgtggctgagctgtggtaaccagctacaccccaggtgctctttccatggtggtgcctgctcatcttgctgatgcaaactaggaagttaggctgcatctcggagtggctttcgctggagaggtgctttgctgtctctcagactcagtcactgtgttccctccccgcctctcttatctccatggctgtttgcagctctcccaggtactttggggtctgagctggaattcctttgtggtttgctcttctgcttctcactcttgtattaagaaggattccacaaagggagagtggcatccctgctgctgctgtgccagaccagagtttcctgaggggccctgaccctaaccctccagctcagccctgtacacctgaccctgtaaatgagtggggtttgctgactgtaatccctgacaccagtaaaaccaaaaggactcttgggggctcagtgtgagagccagggttacctactctgccaagtgaggacaaactgctaggctgtatcccataatttcaggatgagaaacattaacaataaaaatttgtagtaaacataacctcatgaagactaa

SEQ ID NO: 415354 - DNA, 4039 bp, Homo sapiens
ggccatcgctagctgggggcggggccggaagctctttccccgcgactgcgccacgtctgaggcggctgtggccacgtctgaggcggctgtggccgcgtcggtgtccgcgtcgaggagccggggcagggcacgatggcggactgggctcgggctcagagcccgggcgctgtggaagagattctagaccgggagaacaagcgaatggctgacagcctggcctccaaagtcaccaggctcaaatcgctcgccctggacatcgatagggatgcagaggatcagaaccggtacctggatggcatggactcggatttcacaagcatgaccagcctgcttacagggagcgtgaagcgcttttccacaatggcaaggtccggacaagacaaccggaagcttctatgtggcatggccgtgggtctaattgtggccttcttcatcctctcctacttcttgtccagggcaaggacgtgagccagtgggagctggtgtctgtgggtgccaagggcagccagggtcttccctgcctggtgttttgggctccagaggacttacctacaaaatactcctttgcaattataattgtgggtcaggaatcttcttcctgtgtggcaggaggctgcggctgcctgtgacctgatgagctcatgttggctggtcccatgtgtgaaagggactctctcggggaaaccaaggcccagcccctcccccctcccccaggtgctagagagccaggcagagctggggccacagcgtgtctggagaagccaggtctgagcagagcagctgttgaatcccagacgtggccacctgtggcttgcagcccttctccccgcgcttgggactctgacatcttaaggctgcacggtcgtgtccttgtctgggtgaggccatgtctgtgatccaaggttcctggaactgacacaggaaggggctgtgaaccctaagtgggtgtcatctcctccgaccgaggcttctcaccctggagatggcagttactcctggccatggttgctgagcatgggcagaccagtggaggccaccctactgtgttatctgcgccttcgatgaagtgagacccttggggagaacgggctgtggatgaaggagtggactgcagccttggcctagccactgggctgggatcttctgggtcatgtgactgtgtatccaggagcagaaacttgtattctcaggattcaggatctacccagcaccaaagatgtattttcaggagaacagacctagaaatgggcctgtctggcatttcagagtcaggcaaagcaggcagggccagggagcttctgtgggtctacacaagaaggttcctgtgagggctatcagttgttgccttctagcttgctggtaactttggcgcctccgccaagccctgccagactcccctggctgtgatggcattctgtgccatcctccttgtccccagcctctgcaggatgccctccctacccacctctccctgggccttccctgtccactgggctggattcatgttcaaaccactggactggcagggcaacgacttcttcccacctcaagatgaggtcctcgcccccttgtcttggcataaaaacacctttaaagcatgagccatgtgcttctttgcccttctctgtcctgttccaatcttctgcctcccagtcactccctggggactatgggatcactgtccccccacctgtgtggccacaccatgtgtcctgtcaatccagaactgcctctgagctccaggctgaccacagatcagccacagcctgatgcctgcagccccactttgctcacccttcccctcccctcctccttccttccacacagcaagcctacctttctccatccatgctcaccatagcccccttccttgtgacctggaccctccattgtacctggctgagactgtcagcctcctggaggagtggggtccaccttcttcttgccctatgcagtgcaagctcacttctcacccagcaaggttgactcatctgcctccatgtctctggggctttgctgttgccctgaaacctagctgggctggtcttgctcccagcttgcttccccctcctcggatgtccctttgcaggcccctgtcgttcctccggcaccagtgtccttggctgccatggcaagctcatcaggggcttgtaccctggtcaccaagcatggtagcagctgcctgcattgtatctccatctggtcactgcaggtgccaacccttcatcccccatgttttcctgggccatggagggctgacctccgtttctggggaatgtggctgagctgtggtaaccagctacaccccaggtgctctttccatggtggtgcctgctcatcttgctgatgcaaactaggaagttaggctgcatctcggagtggctttcgctggagaggtgctttgctgtctctcagactcagtcactgtgttccctccccgcctctcttatctccatggctgtttgcagctctcccaggtactttggggtctgagctggaattcctttgtggtttgctcttctgcttctcactcttgtattaagaaggattccacaaagggagagtggcatccctgctgctgctgtgccagaccagagtttcctgaggggccctgaccctaaccctccagctcagccctgtacacctgaccctgtaaatgagtggggtttgctgactgtaatccctgacaccagtaaaaccaaaaggactcttgggggctcagtgtgagagccagggttacctactctgccaagtgaggacaaactgctaggctgtatcccataatttcaggatgagaaacattaacaataaaaatttgtagtaaacataacctcatgaagactaaaaaaaaaaaaaaaaaaaaaaaaaaaaaaaaaaaaaaaaaaaaaaaaaaaaaaaaaaaaaaaaaaaaaaaaaaaaaaaaaaaaaaaaaaaaaaaaaaaaagccagtgggccgcgcgccggccggccccgcgagagaatattataacaacacacctggtggtggggcggcggcgcgccccccgaggagaggtgagagcaggggggaacgagtggggtcccaacagaagaaacaacactggaggaacgatccaacaaaggaggggggaggactctacaccacacaaaaaaaaaaaaaccgcccgccgcgggaagaacacaccacgagagtactgttctgcagcgaacaacaaaccacaagagaaaggagggagtccacgagagaggcaaatacattgtcggggagcaataatctaaaacaagcaacaggcaacgagaccaaacaagaaaaagaagctaccagcaatatataaaaaaaaacgagccaccacgccgcggggggtggggggtgtcttaacaagacacaaacaaagagcaaacacaagcagcagaagaaagaacaaagaacgaaacaaagaagcagcaagaagaacgaaaaaaaagaaagcataggaggaagaggaacgaaacgaaaagaaaagaagaagagggagaagcgagaaacgaaaacaaaaagacagcaaggacatgagaagaatagacgagagggggaggaagaggagagaaaagagggagaggaggccacggagagcgaagaagagaagagagaaggaaggaagagagaggcaaggacagagagagaggaggaggcggaaggagaaaagggagagaaaggagaggagggagagagagaggagggcaagaagggaggggggagaggcgggaggaggaggatgggagggagatgggaggaggggaggcagcacgagagggaggagaggagcaggggaagggaggagagaggaggaagagaggaggaagagaggcgagggaaagaggaacgaaagacaaggggagacgggaggggaggaggagagagggcgaagagagagggaagatgaaagagcagcagaaaaagacagacaacaaagagcagaaaaaaaaaaaacgccgaaagagagaaggagagagacgacgcaagaggaggaagccgaacagacgagcaaaaaggcagagaaatgacaaggacacagggaaa

SEQ ID NO: 415355 - DNA, 2630 bp, Homo sapiens
ggccatcgctagctgggggcggggccggaagctctttccccgcgactgcgccacgtctgaggcggctgtggccacgtctgaggcggctgtggccgcgtcggtgtccgcgtcgaggagccggggcagggcacgatggcggactgggctcgggctcagagcccgggcgctgtggaagagattctagaccgggagaacaagcgaatggctgacagcctggcctccaaagtcaccaggctcaaatcgctcgccctggacatcgatagggatgcagaggatcagaaccggtacctggatggcatggactcggatttcacaagcatgaccagcctgcttacagggagcgtgaagcgcttttccacaatggcaaggtccggacaagacaaccggaagcttctatgtggcatggccgtgggtctaattgtggccttcttcatcctctcctacttcttgtccagggcaaggacgtgagccagtgggagctggtgtctgtgggtgccaagggcagccagggtcttccctgcctggtgttttgggctccagaggacttacctacaaaatactcctttgcaattataattgtgggtcaggaatcttcttcctgtgtggcaggaggctgcggctgcctgtgacctgatgagctcatgttggctggtcccatgtgtgaaagggactctctcggggaaaccaaggcccagcccctcccccctcccccaggtgctagagagccaggcagagctggggccacagcgtgtctggagaagccaggtctgagcagagcagctgttgaatcccagacgtggccacctgtggcttgcagcccttctccccgcgcttgggactctgacatcttaaggctgcacggtcgtgtccttgtctgggtgaggccatgtctgtgatccaaggttcctggaactgacacaggaaggggctgtgaaccctaagtgggtgtcatctcctccgaccgaggcttctcaccctggagatggcagttactcctggccatggttgctgagcatgggcagaccagtggaggccaccctactgtgttatctgcgccttcgatgaagtgagacccttggggagaacgggctgtggatgaaggagtggactgcagccttggcctagccactgggctgggatcttctgggtcatgtgactgtgtatccaggagcagaaacttgtattctcaggattcaggatctacccagcaccaaagatgtattttcaggagaacagacctagaaatgggcctgtctggcatttcagagtcaggcaaagcaggcagggccagggagcttctgtgggtctacacaagaaggttcctgtgagggctatcagttgttgccttctagcttgctggtaactttggcgcctccgccaagccctgccagactcccctggctgtgatggcattctgtgccatcctccttgtccccagcctctgcaggatgccctccctacccacctctccctgggccttccctgtccactgggctggattcatgttcaaaccactggactggcagggcaacgacttcttcccacctcaagatgaggtcctcgcccccttgtcttggcataaaaacacctttaaagcatgagccatgtgcttctttgcccttctctgtcctgttccaatcttctgcctcccagtcactccctggggactatgggatcactgtccccccacctgtgtggccacaccatgtgtcctgtcaatccagaactgcctctgagctccaggctgaccacagatcagccacagcctgatgcctgcagccccactttgctcacccttcccctcccctcctccttccttccacacagcaagcctacctttctccatccatgctcaccatagcccccttccttgtgacctggaccctccattgtacctggctgagactgtcagcctcctggaggagtggggtccaccttcttcttgccctatgcagtgcaagctcacttctcacccagcaaggttgactcatctgcctccatgtctctggggctttgctgttgccctgaaacctagctgggctggtcttgctcccagcttgcttccccctcctcggatgtccctttgcaggcccctgtcgttcctccggcaccagtgtccttggctgccatggcaagctcatcaggggcttgtaccctggtcaccaagcatggtagcagctgcctgcattgtatctccatctggtcactgcaggtgccaacccttcatcccccatgttttcctgggccatggagggctgacctccgtttctggggaatgtggctgagctgtggtaaccagctacaccccaggtgctctttccatggtggtgcctgctcatcttgctgatgcaaactaggaagttaggctgcatctcggagtggctttcgctggagaggtgctttgctgtctctcagacagccctgtacacctgaccctgtaaatgagtggggtttgctgactgtaatccctgacaccagtaaaaccaaaaggactcttgggggctcagtgtgagagccagggttacctactctgccaagtgaggacaaactgctaggctgtatcccataatttcaggatgagaaacattaacaataaaaatttgtagtaaacataacctcatgaagactaa

SEQ ID NO: 415356 - DNA, 1236 bp, Homo sapiens
  misc_feature (22)..(23): n is a, c, g, or t
  misc_feature (26)..(26): n is a, c, g, or t
  misc_feature (28)..(28): n is a, c, g, or t
  misc_feature (30)..(30): n is a, c, g, or t
tatagggaatttggccctcgannagnantncttctgcctcccagtcactccctggggactatgggatcactgtccccccacctgtgtggccacaccatgtgtcctgtcaatccagaactgcctctgagctccaggctgaccacagatcagccacagcctgatgcctgcagccccactttgctcacccttcccctcccctcctccttccttccacacagcaagcctacctttctccatccatgctcaccatagcccccttccttgtgacctggaccctccattgtacctggctgagactgtcagcctcctggaggagtggggtccaccttcttcttgccctatgcagtgcaagctcacttctcacccagcaaggttgactcatctgcctccatgtctctggggctttgctgttgccctgaaacctagctgggctggtcttgctcccagcttgcttccccctcctcggatgtccctttgcaggcccctgtcgttcctccggcaccagtgtccttggctgccatggcaagctcatcaggggcttgtaccctggtcaccaagcatggtagcagctgcctgcattgtatctccatctggtcactgcaggtgccaacccttcatcccccatgttttcctgggccatggagggctgacctccgtttctggggaatgtggctgagctgtggtaaccagctacaccccaggtgctctttccatggtggtgcctgctcatcttgctgatgcaaactaggaagttaggctgcatctcggagtggctttcgctggagaggtgctttgctgtctctcagactcagtcactgtgttccctccccgcctctcttatctccatggctgtttgcagctctcccaggtactttggggtctgagctggaattcctttgtggtttgctcttctgcttctcactcttgtattaagaaggattccacaaagggagagtggcatccctgctgctgctgtgccagaccagagtttcctgaggggccctgaccctaaccctccagctcagccctgtacacctgaccctgtaaatgagtggggtttgctgactgtaatccctgacaccagtaaaaccaaaaggactcttgggggctcagtgtgagagccagggttacctactctgccaagtgaggacaaactgctaggctgtatcccataatttcaggatgagaaacattaacaataaaaatttgtagtaaacataacctcatgaagactaa

SEQ ID NO: 415357 - DNA, 2267 bp, Homo sapiens
ggccatcgctagctgggggcggggccggaagctctttccccgcgactgcgccacgtctgaggcggctgtggccacgtctgaggcggctgtggccgcgtcggtgtccgcgtcgaggagccggggcagggcacgatggcggactgggctcgggctcagagcccgggcgctgtggaagagattctagaccgggagaacaagcgaatggctgacagcctggcctccaaagtcaccaggctcaaatcgctcgccctggacatcgatagggatgcagaggatcagaaccggtacctggatggcatggactcggatttcacaagcatgaccagcctgcttacagggagcgtgaagcgcttttccacaatggcaaggtccggacaagacaaccggaagcttctatgtggcatggccgtgggtctaattgtggccttcttcatcctctcctacttcttgtccagggcaaggacgtgagccagtgggagctggtgtctgtgggtgccaagggcagccagggtcttccctgcctggtgttttgggctccagaggacttacctacaaaatactcctttgcaattataattgtgggtcaggaatcttcttcctgtgtggcaggaggctgcggctgcctgtgacctgatgagctcatgttggctggtcccatgtgtgaaagggactctctcggggaaaccaaggcccagcccctcccccctcccccaggtgctagagagccaggcagagctggggccacagcgtgtctggagaagccaggtctgagcagagcagctgttgaatcccagacgtggccacctgtggcttgcagcccttctccccgcgcttgggactctgacatcttaaggctgcacggtcgtgtccttgtctgggtgaggccatgtctgtgatccaaggttcctggaactgacacaggaaggggctgtgaaccctaagtgggtgtcatctcctccgaccgaggcttctcaccctggagatggcagttactcctggccatggttgctgagcatgggcagaccagtggaggccaccctactgtgttatctgcgccttcgatgaagtgagacccttggggagaacgggctgtggatgaaggagtggactgcagccttggcctagccactgggctgggatcttctgggtcatgtgactgtgtatccaggagcagaaacttgtattctcaggattcaggatctacccagcaccaaagatgtattttcaggagaacagacctagaaatgggcctgtctggcatttcagagtcaggcaaagcaggcagggccagggagcttctgtgggtctacacaagaaggttcctgtgagggctatcagttgttgccttctagcttgctggtaactttggcgcctccgccaagccctgccagactcccctggctgtgatggcattctgtgccatcctccttgtccccagcctctgcaggatgccctccctacccacctctccctgggccttccctgtccactgggctggattcatgttcaaaccactggactggcagggcaacgacttcttcccacctcaagatgaggtcctcgcccccttgtcttggcataaaaacacctttaaagcatgagccatgtgcttctttgcccttctctgtcctgttccaatcttctgcctcccagtcactccctggggactatgggatcactgtccccccacctgtgtggccacaccatgtgtcctgtcaatccagaactgcctctgagctccaggctgaccacagatcagccacagcctgatgcctgcagccccactttgctcacccttcccctcccctcctccttccttccacacagcaagcctacctttctccatccatgctcaccatagcccccttccttgtgacctggaccctccattgtacctggctgagactgtcagcctcctggaggagtggggtccaccttcttcttgccctatgcagtgcaagctcacttctcacccagcaaggttgactcatctgcctccatgtctctggggctttgctgttgccctgaaacctagcttgccagacaggcccatttctaggtctgttctcctgaaaatacatctttggtgctgggtagatcctgaatcctgagaatacaagtttctgctcctggatacacagtcacatgactcagaagatcccagcccagtggctagcccaaggctgcagtccactccttcatccacagcccgttctccccaagggtctcacttcatcgaaggcgccgataacacagtagggtggcct

SEQ ID NO: 415358 - DNA, 2152 bp, Homo sapiens
ggccatcgctagctgggggcggggccggaagctctttccccgcgactgcgccacgtctgaggcggctgtggccacgtctgaggcggctgtggccgcgtcggtgtccgcgtcgaggagccggggcagggcacgatggcggactgggctcgggctcagagcccgggcgctgtggaagagattctagaccgggagaacaagcgaatggctgacagcctggcctccaaagtcaccaggctcaaatcgctcgccctggacatcgatagggatgcagaggatcagaaccggtacctggatggcatggactcggatttcacaagcatgaccagcctgcttacagggagcgtgaagcgcttttccacaatggcaaggtccggacaagacaaccggaagcttctatgtggcatggccgtgggtctaattgtggccttcttcatcctctcctacttcttgtccagggcaaggacgtgagccagtgggagctggtgtctgtgggtgccaagggcagccagggtcttccctgcctggtgttttgggctccagaggacttacctacaaaatactcctttgcaattataattgtgggtcaggaatcttcttcctgtgtggcaggaggctgcggctgcctgtgacctgatgagctcatgttggctggtcccatgtgtgaaagggactctctcggggaaaccaaggcccagcccctcccccctcccccaggtgctagagagccaggcagagctggggccacagcgtgtctggagaagccaggtctgagcagagcagctgttgaatcccagacgtggccacctgtggcttgcagcccttctccccgcgcttgggactctgacatcttaaggctgcacggtcgtgtccttgtctgggtgaggccatgtctgtgatccaaggttcctggaactgacacaggaaggggctgtgaaccctaagtgggtgtcatctcctccgaccgaggcttctcaccctggagatggcagttactcctggccatggttgctgagcatgggcagaccagtggaggccaccctactgtgttatctgcgccttcgatgaagtgagacccttggggagaacgggctgtggatgaaggagtggactgcagccttggcctagccactgggctgggatcttctgggtcatgtgactgtgtatccaggagcagaaacttgtattctcaggattcaggatctacccagcaccaaagatgtattttcaggagaacagacctagaaatgggcctgtctggcatttcagagtcaggcaaagcaggcagggccagggagcttctgtgggtctacacaagaaggttcctgtgagggctatcagttgttgccttctagcttgctggtaactttggcgcctccgccaagccctgccagactcccctggctgtgatggcattctgtgccatcctccttgtccccagcctctgcaggatgccctccctacccacctctccctgggccttccctgtccactgggctggattcatgttcaaaccactggactggcagggcaacgacttcttcccacctcaagatgaggtcctcgcccccttgtcttggcataaaaacacctttaaagcatgagccatgtgcttctttgcccttctctgtcctgttccaatcttctgcctcccagtcactccctggggactatgggatcactgtccccccacctgtgtggccacaccatgtgtcctgtcaatccagaactgcctctgagctccaggctgaccacagatcagccacagctgtttgcagctctcccaggtactttggggtctgagctggaattcctttgtggtttgctcttctgcttctcactcttgtattaagaaggattccacaaagggagagtggcatccctgctgctgctgtgccagaccagagtttcctgaggggccctgaccctaaccctccagctcagccctgtacacctgaccctgtaaatgagtggggtttgctgactgtaatccctgacaccagtaaaaccaaaaggactcttgggggctcagtgtgagagccagggttacctactctgccaagtgaggacaaactgctaggctgtatcccataatttcaggatgagaaacattaacaataaaaatttgtagtaaacataacctcatgaagactaa

SEQ ID NO: 415359 - DNA, 1975 bp, Homo sapiens
ggccatcgctagctgggggcggggccggaagctctttccccgcgactgcgccacgtctgaggcggctgtggccacgtctgaggcggctgtggccgcgtcggtgtccgcgtcgaggagccggggcagggcacgatggcggactgggctcgggctcagagcccgggcgctgtggaagagattctagaccgggagaacaagcgaatggctgacagcctggcctccaaagtcaccaggctcaaatcgctcgccctggacatcgatagggatgcagaggatcagaaccggtacctggatggcatggactcggatttcacaagcatgaccagcctgcttacagggagcgtgaagcgcttttccacaatggcaaggtccggacaagacaaccggaagcttctatgtggcatggccgtgggtctaattgtggccttcttcatcctctcctacttcttgtccagggcaaggacgtgagccagtgggagctggtgtctgtgggtgccaagggcagccagggtcttccctgcctggtgttttgggctccagaggacttacctacaaaatactcctttgcaattataattgtgggtcaggaatcttcttcctgtgtggcaggaggctgcggctgcctgtgacctgatgagctcatgttggctggtcccatgtgtgaaagggactctctcggggaaaccaaggcccagcccctcccccctcccccaggtgctagagagccaggcagagctggggccacagcgtgtctggagaagccaggtctgagcagagcagctgttgaatcccagacgtggccacctgtggcttgcagcccttctccccgcgcttgggactctgacatcttaaggctgcacggtcgtgtccttgtctgggtgaggccatgtctgtgatccaaggttcctggaactgacacaggaaggggctgtgaaccctaagtgggtgtcatctcctccgaccgaggcttctcaccctggagatggcagttactcctggccatggttgctgagcatgggcagaccagtggaggccaccctactgtgttatctgcgccttcgatgaagtgagacccttggggagaacgggctgtggatgaaggagtggactgcagccttggcctagccactgggctgggatcttctgggtcatgtgactgtgtatccaggagcagaaacttgtattctcaggattcaggatctacccagcaccaaagatgtattttcaggagaacagacctagaaatgggcctgtctggcatttcagagtcaggcaaagcaggcagggccagggagcttctgtgggtctacacaagaaggttcctgtgagggctatcagttgttgccttctagcttgctggtaactttggcgcctccgccaagccctgccagactcccctggctgtgatggcattctgtgccatcctccttgtccccagcctctgcaggatgccctccctacccacctctccctgggccttccctgtccactgggctggattcatgttcaaaccactggactggcagggcaacgacttcttcccacctcaagatgaggtcctcgcccccttgtcttggcataaaaacacctttaaagcatgagccatgtgcttctttgcccttctctgtcctgttccaatcttctgcctcccagtcactccctggggactatgggatcactgtccccccacctgtgtggccacaccatgtgtcctgtcaatccagaactgcctctgagctccaggctgaccacagatcagccacagcctgatgcctgcagccccactttgctcacccttcccctcccctcctccttccttccacacagcaagcctacctttctccatccatgctcaccatagcccccttccttgtgacctggactcatgctggtggaatgtgctctggggggggtccttttttgccttggggagcattcccgggtggctctgccggtggggtgggggcgacctggg

SEQ ID NO: 415360 - DNA, 2013 bp, Homo sapiens
ggccatcgctagctgggggcggggccggaagctctttccccgcgactgcgccacgtctgaggcggctgtggccacgtctgaggcggctgtggccgcgtcggtgtccgcgtcgaggagccggggcagggcacgatggcggactgggctcgggctcagagcccgggcgctgtggaagagattctagaccgggagaacaagcgaatggctgacagcctggcctccaaagtcaccaggctcaaatcgctcgccctggacatcgatagggatgcagaggatcagaaccggtacctggatggcatggactcggatttcacaagcatgaccagcctgcttacagggagcgtgaagcgcttttccacaatggcaaggtccggacaagacaaccggaagcttctatgtggcatggccgtgggtctaattgtggccttcttcatcctctcctacttcttgtccagggcaaggacgtgagccagtgggagctggtgtctgtgggtgccaagggcagccagggtcttccctgcctggtgttttgggctccagaggacttacctacaaaatactcctttgcaattataattgtgggtcaggaatcttcttcctgtgtggcaggaggctgcggctgcctgtgacctgatgagctcatgttggctggtcccatgtgtgaaagggactctctcggggaaaccaaggcccagcccctcccccctcccccaggtgctagagagccaggcagagctggggccacagcgtgtctggagaagccaggtctgagcagagcagctgttgaatcccagacgtggccacctgtggcttgcagcccttctccccgcgcttgggactctgacatcttaaggctgcacggtcgtgtccttgtctgggtgaggccatgtctgtgatccaaggttcctggaactgacacaggaaggggctgtgaaccctaagtgggtgtcatctcctccgaccgaggcttctcaccctggagatggcagttactcctggccatggttgctgagcatgggcagaccagtggaggccaccctactgtgttatctgcgccttcgatgaagtgagacccttggggagaacgggctgtggatgaaggagtggactgcagccttggcctagccactgggctgggatcttctgggtcatgtgactgtgtatccaggagcagaaacttgtattctcaggattcaggatctacccagcaccaaagatgtattttcaggagaacagacctagaaatgggcctgtctggcatttcagagtcaggcaaagcaggcagggccagggagcttctgtgggtctacacaagaaggttcctgtgagggctatcagttgttgccttctagcttgctggtaactttggcgcctccgccaagccctgccagactcccctggctgtgatggcattctgtgccatcctccttgtccccagcctctgcaggatgccctccctacccacctctccctgggccttccctgtccactgggctggattcatgttcaaaccactggactggcagggcaacgacttcttcccacctcaagatgaggtcctcgcccccttgtcttggcataaaaacacctttaaagcatgagccatgtgcttctttgcccttctctgtcctgttccaatcttctgcctcccagtcactccctggggactatgggatcactgtccccccacctgtgtggccacaccatgtgtcctgtcaatccagaactgcctctgagctccaggctgaccacagatcagccacagcctgatgcctgcagccccactttgctcacccttccagccctgtacacctgaccctgtaaatgagtggggtttgctgactgtaatccctgacaccagtaaaaccaaaaggactcttgggggctcagtgtgagagccagggttacctactctgccaagtgaggacaaactgctaggctgtatcccataatttcaggatgagaaacattaacaataaaaatttgtagtaaacataacctcatgaagactaa

SEQ ID NO: 415361 - DNA, 909 bp, Homo sapiens
gtgagcacaggattagggctaacgttacaggttaacagcatctcaaagcagaacaatttttctttgtacagatcaagatggagtttcttttgtcttccttttctaggtaggcacagtaacagtctgatctttgccccacactcacccacttcctgctgtgttacccttccctgcccaagttcctgaaacgcagatggggatcctgatagcatcaccacttagggaataagtgagttggccgggcgcggtggctcatgcctgtaatctcaacactttgggaagtcaaggtgagtgaatcacaaggtcaggagttcgagaccatcctgaccaacatggtgaaaccccgtctctactaaaaatacaaaaattagctgggtgtggtggcacgtgcctataatcccagctactcaggaggctgaggcagcagaattgcttgaacctggcagacggaggttgcagcgagctgagattgtgccattgcactccagcctgggcgacagagcgagactctgtctcagaaaaaaaaagaaaaaaaagagagtaaacatgaagtgcttcgaatacacagcctggcacgatcacagcgaagtgaaggtcagcagttgtactgtgctttatacaggtgcaggtgatggtcctaccagtgtgtctgttgaggtcacccgtcctaaagtgacctccctgaaagcctgagttgaaatccagactccacttcttgaggcctggccttggactcttgggcagcctctggaaatcctcctcttcaggcccagcggataccccaccttccctgtccatgtcttccttgtactccctgtattacccattgatgtgtaacaggtcaccctaaaacttcacctaaaatagcaatgatttatcatgtctcattgaatttgagacggggcacgc

SEQ ID NO: 415362 - DNA, 557 bp, Homo sapiens
  misc_feature (46)..(46): n is a, c, g, or t
  misc_feature (48)..(48): n is a, c, g, or t
tggctaggtcgaggccggtgctaatcggccgagggcacgctgaggngntgtggcggctgtggccgcgtcggtgtccgcgtcgaggagccggggcagggcacgatggcggactgggctcgggctcagagcccgggcgctgtggaagagattctagaccgggagaacaagcgaatggctgacagcctggcctccaaagtcaccaggctcaaatcgctcgccctggacatcgatagggatgcagaggatcagaaccggtacctggatggcatggtgcaggtgatggtcctaccagtgtgtctgttgaggtcacccgtcctaaagtgacctccctgaaagcctgagttgaaatccagactccacttcttgaggcctggccttggactcttgggcagcctctggaaatcctcctcttcaggcccagcggataccccaccttccctgtccatgtcttccttgtactccctgtattacccattgatgtgtaacaggtcaccctaaaacttcacctaaaatagcaatgatttatcatgtctcattgaatttgagacggggcacgc

SEQ ID NO: 415363 - DNA, 1433 bp, Homo sapiens
gcgttccgccgggagcaggcgctggcgcagagcaggggtttcagtttctggcgcgaacttccgccgttccgaagttgcacggtgaattggcgctatgtctggggacagcagcggccgcgggccagagggccggggccggggccgcgacccgcatcgggatcgcacccgctcccgctcccgctcgcggtcccctttgtcgcccaggtcccgccgcggctctgcgcgggagcgcagagaggccccagagcgcccgagcctggaggacacagagccgtcggattccggggacgagatgatggacccggccagcttggaggcggaggccgaccaaggcctgtgccgccagatccgccatcagtaccgggcgctcatcaactccgtccaacaaaaccgtgaggacatactgaatgccggtgacaaattaacagaggtccttgaagaggctaacactctgtttaatgaagtgtcccgagcaagagaagcagtcctggatgcccactttcttgttttggcttcagatttgggcaaagagaaagcaaagcagctgcgctcagacctgagctcctttgacatgttaagatatgttgaaactctactcacacatatgggtgtaaatccgctagaagctgaagaactcatccgtgatgaagatagtcctgattttgaattcatagtctatgactcctggaagataacaggcagaacagcagaaaacacctttaataaaacccatacattccactttctgttgggttcaatatacggagagtgccctgtgccaaagccacgagttgatcgtccaagaaaagttcctgtgatacaagaggagagggcaatgcctgcccagttaagaagaatggaagaatctcatcaagaagcaacagagaaagaagtagaaagaatcttgggattgttgcagacatattttcgagaagatcctgataccccaatgtccttctttgactttgtggttgatcctcattctttcccccgtacagtggaaaacatctttcatgtttccttcattatacgggatggttttgcaagaataagacttgaccaagaccgactgccagtaatagagcctgttagtattaatgaagaaaatgagggatttgaacataacacacaagttagaaatcaaggaattatagctttgagttaccgtgactgggaggagattgtgaagacctttgagatttcagagcctgtgattactccaagtcagaggcagcagaagccaagtgcttgatgctagctgaaggactcaaatggatagtgaagtccaaaacggaaagcggcatgtattgtacatattgtatgattcaacatttttaaaggcagattgtttttagtaaaatgtagcttttgatagttaataaatttgtcatggttgtctttgattaaaggaaactcaccgccatattcacaaa

SEQ ID NO: 415364 - DNA, 2982 bp, Homo sapiens
  misc_feature (989)..(989): n is a, c, g, or t
  misc_feature (995)..(995): n is a, c, g, or t
  misc_feature (1045)..(1045): n is a, c, g, or t
  misc_feature (1066)..(1066): n is a, c, g, or t
  misc_feature (1072)..(1072): n is a, c, g, or t
  misc_feature (1076)..(1076): n is a, c, g, or t
  misc_feature (1080)..(1080): n is a, c, g, or t
  misc_feature (1088)..(1088): n is a, c, g, or t
  misc_feature (1105)..(1105): n is a, c, g, or t
  misc_feature (1112)..(1112): n is a, c, g, or t
  misc_feature (1149)..(1149): n is a, c, g, or t
gcgttccgccgggagcaggcgctggcgcagagcaggggtttcagtttctggcgcgaacttccgccgttccgaagttgcacggtgaattggcgctatgtctggggacagcagcggccgcgggccagagggccggggccggggccgcgacccgcatcgggatcgcacccgctcccgctcccgctcgcggtcccctttgtcgcccaggtcccgccgcggctctgcgcgggagcgcagagaggccccagagcgcccgagcctggaggacacagagccgtcggattccggggacgagatgatggacccggccagcttggaggcggaggccgaccaaggcctgtgccgccagatccgccatcagtaccgggcgctcatcaactccgtccaacaaaaccgtgaggacatactgaatgccggtgacaaattaacagaggtccttgaagaggctaacactctgtttaatgaagtgtcccgagcaagagaagcagtcctggatgcccactttcttgttttggcttcagatttgggcaaagagaaagcaaagcagctgcgctcagacctgagctcctttgacatgttaagatatgttgaaactctactcacacatatgggtgtaaatccgctagaagctgaagaactcatccgtgatgaagatagtcctgattttgaattcatagtctatgactcctggaagataacaggcagaacagcagaaaacacctttaataaaacccatacattccactttctgtaagattattttaaaaatccaacagaccagttatttgtgaaccttaaattgctttttcttgtagggacaaagattatttggtattgtagaggtgacagtcatgatgccgttgtttggagacttttgaaactttgatatgaaagttcataaacactaggccgggtgtggtggctcatgcctgtaatcccggcactttggcaggtggatgcaggtagatcatctgagctcaggaattcaagancagccngggcaacatggcgagaacccatctctaccaaaaatacaaaaaattagccngctgtagtggcccatgcctgnggtccnggcnactngggaggcngaggtgggaggatcacntgagccngggaggcagagattgcagtgagctgagattgcgccantgcactccggcctggctgacagtgagaccctgtctcaaaaaagaaaaaaaagtccataaactctagatgtggatggaaccttaaaggatctctcattctgctttagcagaaaaggccagaacctctttaccagtgctctcctggctcctttgcttctagctcatgagactctgggtttatcatctttaaaatccttatcatataggaggatgatacctcctactgagggtatcttatgagtctcccaacgtctaaagtgacatttattataataccctgttagatgaccactgacttgtatttgaagattacttgtcactgccacataaactgtccagttcattttttagatagaactctgatttaaaaaaaagatttctttatatttgaatgaagttggcttctgtcttaacttcctggcatggtcctatggagaaattaagaacagctcttactggctcttctctaagaggaccttcaagtatactggttttgttgcccagtaaatactttagggtagccatctgagttttcagtccttctttaagtggtatagctcctgggcttttgtcttttctaatttgtctttctaaaaaccattgagattgatagtagctcgggtagaaggccttggagatgccaatgtagtagtgtggtgtggggtctggcatctatttttaataagacttcaggtaactcaggtgcccagagccatttgtgtatgttctatttaataggatgtagtccaaacttcttcatcttaggataaagtctaaatctttgttttttgctattgtactaaactcataaatcctaggttataaagataaagccttaaactttatctcatcatccagcccaatttccagccacaatgaagtacttaaaactctgtgtctttgtacttgctgttctcttggcctccaattccttttcatcttttccattcggtaaagtttgtttatcccacaggccccatcttggaagcctccagcaacttctccagacagaggtgttagcagtgtaggatcagatttctcaaccacgtcactcccatgtctgggtagatatctctgcccaagtgttctcatagcacttgagcagtactctctaagcgcccaggatctaccatgttgcttttttaaaatttgattaatttatttttttatactgctccttgtggagcaggagtgttcccagagtagcccaccatgttatattgaaatggatctgtgtgcataatgcagctgtccatctacatcgtatatttttgtctcctcaagggtagggaccacatgagccttattcttggggctttgatctctacatgatgcagacttacatctattactgtaacccaagtctgcatgagggcagaatccagaaggaaaaggaatcccatggctgtgacttgccctgttatcctaagacagatgtgttctgtagtcctgggctgggagcctctgccttggcctccccagatcaaagtcttctgaccccactggagcttccccacatacatgttcatccttcccctgctcttagaagttggctttgcaaaacaataggttgggtggtgggaagatgtcacaggcatattcactggcctactttacagggcagtatgtaggtgtctgaggaggtatctgtggttgagtaaagctcctaggagttcttttagaaatacaaagaaggcagaaaggctgtcacaaaccttatcaagagtcttactctgatgtcagcttgtatatcactgatgtctggtctgaatttgactataccatgcaaactacttttagttagtaaagttagtttgtttaacaaacaacaggc

SEQ ID NO: 415365 - DNA, 1290 bp, Homo sapiens
  misc_feature (1290)..(1290): n is a, c, g, or t
gcgttccgccgggagcaggcgctggcgcagagcaggggtttcagtttctggcgcgaacttccgccgttccgaagttgcacggtgaattggcgctatgtctggggacagcagcggccgcgggccagagggccggggccggggccgcgacccgcatcgggatcgcacccgctcccgctcccgctcgcggtcccctttgtcgcccaggtcccgccgcggctctgcgcgggagcgcagagaggccccagagcgcccgagcctggaggacacagagccgtcggattccggggacgagatgatggacccggccagcttggaggcggaggccgaccaaggcctgtgccgccagatccgccatcagtaccgggcgctcatcaactccgtccaacaaaaccgtgaggacatactgaatgccggtgacaaattaacagaggtccttgaagaggctaacactctgtttaatgaagtgtcccgagcaagagaagcagtcctggatgcccactttcttgttttggcttcagatttgggcaaagagaaagcaaagcagctgcgctcagacctgagctcctttgacatgttaagatatgttgaaactctactcacacatatgggtgtaaatccgctagaagctgaagaactcatccgtgatgaagatagtcctgattttgaattcatagtctatgactcctggaagataacaggcagaacagcagaaaacacctttaataaaacccatacattccactttctgttgggttcaatatacggagagtgccctgtgccaaagccacgagttgatcgtccaagaaaagttcctgtgatacaagaggagagggcaatgcctgcccagttaagaagaatggaagaatctcatcaagaagcaacagagaaagaagtagaaagaatcttgggattgttgcagacatattttcgagaagatcgagacagtctcactctttcgcccagactggaatgcagtggcaccatctcaactcactgcaacctccacctcctggattcaagcaattctcctgcctcagcctcctgagtagctgggattacaggcgcacgcgccaccacatctggctaattttttttctgtatttttagtagagacattgtttcgccatgttggccaagctagtcttgaacccctgacctcaggtgatctgccagcatcggcctcccaaagtgctgggattacaggtgtgagtgccatgcccagctggatgattaagttctttatagcattttactcttgtataaattgctgaagtaaaaaatcttagtatn

SEQ ID NO: 415366 - DNA, 392 bp, Homo sapiens
  misc_feature (16)..(16): n is a, c, g, or t
ctaattctcttttttnccaatgggttttttccccttccattatacgggatggttttgcaagaataagacttgaccaagaccgactgccagtaatagagcctgttagtattaatgaagaaaatgagggatttgaacataacacacaagttagaaatcaaggaattatagctttgagttaccgtgactgggaggagattgtgaagacctttgagatttcagagcctgtgattactccaagtcagaggcagcagaagccaagtgcttgatgctagctgaaggactcaaatggatagtgaagtccaaaacggaaagcggcatgtattgtacatattgtatgattcaacatttttaaaggcagattgtttttagtaaaatgtagcttttgatagtta

SEQ ID NO: 415367 - DNA, 488 bp, Homo sapiens
gtagtgcagacagttgtgggtgggaatcagaagacctagattctatcggctatgccccttactttatttatttatttttgccccttactttaaaaccttgggcaagtcacttaatctcacccaacttctaaaaaaaaaaaaaaaaaaaagaaaaaagaagaagggaataaatatggaataaatttaagatatataatgtggattaacctgggccctactcactgaggagggctaattgttggatttaatttatgtatattatatgaacttttggtttatcatttataaactgttaaccagctattcttcccctttttaggactcaaatggatagtgaagtccaaaacggaaagcggcatgtattgtacatattgtatgattcaacatttttaaaggcagattgtttttagtaaaatgtagcttttgatagttaataaatttgtcatggttgtctttgattaaaggaaactcaccgccatattcacaaa

SEQ ID NO: 415368 - DNA, 2285 bp, Homo sapiens
gcgttccgccgggagcaggcgctggcgcagagcaggggtttcagtttctggcgcgaacttccgccgttccgaagttgcacggtgaattggcgctatgtctggggacagcagcggccgcgggccagagggccggggccggggccgcgacccgcatcgggatcgcacccgctcccgctcccgctcgcggtcccctttgtcgcccaggtcccgccgcggctctgcgcgggagcgcagagaggccccagagcgcccgagcctggaggacacagagccgtcggattccggggacgagatgatggacccggccagcttggaggcggaggccgaccaaggcctgtgccgccagatccgccatcagtaccgggcgctcatcaactccgtccaacaaaaccgtgaggacatactgaatgccggtgacaaattaacagaggtccttgaagaggctaacactctgtttaatgaagtgtcccgagcaagagaagcagtcctggatgcccactttcttgttttggcttcagatttgggcaaagagaaagcaaagcagctgcgctcagacctgagctcctttgacatgttaagatatgttgaaactctactcacacatatgggtgtaaatccgctagaagctgaagaactcatccgtgatgaagatagtcctgattttgaattcatagtctatgactcctggaagataacaggcagaacagcagaaaacacctttaataaaacccatacattccactttctgttgggttcaatatacggagagtgccctgtgccaaagccacgagttgatcgtccaagaaaagttcctgtgatacaagaggagagggcaatgcctgcccagttaagaagaatggaagaatctcatcaagaagcaacagagaaagaagtagaaagaatcttgggattgttgcagacatattttcgagaagatcctgataccccaatgtccttctttgactttgtggttgatcctcattctttcccccgtacagtggaaaacatctttcatgtttccttcattatacgggatggttttgcaagaataagacttgaccaagaccgactgccagtaataggtaaatgatactatgtttggaaaaattagttttagagaaaatatatttgttagtagaatttaagtattttactaaatgtaaatgaattttcaatgtagattaacttttacaatattgtatcttgctcaactacctgaagatactgaaaacatggccagcgtctaaaattttgatggattcatctatatcattgattcaacatctgctgtaaatattaacaaagaaatgatataatttccctcagatcttaatttagaaagttggtgattgcagtcatttttgtagtatccctctttctaatcacgttttgtcagatgccggcaccttcttttctctttgaggttctatgaatctttcattcttacctgaataatttcacactctccattactcatgtcctcctaaggtctcctgtggagagtgaatatttccatcgcacttacttgctactttcaatgttctcaatgtcctattggactcactagggcttagctctgtggttgacacatagatatgcagattttcaaatgtctggaatgtgttactctactacatgttttttgaaatggaaacagatggaatgactggctactgtaataatactacagcagctccataatgcatgaaatcctaaaaagtatgtaatattataagtatcttttcaatacaggtttcattgctattattcatcagtttccgtttagattacctgttccgatttaataacctttgataaatttgaaaaatttgtctttcaaacagagcctgttagtattaatgaagaaaatgagggatttgaacataacacacaagttagaaatcaaggaattatagctttgagttaccgtgactgggaggtaaagctctgcctgttgcccctgcatagttctgactctgccttcacttgcagtaagcccagtgcctaaatgttcattattgtctgccaggagattgtgaagacctttgagatttcagagcctgtgattactccaagtcagaggcagcagaagccaagtgcttgatgctagctgaaggactcaaatggatagtgaagtccaaaacggaaagcggcatgtattgtacatattgtatgattcaacatttttaaaggcagattgtttttagtaaaatgtagcttttgatagttaataaatttgtcatggttgtctttgattaaaggaaactcaccgccatattcacaaa

SEQ ID NO: 415369 - DNA, 2230 bp, Homo sapiens
gcgttccgccgggagcaggcgctggcgcagagcaggggtttcagtttctggcgcgaacttccgccgttccgaagttgcacggtgaattggcgctatgtctggggacagcagcggccgcgggccagagggccggggccggggccgcgacccgcatcgggatcgcacccgctcccgctcccgctcgcggtcccctttgtcgcccaggtcccgccgcggctctgcgcgggagcgcagagaggccccagagcgcccgagcctggaggacacagagccgtcggattccggggacgagatgatggacccggccagcttggaggcggaggccgaccaaggcctgtgccgccagatccgccatcagtaccgggcgctcatcaactccgtccaacaaaaccgtgaggacatactgaatgccggtgacaaattaacagaggtccttgaagaggctaacactctgtttaatgaagtgtcccgagcaagagaagcagtcctggatgcccactttcttgttttggcttcagatttgggcaaagagaaagcaaagcagctgcgctcagacctgagctcctttgacatgttaagatatgttgaaactctactcacacatatgggtgtaaatccgctagaagctgaagaactcatccgtgatgaagatagtcctgattttgaattcatagtctatgactcctggaagataacaggcagaacagcagaaaacacctttaataaaacccatacattccactttctgttgggttcaatatacggagagtgccctgtgccaaagccacgagttgatcgtccaagaaaagttcctgtgatacaagaggagagggcaatgcctgcccagttaagaagaatggaagaatctcatcaagaagcaacagagaaagaagtagaaagaatcttgggattgttgcagacatattttcgagaagatcctgataccccaatgtccttctttgactttgtggttgatcctcattctttcccccgtacagtggaaaacatctttcatgtttccttcattatacgggatggttttgcaagaataagacttgaccaagaccgactgccagtaataggtaaatgatactatgtttggaaaaattagttttagagaaaatatatttgttagtagaatttaagtattttactaaatgtaaatgaattttcaatgtagattaacttttacaatattgtatcttgctcaactacctgaagatactgaaaacatggccagcgtctaaaattttgatggattcatctatatcattgattcaacatctgctgtaaatattaacaaagaaatgatataatttccctcagatcttaatttagaaagttggtgattgcagtcatttttgtagtatccctctttctaatcacgttttgtcagatgccggcaccttcttttctctttgaggttctatgaatctttcattcttacctgaataatttcacactctccattactcatgtcctcctaaggtctcctgtggagagtgaatatttccatcgcacttacttgctactttcaatgttctcaatgtcctattggactcactagggcttagctctgtggttgacacatagatatgcagattttcaaatgtctggaatgtgttactctactacatgttttttgaaatggaaacagatggaatgactggctactgtaataatactacagcagctccataatgcatgaaatcctaaaaagtatgtaatattataagtatcttttcaatacaggtttcattgctattattcatcagtttccgtttagattacctgttccgatttaataacctttgataaatttgaaaaatttgtctttcaaacagagcctgttagtattaatgaagaaaatgagggatttgaacataacacacaagttagaaatcaaggaattatagctttgagttaccgtgactgggaggtaaagctctgcctgttgcccctgcatagttctgactctgccttcacttgcagtaagcccagtgcctaaatgttcattattgtctgccaggagattgtgaagacctttgagatttcagagcctgtgattactccaagtcagaggcagcagaagccaagtgcttgatgctagctgaaggactcaaatggatagtgaagtccaaaacggaaagcggcatgtattgtacatattgtatgattcaacatttttaaaggcagattgtttttagtaaaatgtagcttttgatagtta

SEQ ID NO: 415370 - DNA, 2447 bp, Homo sapiens
gcgttccgccgggagcaggcgctggcgcagagcaggggtttcagtttctggcgcgaacttccgccgttccgaagttgcacggtgaattggcgctatgtctggggacagcagcggccgcgggccagagggccggggccggggccgcgacccgcatcgggatcgcacccgctcccgctcccgctcgcggtcccctttgtcgcccaggtcccgccgcggctctgcgcgggagcgcagagaggccccagagcgcccgagcctggaggacacagagccgtcggattccggggacgagatgatggacccggccagcttggaggcggaggccgaccaaggcctgtgccgccagatccgccatcagtaccgggcgctcatcaactccgtccaacaaaaccgtgaggacatactgaatgccggtgacaaattaacagaggtccttgaagaggctaacactctgtttaatgaagtgtcccgagcaagagaagcagtcctggatgcccactttcttgttttggcttcagatttgggcaaagagaaagcaaagcagctgcgctcagacctgagctcctttgacatgttaagatatgttgaaactctactcacacatatgggtgtaaatccgctagaagctgaagaactcatccgtgatgaagatagtcctgattttgaattcatagtctatgactcctggaagataacaggcagaacagcagaaaacacctttaataaaacccatacattccactttctgttgggttcaatatacggagagtgccctgtgccaaagccacgagttgatcgtccaagaaaagttcctgtgatacaagaggagagggcaatgcctgcccagttaagaagaatggaagaatctcatcaagaagcaacagagaaagaagtagaaagaatcttgggattgttgcagacatattttcgagaagatcctgataccccaatgtccttctttgactttgtggttgatcctcattctttcccccgtacagtggaaaacatctttcatgtttccttcattatacgggatggttttgcaagaataagacttgaccaagaccgactgccagtaataggtaaatgatactatgtttggaaaaattagttttagagaaaatatatttgttagtagaatttaagtattttactaaatgtaaatgaattttcaatgtagattaacttttacaatattgtatcttgctcaactacctgaagatactgaaaacatggccagcgtctaaaattttgatggattcatctatatcattgattcaacatctgctgtaaatattaacaaagaaatgatataatttccctcagatcttaatttagaaagttggtgattgcagtcatttttgtagtatccctctttctaatcacgttttgtcagatgccggcaccttcttttctctttgaggttctatgaatctttcattcttacctgaataatttcacactctccattactcatgtcctcctaaggtctcctgtggagagtgaatatttccatcgcacttacttgctactttcaatgttctcaatgtcctattggactcactagggcttagctctgtggttgacacatagatatgcagattttcaaatgtctggaatgtgttactctactacatgttttttgaaatggaaacagatggaatgactggctactgtaataatactacagcagctccataatgcatgaaatcctaaaaagtatgtaatattataagtatcttttcaatacaggtttcattgctattattcatcagtttccgtttagattacctgttccgatttaataacctttgataaatttgaaaaatttgtctttcaaacagagcctgttagtattaatgaagaaaatgagggatttgaacataacacacaagttagaaatcaaggaattatagctttgagttaccgtgactgggaggtaaagctctgcctgttgcccctgcatagttctgactctgccttcacttgcagtaagcccagtgcctaaatgttcattattgtctgccaggagattgtgaagacctttgagatttcagagcctgtgattactccaagtcagaggcagcagaagccaagtgcttgatgctagctgaaggactcaaatggatagtgaagtccaaaacggaaagcggcatgtattgtacatattgtatgattcaacatttttaaaggcagattgtttttagtaaaatgtagcttttgatagttaataaatttgtcatggttgtctttgattaaaggaaactcaccgccatattcacaaataattgtagttgctctttattttctaattattggagagtgtctcctttgtctattcctgtcccagtgaaagttttacttaggttgttaatgccctgcggaccattatgattccttttacttcttttttgccacgaagctagctagtcaagtcaacaaatagg

SEQ ID NO: 415371 - DNA, 1541 bp, Homo sapiens
gcgttccgccgggagcaggcgctggcgcagagcaggggtttcagtttctggcgcgaacttccgccgttccgaagttgcacggtgaattggcgctatgtctggggacagcagcggccgcgggccagagggccggggccggggccgcgacccgcatcgggatcgcacccgctcccgctcccgctcgcggtcccctttgtcgcccaggtcccgccgcggctctgcgcgggagcgcagagaggccccagagcgcccgagcctggaggacacagagccgtcggattccggggacgagatgatggacccggccagcttggaggcggaggccgaccaaggcctgtgccgccagatccgccatcagtaccgggcgctcatcaactccgtccaacaaaaccgtgaggacatactgaatgccggtgacaaattaacagaggtccttgaagaggctaacactctgtttaatgaagtgtcccgagcaagagaagcagtcctggatgcccactttcttgttttggcttcagatttgggcaaagagaaagcaaagcagctgcgctcagacctgagctcctttgacatgttaagatatgttgaaactctactcacacatatgggtgtaaatccgctagaagctgaagaactcatccgtgatgaagatagtcctgattttgaattcatagtctatgactcctggaagataacaggcagaacagcagaaaacacctttaataaaacccatacattccactttctgttgggttcaatatacggagagtgccctgtgccaaagccacgagttgatcgtccaagaaaagttcctgtgatacaagaggagagggcaatgcctgcccagttaagaagaatggaagaatctcatcaagaagcaacagagaaagaagtagaaagaatcttgggattgttgcagacatattttcgagaagatcctgataccccaatgtccttctttgactttgtggttgatcctcattctttcccccgtacagtggaaaacatctttcatgtttccttcattatacgggatggttttgcaagaataagacttgaccaagaccgactgccagtaatagagcctgttagtattaatgaagaaaatgagggatttgaacataacacacaagttagaaatcaaggaattatagctttgagttaccgtgactgggaggagattgtgaagacctttgagatttcagagcctgtgattactccaagtcagaggcagcagaagccaagtgcttgatgctagctgaaggactcaaatggatagtgaagtccaaaacggaaagcggcatgtattgtacatattgtatgattcaacatttttaaaggcagattgtttttagtaaaatgtagcttttgatagttaataaatttgtcatggttgtctttgattaaaggaaactcaccgccatattcacaaaacaacacacacaactaacagcaacacaaaaaaaggggggcgagaacccagagcgcaacagaccccattaaaggcacacaagagataacacaacgggcaaacgagagaa

SEQ ID NO: 415372 - DNA, 2195 bp, Homo sapiens
gcgttccgccgggagcaggcgctggcgcagagcaggggtttcagtttctggcgcgaacttccgccgttccgaagttgcacggtgaattggcgctatgtctggggacagcagcggccgcgggccagagggccggggccggggccgcgacccgcatcgggatcgcacccgctcccgctcccgctcgcggtcccctttgtcgcccaggtcccgccgcggctctgcgcgggagcgcagagaggccccagagcgcccgagcctggaggacacagagccgtcggattccggggacgagatgatggacccggccagcttggaggcggaggccgaccaaggcctgtgccgccagatccgccatcagtaccgggcgctcatcaactccgtccaacaaaaccgtgaggacatactgaatgccggtgacaaattaacagaggtccttgaagaggctaacactctgtttaatgaagtgtcccgagcaagagaagcagtcctggatgcccactttcttgttttggcttcagatttgggcaaagagaaagcaaagcagctgcgctcagacctgagctcctttgacatgttaagatatgttgaaactctactcacacatatgggtgtaaatccgctagaagctgaagaactcatccgtgatgaagatagtcctgattttgaattcatagtctatgactcctggaagataacaggcagaacagcagaaaacacctttaataaaacccatacattccactttctgttgggttcaatatacggagagtgccctgtgccaaagccacgagttgatcgtccaagaaaagttcctgtgatacaagaggagagggcaatgcctgcccagttaagaagaatggaagaatctcatcaagaagcaacagagaaagaagtagaaagaatcttgggattgttgcagacatattttcgagaagatcctgataccccaatgtccttctttgactttgtggttgatcctcattctttcccccgtacagtggaaaacatctttcatgtttccttcattatacgggatggttttgcaagaataagacttgaccaagaccgactgccagtaataggtaaatgatactatgtttggaaaaattagttttagagaaaatatatttgttagtagaatttaagtattttactaaatgtaaatgaattttcaatgtagattaacttttacaatattgtatcttgctcaactacctgaagatactgaaaacatggccagcgtctaaaattttgatggattcatctatatcattgattcaacatctgctgtaaatattaacaaagaaatgatataatttccctcagatcttaatttagaaagttggtgattgcagtcatttttgtagtatccctctttctaatcacgttttgtcagatgccggcaccttcttttctctttgaggttctatgaatctttcattcttacctgaataatttcacactctccattactcatgtcctcctaaggtctcctgtggagagtgaatatttccatcgcacttacttgctactttcaatgttctcaatgtcctattggactcactagggcttagctctgtggttgacacatagatatgcagattttcaaatgtctggaatgtgttactctactacatgttttttgaaatggaaacagatggaatgactggctactgtaataatactacagcagctccataatgcatgaaatcctaaaaagtatgtaatattataagtatcttttcaatacaggtttcattgctattattcatcagtttccgtttagattacctgttccgatttaataacctttgataaatttgaaaaatttgtctttcaaacagagcctgttagtattaatgaagaaaatgagggatttgaacataacacacaagttagaaatcaaggaattatagctttgagttaccgtgactgggaggagattgtgaagacctttgagatttcagagcctgtgattactccaagtcagaggcagcagaagccaagtgcttgatgctagctgaaggactcaaatggatagtgaagtccaaaacggaaagcggcatgtattgtacatattgtatgattcaacatttttaaaggcagattgtttttagtaaaatgtagcttttgatagttaataaatttgtcatggttgtctttgattaaaggaaactcaccgccatattcacaaa

SEQ ID NO: 415373 - DNA, 1378 bp, Homo sapiens
gcgttccgccgggagcaggcgctggcgcagagcaggggtttcagtttctggcgcgaacttccgccgttccgaagttgcacggtgaattggcgctatgtctggggacagcagcggccgcgggccagagggccggggccggggccgcgacccgcatcgggatcgcacccgctcccgctcccgctcgcggtcccctttgtcgcccaggtcccgccgcggctctgcgcgggagcgcagagaggccccagagcgcccgagcctggaggacacagagccgtcggattccggggacgagatgatggacccggccagcttggaggcggaggccgaccaaggcctgtgccgccagatccgccatcagtaccgggcgctcatcaactccgtccaacaaaaccgtgaggacatactgaatgccggtgacaaattaacagaggtccttgaagaggctaacactctgtttaatgaagtgtcccgagcaagagaagcagtcctggatgcccactttcttgttttggcttcagatttgggcaaagagaaagcaaagcagctgcgctcagacctgagctcctttgacatgttaagatatgttgaaactctactcacacatatgggtgtaaatccgctagaagctgaagaactcatccgtgatgaagatagtcctgattttgaattcatagtctatgactcctggaagataacaggcagaacagcagaaaacacctttaataaaacccatacattccactttctgttgggttcaatatacggagagtgccctgtgccaaagccacgagttgatcgtccaagaaaagttcctgtgatacaagaggagagggcaatgcctgcccagttaagaagaatggaagaatctcatcaagaagcaacagagaaagaagtagaaagaatcttgggattgttgcagacatattttcgagaagatcctgataccccaatgtccttctttgactttgtggttgatcctcattctttcccccgtacagtggaaaacatctttcatgtttccttcattatacgggatggttttgcaagaataagacttgaccaagaccgactgccagtaatagagcctgttagtattaatgaagaaaatgagggatttgaacataacacacaagttagaaatcaaggaattatagctttgagttaccgtgactgggaggagattgtgaagacctttgagatttcagagcctgtgattactccaagtcagaggcagcagaagccaagtgcttgatgctagctgaaggactcaaatggatagtgaagtccaaaacggaaagcggcatgtattgtacatattgtatgattcaacatttttaaaggcagattgtttttagtaaaatgtagcttttgatagtta

SEQ ID NO: 415374 - DNA, 1338 bp, Homo sapiens
gcgttccgccgggagcaggcgctggcgcagagcaggggtttcagtttctggcgcgaacttccgccgttccgaagttgcacggtgaattggcgctatgtctggggacagcagcggccgcgggccagagggccggggccggggccgcgacccgcatcgggatcgcacccgctcccgctcccgctcgcggtcccctttgtcgcccaggtcccgccgcggctctgcgcgggagcgcagagaggccccagagcgcccgagcctggaggacacagagccgtcggattccggggacgagatgatggacccggccagcttggaggcggaggccgaccaaggcctgtgccgccagatccgccatcagtaccgggcgctcatcaactccgtccaacaaaaccgtgaggacatactgaatgccggtgacaaattaacagaggtccttgaagaggctaacactctgtttaatgaagtgtcccgagcaagagaagcagtcctggatgcccactttcttgttttggcttcagatttgggcaaagagaaagcaaagcagctgcgctcagacctgagctcctttgacatgttaagatatgttgaaactctactcacacatatgggtgtaaatccgctagaagctgaagaactcatccgtgatgaagatagtcctgattttgaattcatagtctatgactcctggaagataacaggcagaacagcagaaaacacctttaataaaacccatacattccactttctgttgggttcaatatacggagagtgccctgtgccaaagccacgagttgatcgtccaagaaaagttcctgtgatacaagaggagagggcaatgcctgcccagttaagaagaatggaagaatctcatcaagaagcaacagagaaagaagtagaaagaatcttgggattgttgcagacatattttcgagaagatcctgataccccaatgtccttctttgactttgtggttgatcctcattctttcccccgtacagtggaaaacatctttcatgtttccttcattatacgggatggttttgcaagaataagacttgaccaagaccgactgccagtaataggagattgtgaagacctttgagatttcagagcctgtgattactccaagtcagaggcagcagaagccaagtgcttgatgctagctgaaggactcaaatggatagtgaagtccaaaacggaaagcggcatgtattgtacatattgtatgattcaacatttttaaaggcagattgtttttagtaaaatgtagcttttgatagttaataaatttgtcatggttgtctttgattaaaggaaactcaccgccatattcacaaa

SEQ ID NO: 415375 - DNA, 3077 bp, Homo sapiens
gcgttccgccgggagcaggcgctggcgcagagcaggggtttcagtttctggcgcgaacttccgccgttccgaagttgcacggtgaattggcgctatgtctggggacagcagcggccgcgggccagagggccggggccggggccgcgacccgcatcgggatcgcacccgctcccgctcccgctcgcggtcccctttgtcgcccaggtcccgccgcggctctgcgcgggagcgcagagaggccccagagcgcccgagcctggaggacacagagccgtcggattccggggacgagatgatggacccggccagcttggaggcggaggccgaccaaggcctgtgccgccagatccgccatcagtaccgggcgctcatcaactccgtccaacgtaaggcggcgcctccgggcggcgcgggcccggacgggccgctgtccccgccctgcgccgggcgcggggggagggcaccggaggcaggtgccgggcggaggcccggcgcggcgttagtagagacgcgccgggtgccagcccctcgccgcaccttaaattgttgacaaagtgctcccactttgtggctggagccgtacgaccttggcgcgggtccccgagtggcgggctggaaaagctggaggccagagccgttcgcggactcgcccgagcccagccagccagtggggagaggcaggacgcggactccgcgtgctttgattgcgcccggcagtcctcggcgtgggctcccggcctcgcagcggcagctgcagctgcagcggcacgcgagagctgtcaaatgcacgttctcggaccccacccggacccgcggaattcgaatctctgggtgggtccgcgcaactgtggagtggccctccaggtgatggtgtgtattgcttgcaaagtttgagaaccactcagttatggagcactcagaggctgcagccggagtccagccctttgggttaaggttagagggagctagggtttccttttaaaattcatgctgcataaagggtagggtggcctttctccttttccgggtcattttggttaaaaagataaagatgttcgaagtaattactcagagcgcaggggccggggcttggctttactgttgcaggtgataaccttgtcaactgcttattagtgaatgctgaacaaatttcccaaagtttgtatttttaaaaatagaaaaccgtgaggacatactgaatgccggtgacaaattaacagaggtccttgaagaggctaacactctgtttaatgaagtgtcccgagcaagagaagcagtcctggatgcccactttcttgttttggcttcagatttgggcaaagagaaagcaaagcagctgcgctcagacctgagctcctttgacatgttaagatatgttgaaactctactcacacatatgggtgtaaatccgctagaagctgaagaactcatccgtgatgaagatagtcctgattttgaattcatagtctatgactcctggaagataacaggcagaacagcagaaaacacctttaataaaacccatacattccactttctgttgggttcaatatacggagagtgccctgtgccaaagccacgagttgatcgtccaagaaaagttcctgtgatacaagaggagagggcaatgcctgcccagttaagaagaatggaagaatctcatcaagaagcaacagagaaagaagtagaaagaatcttgggattgttgcagacatattttcgagaagatcctgataccccaatgtccttctttgactttgtggttgatcctcattctttcccccgtacagtggaaaacatctttcatgtttccttcattatacgggatggttttgcaagaataagacttgaccaagaccgactgccagtaataggtaaatgatactatgtttggaaaaattagttttagagaaaatatatttgttagtagaatttaagtattttactaaatgtaaatgaattttcaatgtagattaacttttacaatattgtatcttgctcaactacctgaagatactgaaaacatggccagcgtctaaaattttgatggattcatctatatcattgattcaacatctgctgtaaatattaacaaagaaatgatataatttccctcagatcttaatttagaaagttggtgattgcagtcatttttgtagtatccctctttctaatcacgttttgtcagatgccggcaccttcttttctctttgaggttctatgaatctttcattcttacctgaataatttcacactctccattactcatgtcctcctaaggtctcctgtggagagtgaatatttccatcgcacttacttgctactttcaatgttctcaatgtcctattggactcactagggcttagctctgtggttgacacatagatatgcagattttcaaatgtctggaatgtgttactctactacatgttttttgaaatggaaacagatggaatgactggctactgtaataatactacagcagctccataatgcatgaaatcctaaaaagtatgtaatattataagtatcttttcaatacaggtttcattgctattattcatcagtttccgtttagattacctgttccgatttaataacctttgataaatttgaaaaatttgtctttcaaacagagcctgttagtattaatgaagaaaatgagggatttgaacataacacacaagttagaaatcaaggaattatagctttgagttaccgtgactgggaggtaaagctctgcctgttgcccctgcatagttctgactctgccttcacttgcagtaagcccagtgcctaaatgttcattattgtctgccaggagattgtgaagacctttgagatttcagagcctgtgattactccaagtcagaggcagcagaagccaagtgcttgatgctagctgaaggactcaaatggatagtgaagtccaaaacggaaagcggcatgtattgtacatattgtatgattcaacatttttaaaggcagattgtttttagtaaaatgtagcttttgatagttaataaatttgtcatggttgtctttgattaaaggaaactcaccgccatattcacaaa

SEQ ID NO: 415376 - DNA, 2225 bp, Homo sapiens
gcgttccgccgggagcaggcgctggcgcagagcaggggtttcagtttctggcgcgaacttccgccgttccgaagttgcacggtgaattggcgctatgtctggggacagcagcggccgcgggccagagggccggggccggggccgcgacccgcatcgggatcgcacccgctcccgctcccgctcgcggtcccctttgtcgcccaggtcccgccgcggctctgcgcgggagcgcagagaggccccagagcgcccgagcctggaggacacagagccgtcggattccggggacgagatgatggacccggccagcttggaggcggaggccgaccaaggcctgtgccgccagatccgccatcagtaccgggcgctcatcaactccgtccaacgtaaggcggcgcctccgggcggcgcgggcccggacgggccgctgtccccgccctgcgccgggcgcggggggagggcaccggaggcaggtgccgggcggaggcccggcgcggcgttagtagagacgcgccgggtgccagcccctcgccgcaccttaaattgttgacaaagtgctcccactttgtggctggagccgtacgaccttggcgcgggtccccgagtggcgggctggaaaagctggaggccagagccgttcgcggactcgcccgagcccagccagccagtggggagaggcaggacgcggactccgcgtgctttgattgcgcccggcagtcctcggcgtgggctcccggcctcgcagcggcagctgcagctgcagcggcacgcgagagctgtcaaatgcacgttctcggaccccacccggacccgcggaattcgaatctctgggtgggtccgcgcaactgtggagtggccctccaggtgatggtgtgtattgcttgcaaagtttgagaaccactcagttatggagcactcagaggctgcagccggagtccagccctttgggttaaggttagagggagctagggtttccttttaaaattcatgctgcataaagggtagggtggcctttctccttttccgggtcattttggttaaaaagataaagatgttcgaagtaattactcagagcgcaggggccggggcttggctttactgttgcaggtgataaccttgtcaactgcttattagtgaatgctgaacaaatttcccaaagtttgtatttttaaaaatagaaaaccgtgaggacatactgaatgccggtgacaaattaacagaggtccttgaagaggctaacactctgtttaatgaagtgtcccgagcaagagaagcagtcctggatgcccactttcttgttttggcttcagatttgggcaaagagaaagcaaagcagctgcgctcagacctgagctcctttgacatgttaagatatgttgaaactctactcacacatatgggtgtaaatccgctagaagctgaagaactcatccgtgatgaagatagtcctgattttgaattcatagtctatgactcctggaagataacaggcagaacagcagaaaacacctttaataaaacccatacattccactttctgttgggttcaatatacggagagtgccctgtgccaaagccacgagttgatcgtccaagaaaagttcctgtgatacaagaggagagggcaatgcctgcccagttaagaagaatggaagaatctcatcaagaagcaacagagaaagaagtagaaagaatcttgggattgttgcagacatattttcgagaagatcctgataccccaatgtccttctttgactttgtggttgatcctcattctttcccccgtacagtggaaaacatctttcatgtttccttcattatacgggatggttttgcaagaataagacttgaccaagaccgactgccagtaatagagcctgttagtattaatgaagaaaatgagggatttgaacataacacacaagttagaaatcaaggaattatagctttgagttaccgtgactgggaggagattgtgaagacctttgagatttcagagcctgtgattactccaagtcagaggcagcagaagccaagtgcttgatgctagctgaaggactcaaatggatagtgaagtccaaaacggaaagcggcatgtattgtacatattgtatgattcaacatttttaaaggcagattgtttttagtaaaatgtagcttttgatagttaataaatttgtcatggttgtctttgattaaaggaaactcaccgccatattcacaaa

SEQ ID NO: 415377 - DNA, 2769 bp, Homo sapiens
gcgttccgccgggagcaggcgctggcgcagagcaggggtttcagtttctggcgcgaacttccgccgttccgaagttgcacggtgaattggcgctatgtctggggacagcagcggccgcgggccagagggccggggccggggccgcgacccgcatcgggatcgcacccgctcccgctcccgctcgcggtcccctttgtcgcccaggtcccgccgcggctctgcgcgggagcgcagagaggccccagagcgcccgagcctggaggacacagagccgtcggattccggggacgagatgatggacccggccagcttggaggcggaggccgaccaaggcctgtgccgccagatccgccatcagtaccgggcgctcatcaactccgtccaacgtaaggcggcgcctccgggcggcgcgggcccggacgggccgctgtccccgccctgcgccgggcgcggggggagggcaccggaggcaggtgccgggcggaggcccggcgcggcgttagtagagacgcgccgggtgccagcccctcgccgcaccttaaattgttgacaaagtgctcccactttgtggctggagccgtacgaccttggcgcgggtccccgagtggcgggctggaaaagctggaggccagagccgttcgcggactcgcccgagcccagccagccagtggggagaggcaggacgcggactccgcgtgctttgattgcgcccggcagtcctcggcgtgggctcccggcctcgcagcggcagctgcagctgcagcggcacgcgagagctgtcaaatgcacgttctcggaccccacccggacccgcggaattcgaatctctgggtgggtccgcgcaactgtggagtggccctccaggtgatgaaaaccgtgaggacatactgaatgccggtgacaaattaacagaggtccttgaagaggctaacactctgtttaatgaagtgtcccgagcaagagaagcagtcctggatgcccactttcttgttttggcttcagatttgggcaaagagaaagcaaagcagctgcgctcagacctgagctcctttgacatgttaagatatgttgaaactctactcacacatatgggtgtaaatccgctagaagctgaagaactcatccgtgatgaagatagtcctgattttgaattcatagtctatgactcctggaagataacaggcagaacagcagaaaacacctttaataaaacccatacattccactttctgttgggttcaatatacggagagtgccctgtgccaaagccacgagttgatcgtccaagaaaagttcctgtgatacaagaggagagggcaatgcctgcccagttaagaagaatggaagaatctcatcaagaagcaacagagaaagaagtagaaagaatcttgggattgttgcagacatattttcgagaagatcctgataccccaatgtccttctttgactttgtggttgatcctcattctttcccccgtacagtggaaaacatctttcatgtttccttcattatacgggatggttttgcaagaataagacttgaccaagaccgactgccagtaataggtaaatgatactatgtttggaaaaattagttttagagaaaatatatttgttagtagaatttaagtattttactaaatgtaaatgaattttcaatgtagattaacttttacaatattgtatcttgctcaactacctgaagatactgaaaacatggccagcgtctaaaattttgatggattcatctatatcattgattcaacatctgctgtaaatattaacaaagaaatgatataatttccctcagatcttaatttagaaagttggtgattgcagtcatttttgtagtatccctctttctaatcacgttttgtcagatgccggcaccttcttttctctttgaggttctatgaatctttcattcttacctgaataatttcacactctccattactcatgtcctcctaaggtctcctgtggagagtgaatatttccatcgcacttacttgctactttcaatgttctcaatgtcctattggactcactagggcttagctctgtggttgacacatagatatgcagattttcaaatgtctggaatgtgttactctactacatgttttttgaaatggaaacagatggaatgactggctactgtaataatactacagcagctccataatgcatgaaatcctaaaaagtatgtaatattataagtatcttttcaatacaggtttcattgctattattcatcagtttccgtttagattacctgttccgatttaataacctttgataaatttgaaaaatttgtctttcaaacagagcctgttagtattaatgaagaaaatgagggatttgaacataacacacaagttagaaatcaaggaattatagctttgagttaccgtgactgggaggtaaagctctgcctgttgcccctgcatagttctgactctgccttcacttgcagtaagcccagtgcctaaatgttcattattgtctgccaggagattgtgaagacctttgagatttcagagcctgtgattactccaagtcagaggcagcagaagccaagtgcttgatgctagctgaaggactcaaatggatagtgaagtccaaaacggaaagcggcatgtattgtacatattgtatgattcaacatttttaaaggcagattgtttttagtaaaatgtagcttttgatagttaataaatttgtcatggttgtctttgattaaaggaaactcaccgccatattcacaaa

SEQ ID NO: 415378 - DNA, 2788 bp, Homo sapiens
gcgttccgccgggagcaggcgctggcgcagagcaggggtttcagtttctggcgcgaacttccgccgttccgaagttgcacggtgaattggcgctatgtctggggacagcagcggccgcgggccagagggccggggccggggccgcgacccgcatcgggatcgcacccgctcccgctcccgctcgcggtcccctttgtcgcccaggtcccgccgcggctctgcgcgggagcgcagagaggccccagagcgcccgagcctggaggacacagagccgtcggattccggggacgagatgatggacccggccagcttggaggcggaggccgaccaaggcctgtgccgccagatccgccatcagtaccgggcgctcatcaactccgtccaacgtaaggcggcgcctccgggcggcgcgggcccggacgggccgctgtccccgccctgcgccgggcgcggggggagggcaccggaggcaggtgccgggcggaggcccggcgcggcgttagtagagacgcgccgggtgccagcccctcgccgcaccttaaattgttgacaaagtgctcccactttgtggctggagccgtacgaccttggcgcgggtccccgagtggcgggctggaaaagctggaggccagagccgttcgcggactcgcccgagcccagccagccagtggggagaggcaggacgcggactccgcgtgctttgattgcgcccggcagtcctcggcgtgggctcccggcctcgcagcggcagctgcagctgcagcggcacgcgagagctgtcaaatgcacgttctcggaccccacccggacccgcggaattcgaatctctgggtgggtccgcgcaactgtggagtggccctccaggtgatgtttgtatttttaaaaatagaaaaccgtgaggacatactgaatgccggtgacaaattaacagaggtccttgaagaggctaacactctgtttaatgaagtgtcccgagcaagagaagcagtcctggatgcccactttcttgttttggcttcagatttgggcaaagagaaagcaaagcagctgcgctcagacctgagctcctttgacatgttaagatatgttgaaactctactcacacatatgggtgtaaatccgctagaagctgaagaactcatccgtgatgaagatagtcctgattttgaattcatagtctatgactcctggaagataacaggcagaacagcagaaaacacctttaataaaacccatacattccactttctgttgggttcaatatacggagagtgccctgtgccaaagccacgagttgatcgtccaagaaaagttcctgtgatacaagaggagagggcaatgcctgcccagttaagaagaatggaagaatctcatcaagaagcaacagagaaagaagtagaaagaatcttgggattgttgcagacatattttcgagaagatcctgataccccaatgtccttctttgactttgtggttgatcctcattctttcccccgtacagtggaaaacatctttcatgtttccttcattatacgggatggttttgcaagaataagacttgaccaagaccgactgccagtaataggtaaatgatactatgtttggaaaaattagttttagagaaaatatatttgttagtagaatttaagtattttactaaatgtaaatgaattttcaatgtagattaacttttacaatattgtatcttgctcaactacctgaagatactgaaaacatggccagcgtctaaaattttgatggattcatctatatcattgattcaacatctgctgtaaatattaacaaagaaatgatataatttccctcagatcttaatttagaaagttggtgattgcagtcatttttgtagtatccctctttctaatcacgttttgtcagatgccggcaccttcttttctctttgaggttctatgaatctttcattcttacctgaataatttcacactctccattactcatgtcctcctaaggtctcctgtggagagtgaatatttccatcgcacttacttgctactttcaatgttctcaatgtcctattggactcactagggcttagctctgtggttgacacatagatatgcagattttcaaatgtctggaatgtgttactctactacatgttttttgaaatggaaacagatggaatgactggctactgtaataatactacagcagctccataatgcatgaaatcctaaaaagtatgtaatattataagtatcttttcaatacaggtttcattgctattattcatcagtttccgtttagattacctgttccgatttaataacctttgataaatttgaaaaatttgtctttcaaacagagcctgttagtattaatgaagaaaatgagggatttgaacataacacacaagttagaaatcaaggaattatagctttgagttaccgtgactgggaggtaaagctctgcctgttgcccctgcatagttctgactctgccttcacttgcagtaagcccagtgcctaaatgttcattattgtctgccaggagattgtgaagacctttgagatttcagagcctgtgattactccaagtcagaggcagcagaagccaagtgcttgatgctagctgaaggactcaaatggatagtgaagtccaaaacggaaagcggcatgtattgtacatattgtatgattcaacatttttaaaggcagattgtttttagtaaaatgtagcttttgatagttaataaatttgtcatggttgtctttgattaaaggaaactcaccgccatattcacaaa

SEQ ID NO: 415379 - DNA, 2597 bp, Homo sapiens
gcgttccgccgggagcaggcgctggcgcagagcaggggtttcagtttctggcgcgaacttccgccgttccgaagttgcacggtgaattggcgctatgtctggggacagcagcggccgcgggccagagggccggggccggggccgcgacccgcatcgggatcgcacccgctcccgctcccgctcgcggtcccctttgtcgcccaggtcccgccgcggctctgcgcgggagcgcagagaggccccagagcgcccgagcctggaggacacagagccgtcggattccggggacgagatgatggacccggccagcttggaggcggaggccgaccaaggcctgtgccgccagatccgccatcagtaccgggcgctcatcaactccgtccaacgtaaggcggcgcctccgggcggcgcgggcccggacgggccgctgtccccgccctgcgccgggcgcggggggagggcaccggaggcaggtgccgggcggaggcccggcgcggcgttagtagagacgcgccgggtgccagcccctcgccgcaccttaaattgttgacaaagtgctcccactttgtggctggagccgtacgaccttggcgcgggtccccgagtggcgggctggaaaagctggaggccagagccgttcgcggaattcgaatctctgggtgggtccgcgcaactgtggagtggccctccaggtgatgaaaaccgtgaggacatactgaatgccggtgacaaattaacagaggtccttgaagaggctaacactctgtttaatgaagtgtcccgagcaagagaagcagtcctggatgcccactttcttgttttggcttcagatttgggcaaagagaaagcaaagcagctgcgctcagacctgagctcctttgacatgttaagatatgttgaaactctactcacacatatgggtgtaaatccgctagaagctgaagaactcatccgtgatgaagatagtcctgattttgaattcatagtctatgactcctggaagataacaggcagaacagcagaaaacacctttaataaaacccatacattccactttctgttgggttcaatatacggagagtgccctgtgccaaagccacgagttgatcgtccaagaaaagttcctgtgatacaagaggagagggcaatgcctgcccagttaagaagaatggaagaatctcatcaagaagcaacagagaaagaagtagaaagaatcttgggattgttgcagacatattttcgagaagatcctgataccccaatgtccttctttgactttgtggttgatcctcattctttcccccgtacagtggaaaacatctttcatgtttccttcattatacgggatggttttgcaagaataagacttgaccaagaccgactgccagtaataggtaaatgatactatgtttggaaaaattagttttagagaaaatatatttgttagtagaatttaagtattttactaaatgtaaatgaattttcaatgtagattaacttttacaatattgtatcttgctcaactacctgaagatactgaaaacatggccagcgtctaaaattttgatggattcatctatatcattgattcaacatctgctgtaaatattaacaaagaaatgatataatttccctcagatcttaatttagaaagttggtgattgcagtcatttttgtagtatccctctttctaatcacgttttgtcagatgccggcaccttcttttctctttgaggttctatgaatctttcattcttacctgaataatttcacactctccattactcatgtcctcctaaggtctcctgtggagagtgaatatttccatcgcacttacttgctactttcaatgttctcaatgtcctattggactcactagggcttagctctgtggttgacacatagatatgcagattttcaaatgtctggaatgtgttactctactacatgttttttgaaatggaaacagatggaatgactggctactgtaataatactacagcagctccataatgcatgaaatcctaaaaagtatgtaatattataagtatcttttcaatacaggtttcattgctattattcatcagtttccgtttagattacctgttccgatttaataacctttgataaatttgaaaaatttgtctttcaaacagagcctgttagtattaatgaagaaaatgagggatttgaacataacacacaagttagaaatcaaggaattatagctttgagttaccgtgactgggaggtaaagctctgcctgttgcccctgcatagttctgactctgccttcacttgcagtaagcccagtgcctaaatgttcattattgtctgccaggagattgtgaagacctttgagatttcagagcctgtgattactccaagtcagaggcagcagaagccaagtgcttgatgctagctgaaggactcaaatggatagtgaagtccaaaacggaaagcggcatgtattgtacatattgtatgattcaacatttttaaaggcagattgtttttagtaaaatgtagcttttgatagttaataaatttgtcatggttgtctttgattaaaggaaactcaccgccatattcacaaa

SEQ ID NO: 415380 - DNA, 1943 bp, Homo sapiens
cggccgctgctgtccccagacatagcgccaattcaccgtgcaacaaaaccgtgaggacatactgaatgccggtgacaaattaacagaggtccttgaagaggctaacactctgtttaatgaagtgtcccgagcaagagaagcagtcctggatgcccactttcttgttttggcttcagatttgggcaaagagaaagcaaagcagctgcgctcagacctgagctcctttgacatgttaagatatgttgaaactctactcacacatatgggtgtaaatccgctagaagctgaagaactcatccgtgatgaagatagtcctgattttgaattcatagtctatgactcctggaagataacaggcagaacagcagaaaacacctttaataaaacccatacattccactttctgttgggttcaatatacggagagtgccctgtgccaaagccacgagttgatcgtccaagaaaagttcctgtgatacaagaggagagggcaatgcctgcccagttaagaagaatggaagaatctcatcaagaagcaacagagaaagaagtagaaagaatcttgggattgttgcagacatattttcgagaagatcctgataccccaatgtccttctttgactttgtggttgatcctcattctttcccccgtacagtggaaaacatctttcatgtttccttcattatacgggatggttttgcaagaataagacttgaccaagaccgactgccagtaataggtaaatgatactatgtttggaaaaattagttttagagaaaatatatttgttagtagaatttaagtattttactaaatgtaaatgaattttcaatgtagattaacttttacaatattgtatcttgctcaactacctgaagatactgaaaacatggccagcgtctaaaattttgatggattcatctatatcattgattcaacatctgctgtaaatattaacaaagaaatgatataatttccctcagatcttaatttagaaagttggtgattgcagtcatttttgtagtatccctctttctaatcacgttttgtcagatgccggcaccttcttttctctttgaggttctatgaatctttcattcttacctgaataatttcacactctccattactcatgtcctcctaaggtctcctgtggagagtgaatatttccatcgcacttacttgctactttcaatgttctcaatgtcctattggactcactagggcttagctctgtggttgacacatagatatgcagattttcaaatgtctggaatgtgttactctactacatgttttttgaaatggaaacagatggaatgactggctactgtaataatactacagcagctccataatgcatgaaatcctaaaaagtatgtaatattataagtatcttttcaatacaggtttcattgctattattcatcagtttccgtttagattacctgttccgatttaataacctttgataaatttgaaaaatttgtctttcaaacagagcctgttagtattaatgaagaaaatgagggatttgaacataacacacaagttagaaatcaaggaattatagctttgagttaccgtgactgggaggtaaagctctgcctgttgcccctgcatagttctgactctgccttcacttgcagtaagcccagtgcctaaatgttcattattgtctgccaggagattgtgaagacctttgagatttcagagcctgtgattactccaagtcagaggcagcagaagccaagtgcttgatgctagctgaaggactcaaatggatagtgaagtccaaaacggaaagcggcatgtattgtacatattgtatgattcaacatttttaaaggcagattgtttttagtaaaatgtagcttttgatagttaataaatttgtcatggttgtctttgattaaaggaaactcaccgccatattcacaaa

SEQ ID NO: 415381 - DNA, 1702 bp, Homo sapiens
ggaattgtaacgggaaacaatttcacccgggtccaacttatggcagattacctattttatccgcttcgccataggaatttgggccttgaggagccaaaatttagcccaaggcagtcaattcagcaaagatccccctttaataaaacccatacattcccctttctgttgggttcaatatacggagagtgccctgtgccaaagccacgagttgatcgtccaagaaaagttcctgtgatacaagaggagagggcaatgcctgcccagttaagaagaatggaagaatctcatcaagaagcaacagagaaagaagtagaaagaatcttgggattgttgcagacatattttcgagaagatcctgataccccaatgtccttctttgactttgtggttgatcctcattctttcccccgtacagtggaaaacatctttcatgtttccttcattatacgggatggttttgcaagaataagacttgaccaagaccgactgccagtaataggtaaatgatactatgtttggaaaaattagttttagagaaaatatatttgttagtagaatttaagtattttactaaatgtaaatgaattttcaatgtagattaacttttacaatattgtatcttgctcaactacctgaagatactgaaaacatggccagcgtctaaaattttgatggattcatctatatcattgattcaacatctgctgtaaatattaacaaagaaatgatataatttccctcagatcttaatttagaaagttggtgattgcagtcatttttgtagtatccctctttctaatcacgttttgtcagatgccggcaccttcttttctctttgaggttctatgaatctttcattcttacctgaataatttcacactctccattactcatgtcctcctaaggtctcctgtggagagtgaatatttccatcgcacttacttgctactttcaatgttctcaatgtcctattggactcactagggcttagctctgtggttgacacatagatatgcagattttcaaatgtctggaatgtgttactctactacatgttttttgaaatggaaacagatggaatgactggctactgtaataatactacagcagctccataatgcatgaaatcctaaaaagtatgtaatattataagtatcttttcaatacaggtttcattgctattattcatcagtttccgtttagattacctgttccgatttaataacctttgataaatttgaaaaatttgtctttcaaacagagcctgttagtattaatgaagaaaatgagggatttgaacataacacacaagttagaaatcaaggaattatagctttgagttaccgtgactgggaggtaaagctctgcctgttgcccctgcatagttctgactctgccttcacttgcagtaagcccagtgcctaaatgttcattattgtctgccaggagattgtgaagacctttgagatttcagagcctgtgattactccaagtcagaggcagcagaagccaagtgcttgatgctagctgaaggactcaaatggatagtgaagtccaaaacggaaagcggcatgtattgtacatattgtatgattcaacatttttaaaggcagattgtttttagtaaaatgtagcttttgatagttaataaatttgtcatggttgtctttgattaaaggaaactcaccgccatattcacaaa

SEQ ID NO: 415382 - DNA, 650 bp, Homo sapiens
gtagtgcagacagttgtgggtgggaatcagaagacctagattctatcggctatgccccttactttatttatttatttttgccccttactttaaaaccttgggcaagtcacttaatctcacccaacttctaaaaaaaaaaaaaaaaaaaagaaaaaagaagaagggaataaatatggaataaatttaagatatataatgtggattaacctgggccctactcactgaggagggctaattgttggatttaatttatgtatattatatgaacttttggtttatcatttataaactgttaaccagctattcttcccctttttaggactcaaatggatagtgaagtccaaaacggaaagcggcatgtattgtacatattgtatgattcaacatttttaaaggcagattgtttttagtaaaatgtagcttttgatagttaataaatttgtcatggttgtctttgattaaaggaaactcaccgccatattcacaaataattgtagttgctctttattttctaattattggagagtgtctcctttgtctattcctgtcccagtgaaagttttacttaggttgttaatgccctgcggaccattatgattccttttacttcttttttgccacgaagctagctagtcaagtcaacaaatagg

SEQ ID NO: 415383 - DNA, 114 bp, Homo sapiens
gaacagctgcattgctggtgggggctgtaccatggaggagagggggagctgtcaatcaaccaccattgcagactctgcagcacccgagtggcgacagagatggtgtggtgagag

SEQ ID NO: 415384 - DNA, 371 bp, Homo sapiens
aaaataattttggtggtaaaagaaatacaaagttaattgtggaaaatattggaagtaataaggacagtgataaaaactcacccgtaattccaagataatgactgttaatattttgctctatttgattttgggcccaccttcttacatgggtatgcaagaatacataccctgttcccaccactccagcctttcatggcaaaactggtctcgtattgtaaaataggtaatatttcctaacctccttttaaaaaatcttattgtgtgactattttcctatcgtgaaatgttttcctaaaatgtgactatcccaatatgtatttaatcattttcttaccattaagacttggcataaaaatctcttcatatctctt

SEQ ID NO: 415385 - DNA, 2167 bp, Homo sapiens
gcggggcagagccgggccaagctgggcgggtcatgcgccctggccttcgcgcatctcccaggttagctgcgtgtccgggtgctaggctgcagacccgccgccatgacgctgcgcgcggccgtcttcgaccttgacggggtgctggcgctgccagcggtgttcggcgtcctcggccgcacggaggaggccctggcgctgcccagaggacttctgaatgatgctttccagaaagggggaccagagggtgccactacccggcttatgaaaggagagatcacactttcccagtggataccactcatggaagaaaactgcaggaagtgctccgagaccgctaaagtctgcctccccaagaatttctccataaaagaaatctttgacaaggcgatttcagccagaaagatcaaccgccccatgctccaggcagctctcatgctcaggaagaaaggattcactactgccatcctcaccaacacctggctggacgaccgtgctgagagagatggcctggcccagctgatgtgtgagctgaagatgcactttgacttcctgatagagtcgtgtcaggtgggaatggtcaaacctgaacctcagatctacaagtttctgctggacaccctgaaggccagccccagtgaggtcgtttttttggatgacatcggggctaatctgaagccagcccgtgacttgggaatggtcaccatcctggtccaggacactgacacggccctgaaagaactggagaaagtgaccggaatccagcttctcaataccccggcccctctgccgacctcttgcaatccaagtgacatgagccatgggtacgtgacagtaaagcccagggtccgtctgcattttgtggagctgggctccggccctgctgtgtgcctctgccatggatttcccgagagttggtattcttggaggtaccagatccctgctctggcccaggcaggttaccgggtcctagctatggacatgaaaggctatggagagtcatctgctcctcccgaaatagaagaatattgcatggaagtgttatgtaaggagatggtaaccttcctggataaactgggcctctctcaagcagtgttcattggccatgactggggtggcatgctggtgtggtacatggctctcttctaccccgagagagtgagggcggtggccagtttgaatactcccttcataccagcaaatcccaacatgtcccctttggagagtatcaaagccaacccagtatttgattaccagctctacttccaagaaccaggagtggctgaggctgaactggaacagaacctgagtcggactttcaaaagcctcttcagagcaagcgatgagagtgttttatccatgcataaagtctgtgaagcgggaggactttttgtaaatagcccagaagagcccagcctcagcaggatggtcactgaggaggaaatccagttctatgtgcagcagttcaagaagtctggtttcagaggtcctctaaactggtaccgaaacatggaaaggaactggaagtgggcttgcaaaagcttgggacggaagatcctgattccggccctgatggtcacggcggagaaggacttcgtgctcgttcctcagatgtcccagcacatggaggactggattccccacctgaaaaggggacacattgaggactgtgggcactggacacagatggacaagccaaccgaggtgaatcagatcctcattaagtggctggattctgatgcccggaacccaccggtggtctcaaagatgtagaacgcagcgtgtgcccacgctcagcaggtgtgccatccttccacctgctggggcaccattcttagtatacagaggtggccttacacacatcttgcatggatggcagcattgttctgaaggggtttgcagaaaaaaaagattttctttacataaagtgaatcaaatttgacattattttagatcccagagaaatcaggtgtgattagttctccaggcatgaatgcatcgtccctttatctgtaagaacccttagtgtcctgtagggggacagaatggggtggccaggtggtgatttctctttgaccaatgcatagtttggcagaaaaatcagccgttcatttagaagaatcttagcagagattgggatgccttactcaataaagctaagatgactatg

SEQ ID NO: 415386 - DNA, 612 bp, Homo sapiens
gctttcctggtttcattgtgctggctttggcctggcttagccactcatgtcactcacctctgccttcgagttggctgggtaggtgcagacaagtgtgaatggctatttttttcttttacttctccctttcccccaggccaaccgaggtgaatcagatcctcattaagtggctggattctgatgcccggaacccaccggtggtctcaaagatgtagaacgcagcgtgtgcccacgctcagcaggtgtgccatccttccacctgctggggcaccattcttagtatacagaggtggccttacacacatcttgcatggatggcagcattgttctgaaggggtttgcagaaaaaaaagattttctttacataaagtgaatcaaatttgacattattttagatcccagagaaatcaggtgtgattagttctccaggcatgaatgcatcgtccctttatctgtaagaacccttagtgtcctgtagggggacagaatggggtggccaggtggtgatttctctttgaccaatgcatagtttggcagaaaaatcagccgttcatttagaagaatcttagcagagattgggatgccttactcaataaagctaagatgactatg

SEQ ID NO: 415387 - DNA, 941 bp, Homo sapiens
gctttcctggtttcattgtgctggctttggcctggcttagccactcatgtcactcacctctgccttcgagttggctgggtaggtgcagacaagtgtgaatggctatttttttcttttacttctccctttcccccaggccaaccgaggtgaatcagatcctcattaagtggctggattctgatgcccggaacccaccggtggtctcaaagatgtagaacgcagcgtgtgcccacgctcagcaggtgtgccatccttccacctgctggggcaccattcttagtatacagaggtggccttacacacatcttgcatggatggcagcattgttctgaaggggtttgcagaaaaaaaagattttctttacataaagtgaatcaaatttgacattattttagatcccagagaaatcaggtgtgattagttctccaggcatgaatgcatcgtccctttatctgtaagaacccttagtgtcctgtagggggacagaatggggtggccaggtggtgatttctctttgaccaatgcatagtttggcagaaaaatcagccgttcatttagaagaatcttagcagagattgggatgccttactcaataaagctaagatgactatgctagctggctgtctttgttcttggagaggtggagtgactgttcacggagaatgcacggcatggggatgaaccctttccctctgcttttgagccctgttctgggctccaaggtgctgtatgatctaggccgtgctggccaggagacaatcctatggggatggcagtggtgtcttgtgctctgtcccctagagcagtcactggccacaggtagccacctgcctttctcccggcttccctagcagagtttgctcaggcacaaatgtgcacctggagcatttgaaatgtgctagtgaggctgaggaagagaattttaaatttcattgaattgt

SEQ ID NO: 415388 - DNA, 968 bp, Homo sapiens
acctaggaagtccagctggcctcacctctcaatcctccctcataacaggacaccccacctgctactgggaactgggtgatgaccactctagctacttcctgctggataggggcaaagaaggggccctgccgttgtagtgtcctccagaggggaactctctaggccagtcaaagggccagtgggtcagtctagcagtcctcggtagaagttgtgagttaagctcatttggggttccatttgtaagaccatctgtagcttgatggccttgatcctggaggaaacaaatttgaggaggaggttaaaaatacagggactgaagaggacttctgaatgatgctttccagaaagggggaccagagggtgccactacccggcttatgaaaggagagatcacactttcccagtggataccactcatggaagaaaactgcaggaagtgctccgagaccgctaaagtctgcctccccaagaatttctccataaaagaaatctttgacaaggcgatttcagccagaaagatcaaccgccccatgctccaggcagctctcatgctcaggaagaaaggattcactactgccatcctcaccaacacctggctggacgaccgtgctgagagagatggcctggcccagctgatgtgtgagctgaagatgcactttgacttcctgatagagtcgtgtcaggtgggaatggtcaaacctgaacctcagatctacaagtttctgctggacaccctgaaggccagccccagtgaggtcgtttttttggatgacatcggggctaatctgaagccagcccgtgacttgggaatggtcaccatcctggtccaggacactgacacggccctgaaagaactggagaaagtgaccggaatccaggggtaggaggaagaggaagatagaaggaaaaatgaacatcatcccccttgtatttttttcattgtggaaaaatgcatgtaacgtaaaatt

SEQ ID NO: 415389 - DNA, 724 bp, Homo sapiens
gctgggtgcagtggctcactcctgtaatcacagccctttgggaggccaaggtgggcggatcggttgatgtcaggagttcgagaccaacctggccaacatggctacaaccccgtctctactaaaaatataaaaacttagccaagcatagtggtgggcacctgtaatcccagctgctcgggaagctgaggcacgagaatagcttgaacccaggaggtggaggttgcaatgattcaagatcgtgctactgcatttcaacctggacaacaagagcgagactctgtctccaaaaacaaacaaacaaaaaagtattggcactaagactttaacgtgaattttgagagtgatacagtttagcccatgacaagactgatttttttgtctttagtgaataaattaaaatgtatacccagtgactccataaccttaaagcatcttgcccaagctttgttcatttgtccttctacaaacctgcaagtcccaggcaacagagaagaaagcacatcagacttgggctcagggaacccatgtgcttgtgcccctggctaggtctgtcccctcagcatacctgagccacagatacctgtcctgtgaaactgggaaagtaaaaactatatctcacttctctttgtctcaggggtaggaggaagaggaagatagaaggaaaaatgaacatcatcccccttgtatttttttcattgtggaaaaatgcatgtaacgtaaaatt

SEQ ID NO: 415390 - DNA, 416 bp, Homo sapiens
caatagaggtaaaagctggaccccctgggggggcccgggccagaaatttcccggggcccttttttactattattttctcgcccggttcgacgcggccttgaaagaactggagaaagtgaccggaatcccttctcaataccccggcccctctgccgacctcttgcaatccaagtgacatgagccatgggtacgtgacagtaaaggtgagtcagttttgtctctcagtcggctaagtgctctcccaccaggtcacctaaaacgaccagcagagacacccaagaggctgagctgtgaggatcacctgaacctgagcctgggaagtggaggttgcagtgagctgtgatcacaccactgtgctccagcctgggcaacggagtgaaaccctgtctcaagaaaaaaaaaaaaaaaaaaggacc

SEQ ID NO: 415391 - DNA, 236 bp, Homo sapiens
gcggccgcctactactactactgctcgaattcaagcttctaacgatgtacggggcatgaatgcatcgtccctttatctgtaagaacccttagtgtcctgtagggggacagaatggggtggccaggtggtgatttctctttgaccaatgcatagtttggcagaaaaatcagccgttcatttagaagaatcttagcagagattgggatgccttactcaataaagctaagatgactatg

SEQ ID NO: 415392 - DNA, 2267 bp, Homo sapiens
gcggggcagagccgggccaagctgggcgggtcatgcgccctggccttcgcgcatctcccaggttagctgcgtgtccgggtgctaggctgcagacccgccgccatgacgctgcgcgcggccgtcttcgaccttgacggggtgctggcgctgccagcggtgttcggcgtcctcggccgcacggaggaggccctggcgctgcccagtccttctggaagacaggtcaacggatgtttgcgactccagtccccatgatctgagtctaggtcccagtggagatccatactggggacggcttgttgaccgaggacttctgaatgatgctttccagaaagggggaccagagggtgccactacccggcttatgaaaggagagatcacactttcccagtggataccactcatggaagaaaactgcaggaagtgctccgagaccgctaaagtctgcctccccaagaatttctccataaaagaaatctttgacaaggcgatttcagccagaaagatcaaccgccccatgctccaggcagctctcatgctcaggaagaaaggattcactactgccatcctcaccaacacctggctggacgaccgtgctgagagagatggcctggcccagctgatgtgtgagctgaagatgcactttgacttcctgatagagtcgtgtcaggtgggaatggtcaaacctgaacctcagatctacaagtttctgctggacaccctgaaggccagccccagtgaggtcgtttttttggatgacatcggggctaatctgaagccagcccgtgacttgggaatggtcaccatcctggtccaggacactgacacggccctgaaagaactggagaaagtgaccggaatccagcttctcaataccccggcccctctgccgacctcttgcaatccaagtgacatgagccatgggtacgtgacagtaaagcccagggtccgtctgcattttgtggagctgggctccggccctgctgtgtgcctctgccatggatttcccgagagttggtattcttggaggtaccagatccctgctctggcccaggcaggttaccgggtcctagctatggacatgaaaggctatggagagtcatctgctcctcccgaaatagaagaatattgcatggaagtgttatgtaaggagatggtaaccttcctggataaactgggcctctctcaagcagtgttcattggccatgactggggtggcatgctggtgtggtacatggctctcttctaccccgagagagtgagggcggtggccagtttgaatactcccttcataccagcaaatcccaacatgtcccctttggagagtatcaaagccaacccagtatttgattaccagctctacttccaagaaccaggagtggctgaggctgaactggaacagaacctgagtcggactttcaaaagcctcttcagagcaagcgatgagagtgttttatccatgcataaagtctgtgaagcgggaggactttttgtaaatagcccagaagagcccagcctcagcaggatggtcactgaggaggaaatccagttctatgtgcagcagttcaagaagtctggtttcagaggtcctctaaactggtaccgaaacatggaaaggaactggaagtgggcttgcaaaagcttgggacggaagatcctgattccggccctgatggtcacggcggagaaggacttcgtgctcgttcctcagatgtcccagcacatggaggactggattccccacctgaaaaggggacacattgaggactgtgggcactggacacagatggacaagccaaccgaggtgaatcagatcctcattaagtggctggattctgatgcccggaacccaccggtggtctcaaagatgtagaacgcagcgtgtgcccacgctcagcaggtgtgccatccttccacctgctggggcaccattcttagtatacagaggtggccttacacacatcttgcatggatggcagcattgttctgaaggggtttgcagaaaaaaaagattttctttacataaagtgaatcaaatttgacattattttagatcccagagaaatcaggtgtgattagttctccaggcatgaatgcatcgtccctttatctgtaagaacccttagtgtcctgtagggggacagaatggggtggccaggtggtgatttctctttgaccaatgcatagtttggcagaaaaatcagccgttcatttagaagaatcttagcagagattgggatgccttactcaataaagctaagatgactatg

SEQ ID NO: 415393 - DNA, 2283 bp, Homo sapiens
acctaggaagtccagctggcctcacctctcaatcctccctcataacaggacaccccacctgctactgggaactgggtgatgaccactctagctacttcctgctggataggggcaaagaaggggccctgccgttgtagtgtcctccagaggggaactctctaggccagtcaaagggccagtgggtcagtctagcagtcctcggtagaagttgtgagttaagctcatttggggttccatttgtaagaccatctgtagcttgatggccttgatcctggaggaaacaaatttgaggaggaggttaaaaatacagggactgaagaggacttctgaatgatgctttccagaaagggggaccagagggtgccactacccggcttatgaaaggagagatcacactttcccagtggataccactcatggaagaaaactgcaggaagtgctccgagaccgctaaagtctgcctccccaagaatttctccataaaagaaatctttgacaaggcgatttcagccagaaagatcaaccgccccatgctccaggcagctctcatgctcaggaagaaaggattcactactgccatcctcaccaacacctggctggacgaccgtgctgagagagatggcctggcccagctgatgtgtgagctgaagatgcactttgacttcctgatagagtcgtgtcaggtgggaatggtcaaacctgaacctcagatctacaagtttctgctggacaccctgaaggccagccccagtgaggtcgtttttttggatgacatcggggctaatctgaagccagcccgtgacttgggaatggtcaccatcctggtccaggacactgacacggccctgaaagaactggagaaagtgaccggaatccagcttctcaataccccggcccctctgccgacctcttgcaatccaagtgacatgagccatgggtacgtgacagtaaagcccagggtccgtctgcattttgtggagctgggctccggccctgctgtgtgcctctgccatggatttcccgagagttggtattcttggaggtaccagatccctgctctggcccaggcaggttaccgggtcctagctatggacatgaaaggctatggagagtcatctgctcctcccgaaatagaagaatattgcatggaagtgttatgtaaggagatggtaaccttcctggataaactgggcctctctcaagcagtgttcattggccatgactggggtggcatgctggtgtggtacatggctctcttctaccccgagagagtgagggcggtggccagtttgaatactcccttcataccagcaaatcccaacatgtcccctttggagagtatcaaagccaacccagtatttgattaccagctctacttccaagaaccaggagtggctgaggctgaactggaacagaacctgagtcggactttcaaaagcctcttcagagcaagcgatgagagtgttttatccatgcataaagtctgtgaagcgggaggactttttgtaaatagcccagaagagcccagcctcagcaggatggtcactgaggaggaaatccagttctatgtgcagcagttcaagaagtctggtttcagaggtcctctaaactggtaccgaaacatggaaaggaactggaagtgggcttgcaaaagcttgggacggaagatcctgattccggccctgatggtcacggcggagaaggacttcgtgctcgttcctcagatgtcccagcacatggaggactggattccccacctgaaaaggggacacattgaggactgtgggcactggacacagatggacaagccaaccgaggtgaatcagatcctcattaagtggctggattctgatgcccggaacccaccggtggtctcaaagatgtagaacgcagcgtgtgcccacgctcagcaggtgtgccatccttccacctgctggggcaccattcttagtatacagaggtggccttacacacatcttgcatggatggcagcattgttctgaaggggtttgcagaaaaaaaagattttctttacataaagtgaatcaaatttgacattattttagatcccagagaaatcaggtgtgattagttctccaggcatgaatgcatcgtccctttatctgtaagaacccttagtgtcctgtagggggacagaatggggtggccaggtggtgatttctctttgaccaatgcatagtttggcagaaaaatcagccgttcatttagaagaatcttagcagagattgggatgccttactcaataaagctaagatgactatg

SEQ ID NO: 415394 - DNA, 1577 bp, Homo sapiens
gcggggcagagccgggccaagctgggcgggtcatgcgccctggccttcgcgcatctcccaggttagctgcgtgtccgggtgctaggctgcagacccgccgccatgacgctgcgcgcggccgtcttcgaccttgacggggtgctggcgctgccagcggtgttcggcgtcctcggccgcacggaggaggccctggcgctgcccagaggacttctgaatgatgctttccagaaagggggaccagagggtgccactacccggcttatgaaaggagagatcacactttcccagtggataccactcatggaagaaaactgcaggaagtgctccgagaccgctaaagtctgcctccccaagaatttctccataaaagaaatctttgacaaggcgatttcagccagaaagatcaaccgccccatgctccaggcagctctcatgctcaggaagaaaggattcactactgccatcctcaccaacacctggctggacgaccgtgctgagagagatggcctggcccagctgatgtgtgagctgaagatgcactttgacttcctgatagagtcgtgtcaggtgggaatggtcaaacctgaacctcagatctacaagtttctgctggacaccctgaaggccagccccagtgaggtcgtttttttggatgacatcggggctaatctgaagccagcccgtgacttgggaatggtcaccatcctggtccaggacactgacacggccctgaaagaactggagaaagtgaccggaatccagcttctcaataccccggcccctctgccgacctcttgcaatccaagtgacatgagccatgggtacgtgacagtaaagcccagggtccgtctgcattttgtggagctgggctccggccctgctgtgtgcctctgccatggatttcccgagagttggtattcttggaggtaccagatccctgctctggcccaggcaggttaccgggtcctagctatggacatgaaaggctatggagagtcatctgctcctcccgaaatagaagaatattgcatggaagtgttatgtaaggagatggtaaccttcctggataaactgggcctctctcaagcagtgttcattggccatgactggggtggcatgctggtgtggtacatggctctcttctaccccgagagagtgagggcggtggccagtttgaatactcccttcataccagcaaatcccaacatgtcccctttggagagtatcaaagccaacccagtatttgattaccagctctacttccaagaaccaggagtggctgaggctgaactggaacagaacctgagtcggactttcaaaagcctcttcagagcaagcgatgagagtgttttatccatgcataaagtctgtgaagcgggaggactttttgtaaatagcccagaagagcccagcctcagcaggatggtcactgaggaggaaatccagttctatgtgcagcagttcaagaagtctggtttcagaggtcctctaaactggtaccgaaacatggaaaggaactggaagtgggcttgcaaaagcttgggacggaaggtgagtgccaggttcagtgtagtctc

SEQ ID NO: 415395 - DNA, 1501 bp, Homo sapiens
gcggggcagagccgggccaagctgggcgggtcatgcgccctggccttcgcgcatctcccaggttagctgcgtgtccgggtgctaggctgcagacccgccgccatgacgctgcgcgcggccgtcttcgaccttgacggggtgctggcgctgccagcggtgttcggcgtcctcggccgcacggaggaggccctggcgctgcccagaggacttctgaatgatgctttccagaaagggggaccagagggtgccactacccggcttatgaaaggagagatcacactttcccagtggataccactcatggaagaaaactgcaggaagtgctccgagaccgctaaagtctgcctccccaagaatttctccataaaagaaatctttgacaaggcgatttcagccagaaagatcaaccgccccatgctccaggcagctctcatgctcaggaagaaaggattcactactgccatcctcaccaacacctggctggacgaccgtgctgagagagatggcctggcccagctgatgtgtgagctgaagatgcactttgacttcctgatagagtcgtgtcaggtgggaatggtcaaacctgaacctcagatctacaagtttctgctggacaccctgaaggccagccccagtgaggtcgtttttttggatgacatcggggctaatctgaagccagcccgtgacttgggaatggtcaccatcctggtccaggacactgacacggccctgaaagaactggagaaagtgaccggaatccagcttctcaataccccggcccctctgccgacctcttgcaatccaagtgacatgagccatgggtacgtgacagtaaagcccagggtccgtctgcattttgtggagctgggctccggccctgctgtgtgcctctgccatggatttcccgagagttggtattcttggaggtaccagatccctgctctggcccaggcaggttaccgggtcctagctatggacatgaaaggctatggagagtcatctgctcctcccgaaatagaacgaatattgcctggaagtggttatgttaggagactggtaccgttcctggattaactggggctttctcaagcagtgttcatgggcattgactgggggtggcatgcagggatggacattggtctcttataaccccgagagaattagagcggggcacattgatataatccctggacaaacacagaacaacacacaaggacccaccttggggaaaagaatgacaaagaccaaaaccagatatggataacacggcctaaatcgcaagaaacaagaagaggatgacgacagcaagggccacacaacgcgcaagggtagaacataagcatcatcacgaaaacacgcagacaggggaacaacacgacaaaaagaacaagggaggaaatggaacaaccaaaacactcccacagatggatcaacgaggaaacaccacgattggcatacaaaaagggaagaagacagaagtgacaaaaaaaaggaagtggaa

SEQ ID NO: 415396 - DNA, 852 bp, Homo sapiens
gcggggcagagccgggccaagctgggcgggtcatgcgccctggccttcgcgcatctcccaggttagctgcgtgtccgggtgctaggctgcagacccgccgccatgacgctgcgcgcggccgtcttcgaccttgacggggtgctggcgctgccagcggtgttcggcgtcctcggccgcacggaggaggccctggcgctgcccagaggacttctgaatgatgctttccagaaagggggaccagagggtgccactacccggcttatgaaaggagagatcacactttcccagtggataccactcatggaagaaaactgcaggaagtgctccgagaccgctaaagtctgcctccccaagaatttctccataaaagaaatctttgacaaggcgatttcagccagaaagatcaaccgccccatgctccaggcagctctcatgctcaggaagaaaggattcactactgccatcctcaccaacacctggctggacgaccgtgctgagagagatggcctggcccagctgatgtgtgagctgaagatgcactttgacttcctgatagagtcgtgtcaggtgggaatggtcaaacctgaacctcagatctacaagtttctgctggacaccctgaaggccagccccagtgaggtcgtttttttggatgacatcggggctaatctgaagccagcccgtgacttgggaatggtcaccatcctggtccaggacactgacacggccctgaaagaactggagaaagtgaccggaatccaggggtaggaggaagaggaagatagaaggaaaaatgaacatcatcccccttgtatttttttcattgtggaaaaatgcatgtaacgtaaaatt

SEQ ID NO: 415397 - DNA, 881 bp, Homo sapiens
gcggggcagagccgggccaagctgggcgggtcatgcgccctggccttcgcgcatctcccaggttagctgcgtgtccgggtgctaggctgcagacccgccgccatgacgctgcgcgcggccgtcttcgaccttgacggggtgctggcgctgccagcggtgttcggcgtcctcggccgcacggaggaggccctggcgctgcccagaggacttctgaatgatgctttccagaaagggggaccagagggtgccactacccggcttatgaaaggagagatcacactttcccagtggataccactcatggaagaaaactgcaggaagtgctccgagaccgctaaagtctgcctccccaagaatttctccataaaagaaatctttgacaaggcgatttcagccagaaagatcaaccgccccatgctccaggcagctctcatgctcaggaagaaaggattcactactgccatcctcaccaacacctggctggacgaccgtgctgagagagatggcctggcccagctgatgtgtgagctgaagatgcactttgacttcctgatagagtcgtgtcaggtgggaatggtcaaacctgaacctcagatctacaagtttctgctggacaccctgaaggccagccccagtgagtgaatcaaatttgacattattttagatcccagagaaatcaggtgtgattagttctccaggcatgaatgcatcgtccctttatctgtaagaacccttagtgtcctgtagggggacagaatggggtggccaggtggtgatttctctttgaccaatgcatagtttggcagaaaaatcagccgttcatttagaagaatcttagcagagattgggatgccttactcaataaagctaagatgactatg

SEQ ID NO: 415398 - DNA, 243 bp, Homo sapiens
ttgcaagcagcaaccgtgactgtaccttcctttcccctgcatggatgtggggtctcattcattcattattcccttcctaaatcatgcagggtttgggcagggtggcctgcggggagcagagagaaggcgtccattgcccattgcactagctagagacacacccatctgccttcttccatttacctttctgcctggggtttcctttcagattccccacctgaaaaggggacacattgaggactg

SEQ ID NO: 415399 - DNA, 2105 bp, Homo sapiens
ggcacgagctctctctctctctctctctctctccgccgccatgacgctgcgcgcggccgtcttcgaccttgacggggtgctggcgctgccagcggtgttcggcgtcctcggccgcacggaggaggccctggcgctgcccagaggacttctgaatgatgctttccagaaagggggaccagagggtgccactacccggcttatgaaaggagagatcacactttcccagtggataccactcatggaagaaaactgcaggaagtgctccgagaccgctaaagtctgcctccccaagaatttctccataaaagaaatctttgacaaggcgatttcagccagaaagatcaaccgccccatgctccaggcagctctcatgctcaggaagaaaggattcactactgccatcctcaccaacacctggctggacgaccgtgctgagagagatggcctggcccagctgatgtgtgagctgaagatgcactttgacttcctgatagagtcgtgtcaggtgggaatggtcaaacctgaacctcagatctacaagtttctgctggacaccctgaaggccagccccagtgaggtcgtttttttggatgacatcggggctaatctgaagccagcccgtgacttgggaatggtcaccatcctggtccaggacactgacacggccctgaaagaactggagaaagtgaccggaatccagcttctcaataccccggcccctctgccgacctcttgcaatccaagtgacatgagccatgggtacgtgacagtaaagcccagggtccgtctgcattttgtggagctgggctccggccctgctgtgtgcctctgccatggatttcccgagagttggtattcttggaggtaccagatccctgctctggcccaggcaggttaccgggtcctagctatggacatgaaaggctatggagagtcatctgctcctcccgaaatagaagaatattgcatggaagtgttatgtaaggagatggtaaccttcctggataaactgggcctctctcaagcagtgttcattggccatgactggggtggcatgctggtgtggtacatggctctcttctaccccgagagagtgagggcggtggccagtttgaatactcccttcataccagcaaatcccaacatgtcccctttggagagtatcaaagccaacccagtatttgattaccagctctacttccaagaaccaggagtggctgaggctgaactggaacagaacctgagtcggactttcaaaagcctcttcagagcaagcgatgagagtgttttatccatgcataaagtctgtgaagcgggaggactttttgtaaatagcccagaagagcccagcctcagcaggatggtcactgaggaggaaatccagttctatgtgcagcagttcaagaagtctggtttcagaggtcctctaaactggtaccgaaacatggaaaggaactggaagtgggcttgcaaaagcttgggacggaagatcctgattccggccctgatggtcacggcggagaaggacttcgtgctcgttcctcagatgtcccagcacatggaggactggattccccacctgaaaaggggacacattgaggactgtgggcactggacacagatggacaagccaaccgaggtgaatcagatcctcattaagtggctggattctgatgcccggaacccaccggtggtctcaaagatgtagaacgcagcgtgtgcccacgctcagcaggtgtgccatccttccacctgctggggcaccattcttagtatacagaggtggccttacacacatcttgcatggatggcagcattgttctgaaggggtttgcagaaaaaaaagattttctttacataaagtgaatcaaatttgacattattttagatcccagagaaatcaggtgtgattagttctccaggcatgaatgcatcgtccctttatctgtaagaacccttagtgtcctgtagggggacagaatggggtggccaggtggtgatttctctttgaccaatgcatagtttggcagaaaaatcagccgttcatttagaagaatcttagcagagattgggatgccttactcaataaagctaagatgactatg

SEQ ID NO: 415400 - DNA, 2496 bp, Homo sapiens
gcggggcagagccgggccaagctgggcgggtcatgcgccctggccttcgcgcatctcccaggttagctgcgtgtccgggtgctaggctgcagacccgccgccatgacgctgcgcgcggccgtcttcgaccttgacggggtgctggcgctgccagcggtgttcggcgtcctcggccgcacggaggaggccctggcgctgcccagaggacttctgaatgatgctttccagaaagggggaccagagggtgccactacccggcttatgaaaggagagatcacactttcccagtggataccactcatggaagaaaactgcaggaagtgctccgagaccgctaaagtctgcctccccaagaatttctccataaaagaaatctttgacaaggcgatttcagccagaaagatcaaccgccccatgctccaggcagctctcatgctcaggaagaaaggattcactactgccatcctcaccaacacctggctggacgaccgtgctgagagagatggcctggcccagctgatgtgtgagctgaagatgcactttgacttcctgatagagtcgtgtcaggtgggaatggtcaaacctgaacctcagatctacaagtttctgctggacaccctgaaggccagccccagtgaggtcgtttttttggatgacatcggggctaatctgaagccagcccgtgacttgggaatggtcaccatcctggtccaggacactgacacggccctgaaagaactggagaaagtgaccggaatccagcttctcaataccccggcccctctgccgacctcttgcaatccaagtgacatgagccatgggtacgtgacagtaaagcccagggtccgtctgcattttgtggagctgggctccggccctgctgtgtgcctctgccatggatttcccgagagttggtattcttggaggtaccagatccctgctctggcccaggcaggttaccgggtcctagctatggacatgaaaggctatggagagtcatctgctcctcccgaaatagaagaatattgcatggaagtgttatgtaaggagatggtaaccttcctggataaactgggcctctctcaagcagtgttcattggccatgactggggtggcatgctggtgtggtacatggctctcttctaccccgagagagtgagggcggtggccagtttgaatactcccttcataccagcaaatcccaacatgtcccctttggagagtatcaaagccaacccagtatttgattaccagctctacttccaagaaccaggagtggctgaggctgaactggaacagaacctgagtcggactttcaaaagcctcttcagagcaagcgatgagagtgttttatccatgcataaagtctgtgaagcgggaggactttttgtaaatagcccagaagagcccagcctcagcaggatggtcactgaggaggaaatccagttctatgtgcagcagttcaagaagtctggtttcagaggtcctctaaactggtaccgaaacatggaaaggaactggaagtgggcttgcaaaagcttgggacggaagatcctgattccggccctgatggtcacggcggagaaggacttcgtgctcgttcctcagatgtcccagcacatggaggactggattccccacctgaaaaggggacacattgaggactgtgggcactggacacagatggacaagccaaccgaggtgaatcagatcctcattaagtggctggattctgatgcccggaacccaccggtggtctcaaagatgtagaacgcagcgtgtgcccacgctcagcaggtgtgccatccttccacctgctggggcaccattcttagtatacagaggtggccttacacacatcttgcatggatggcagcattgttctgaaggggtttgcagaaaaaaaagattttctttacataaagtgaatcaaatttgacattattttagatcccagagaaatcaggtgtgattagttctccaggcatgaatgcatcgtccctttatctgtaagaacccttagtgtcctgtagggggacagaatggggtggccaggtggtgatttctctttgaccaatgcatagtttggcagaaaaatcagccgttcatttagaagaatcttagcagagattgggatgccttactcaataaagctaagatgactatgctagctggctgtctttgttcttggagaggtggagtgactgttcacggagaatgcacggcatggggatgaaccctttccctctgcttttgagccctgttctgggctccaaggtgctgtatgatctaggccgtgctggccaggagacaatcctatggggatggcagtggtgtcttgtgctctgtcccctagagcagtcactggccacaggtagccacctgcctttctcccggcttccctagcagagtttgctcaggcacaaatgtgcacctggagcatttgaaatgtgctagtgaggctgaggaagagaattttaaatttcattgaattgt

SEQ ID NO: 415401 - DNA, 1537 bp, Homo sapiens
  misc_feature (44)..(44): n is a, c, g, or t
tcctacttctagacattaaatcggtctcatggatcagcgtgggnttaatggacgagggtacttggaatgtacatcctggtccaggacactgacacggccctgaaagaactggagaaagtgaccggaatccagcttctcaataccccggcccctctgccgacctcttgcaatccaagtgacatgagccatgggtacgtgacagtaaagcccagggtccgtctgcattttgtggagctgggctccggccctgctgtgtgcctctgccatggatttcccgagagttggtattcttggaggtaccagatccctgctctggcccaggcaggttaccgggtcctagctatggacatgaaaggctatggagagtcatctgctcctcccgaaatagaagaatattgcatggaagtgttatgtaaggagatggtaaccttcctggataaactgggcctctctcaagcagtgttcattggccatgactggggtggcatgctggtgtggtacatggctctcttctaccccgagagagtgagggcggtggccagtttgaatactcccttcataccagcaaatcccaacatgtcccctttggagagtatcaaagccaacccagtatttgattaccagctctacttccaagaaccaggagtggctgaggctgaactggaacagaacctgagtcggactttcaaaagcctcttcagagcaagcgatgagagtgttttatccatgcataaagtctgtgaagcgggaggactttttgtaaatagcccagaagagcccagcctcagcaggatggtcactgaggaggaaatccagttctatgtgcagcagttcaagaagtctggtttcagaggtcctctaaactggtaccgaaacatggaaaggaactggaagtgggcttgcaaaagcttgggacggaagatcctgattccggccctgatggtcacggcggagaaggacttcgtgctcgttcctcagatgtcccagcacatggaggactggattccccacctgaaaaggggacacattgaggactgtgggcactggacacagatggacaagccaaccgaggtgaatcagatcctcattaagtggctggattctgatgcccggaacccaccggtggtctcaaagatgtagaacgcagcgtgtgcccacgctcagcaggtgtgccatccttccacctgctggggcaccattcttagtatacagaggtggccttacacacatcttgcatggatggcagcattgttctgaaggggtttgcagaaaaaaaagattttctttacataaagtgaatcaaatttgacattattttagatcccagagaaatcaggtgtgattagttctccaggcatgaatgcatcgtccctttatctgtaagaacccttagtgtcctgtagggggacagaatggggtggccaggtggtgatttctctttgaccaatgcatagtttggcagaaaaatcagccgttcatttagaagaatcttagcagagattgggatgccttactcaataaagctaagatgactatg

SEQ ID NO: 415402 - DNA, 1050 bp, Homo sapiens
gcggggcagagccgggccaagctgggcgggtcatgcgccctggccttcgcgcatctcccaggttagctgcgtgtccgggtgctaggctgcagacccgccgccatgacgctgcgcgcggccgtcttcgaccttgacggggtgctggcgctgccagcggtgttcggcgtcctcggccgcacggaggaggccctggcgctgcccagaggacttctgaatgatgctttccagaaagggggaccagagggtgccactacccggcttatgaaaggagagatcacactttcccagtggataccactcatggaagaaaactgcaggaagtgctccgagaccgctaaagtctgcctccccaagaatttctccataaaagaaatctttgacaaggcgatttcagccagaaagatcaaccgccccatgctccaggcagctctcatgctcaggaagaaaggattcactactgccatcctcaccaacacctggctggacgaccgtgctgagagagatggcctggcccagctgatgtgtgagctgaagatgcactttgacttcctgatagagtcgtgtcaggtgggaatggtcaaacctgaacctcagatctacaagtttctgctggacaccctgaaggccagccccagtgaggtcgtttttttggatgacatcggggctaatctgaagccagcccgtgacttgggaatggtcaccatcctggtccaggacactgacacggccctgaaagaactggagaaagtgaccggaatccagcttctcaataccccggcccctctgccgacctcttgcaatccaagtgacatgagccatgggtacgtgacagtaaaggtgagtcagttttgtctctcagtcggctaagtgctctcccaccaggtcacctaaaacgaccagcagagacacccaagaggctgagctgtgaggatcacctgaacctgagcctgggaagtggaggttgcagtgagctgtgatcacaccactgtgctccagcctgggcaacggagtgaaaccctgtctcaagaaaaaaaaaaaaaaaaaaggacc

SEQ ID NO: 415403 - DNA, 949 bp, Homo sapiens
gcggggcagagccgggccaagctgggcgggtcatgcgccctggccttcgcgcatctcccaggttagctgcgtgtccgggtgctaggctgcagacccgccgccatgacgctgcgcgcggccgtcttcgaccttgacggggtgctggcgctgccagcggtgttcggcgtcctcggccgcacggaggaggccctggcgctgcccagaggacttctgaatgatgctttccagaaagggggaccagagggtgccactacccggcttatgaaaggagagatcacactttcccagtggataccactcatggaagaaaactgcaggaagtgctccgagaccgctaaagtctgcctccccaagaatttctccataaaagaaatctttgacaaggcgatttcagccagaaagatcaaccgccccatgctccaggcagctctcatgctcaggaagaaaggattcactactgccatcctcaccaacacctggctggacgaccgtgctgagagagatggcctggcccagctgatgtgtgagctgaagatgcactttgacttcctgatagagtcgtgtcaggtgggaatggtcaaacctgaacctcagatctacaagtttctgctggacaccctgaaggccagccccagtgaggtcgtttttttggatgacatcggggctaatctgaagccagcccgtgacttgggaatggtcaccatcctggtccaggacactgacacggccctgaaagaactggagaaagtgaccggaatccagccacagcaaactaatacaaaggcccagagagtttgattttggccgacttgaaggagagacctttcagcagagctgtgctggagtgactgctgtgtgagcttcgcatggtgtcccacatgagcctgggcgaccatcggaggagctgccacagaagcaaataatattaattaaagtccaaattctctcg

SEQ ID NO: 415404 - DNA, 878 bp, Homo sapiens
agcctcgggggcggggaggccgctgcggcgccgagggcgtcttggaggggtccccgcggggccttcggcctgggccgagccggggagcgagggcgccgcagatctttcatcgggataggaccccggggactaggcttttcccgggccgctcgttcctggccggcttgtgggctgcaggggtgggggcggaggaggacgaccctggctggacgctggtcagcatcctgcttgtgagaccggttccgcggtccgcagcgctggtggctgcaaggtttgtgtacggacgcatctgtcggctctcgtatttaaaaacgacggcttctgccaaaagagaaaagccatatctgccgacggacgctcgagagataatcgtggaactttatcagcgatggggctgttggtcacctttgccctccctctcttttcttttttcttaatcttttattttcgttttttgggagatgtcagagggcctttccctgttaggatgacttttatctttgctcttgtaatggctcaagatagttgggaggtaatttgcattcactttatgcatacccaccttgaaaaacgtattttggttcgcctgaaactgttgttggtttgagcataatttatgtttagaaagacaaaaagcaattgtcatatctccaaagaccaaagacatagctgatagctgtatgcattactggtaagttaaagaaagattttttgtgtgaaaaattgactgagatcttaatggggataggaaatagaatgctgataggtcgactgtgtctatgagtagaggcgcctagtgaaaacaagcttggagtggatgagtaggagttcaacaggcaccagagagaggagggcatttcaggcagagggtgtgaatt

SEQ ID NO: 415405 - DNA, 406 bp, Homo sapiens
aaaaatcaaatccagaataatcttcacttttaataaactatgggccagaccactgaggataaacacatgaacattattcatgtcctcaaaactttaagggaaaaaagggaagggtcatcttggaacaaaaatttaggaaaagggagaggaagcaaatttaaaatatattaaataatattctacatatacacacaaacacggagcgaaaagtcaacaggccttattatttgatgagaatcaagaatgtctccgaggtatctagctgtgaagccgaaacccgatgctctcaacagctaacaggacaagctaagactatctatcctatcactaaaggttgactcattatcaacttggtaaatctaacctgaacacaaaggtggatttccagagatgtcttgggccatct

SEQ ID NO: 415406 - DNA, 408 bp, Homo sapiens
caggctggagtgcattggcgcaatctcggctcactgcaacctctgcctcccgcatccaagcaattctcctgcctcagcctcccgaatggttgggactagaggcacccaccaccacgcccagctaactttggtatttttagtagagatgggatttcaccatattggccaggctggtctcgaactcctgaccttgtgatcctcccacctcggcctcccaaagtgctgggattacaggcatgagccactgtgcccagcccaccccatacagtttcaaaaggacttctctggccctattgtttcaatcactaatattacctacctagtagcctgcaaatcatggtgatcccctgtccagcaacaagaagggcacaggtgcagcaatctgtggtcactcactcctcgatcttg

SEQ ID NO: 415407 - DNA, 409 bp, Homo sapiens
aaaagtctcggtgctatcctgattctttttttccctttcacttcttccaccccatccatcagcaagtcctattcacactaccttcaaaatgaaagccatacaaatctacttcttcctacctctactacgccaccttggcccaagcagccatgatctctcatttggacaacagctttttctcttgccccagccaattttctctctaaaccaaacccagaataattttctttaaaataccgtttgtcctttccctgtctgcagccctccaatgattctgccacacacagaatgcaatggaaactctcaatctcagcatacacagccttccaggatctgctccctcctctctctccaacctcactctgccactcccaggccgaaccacactggctgccttctgcctctgtgg

SEQ ID NO: 415408 - DNA, 441 bp, Homo sapiens
atgccaagtaaaataatgcaatgtatctctctctgcgtatctgctcaccaggaggcatagtaacacaagagacagtacagtttttcacttgccacgtaacaatttttgaaaacatggaatggagaaattttacatcagagtagttcactagagaggaaacggagggaggctatttgcctagtgctttcctgcctcctgcttcccatgagatcacatgatgcagaacatttggaaataatcacctctttcacttctgtgtgatgatgtccagcctctgggtgactggtcagtaagccatatcctataacctgtagtatgatatttcatccatgtctaaaaatgggattgaaatgaagttctgagaggtgggatatggaccaggagaaagaggaaaggaactagttggaagaatattcctaacatagaaccttttcatttaaa

SEQ ID NO: 415409 - DNA, 990 bp, Homo sapiens
agctttgctcaccgtgattttcaaggacacatcttgtgctcttccctgcctgccatccagactatacccagtcagggtggcaggagctgctgccccttcctccctgagtcctggtcgtgggtggtggagatgtgccatgacgctcacggaggcatgctcaccccttcctctgtggcagaggggatggctgcacgacagctcttccctgtcctttccaaagcgtctgtggttccactttttggggcaaagcaggaatactggaagagagagaaagtggtcctttctatagtaataaagttgacattgattcaagttcatgcttggggaaaggacagggctactaacaattataatgctgggagcaatggaattttctcatgggtatgtggtaggtttaattttaattatcccagttaattcttagaactgctctgtgaagtatttcccgctttgtgcttaagttctaaaagatcctgtgccaaaaccaagaatgaaaacccaagcattctttcttgcccatcgatctttctctcatcaggccacttcttgggttgatagtggtgagtgtagccgctgccactttcagaatacccaccatgggccccagtcactgtgtggcgtggagaagagatggttctctctgtgtcatagctgaacaagcccagcccagagaggtttctgccctaggagctctcgatggtggaattgggatgcgatcccacatcctgcctgttttgaaaacagcattctttatttccaattcctgcttccattgttccttttaatatttctttgtttagctcacaaaaacacggcttgcggagctgctgcgtgcagctgtagctgtttctctgggtgcagcctgcatccgccttcctgcccgcctcctttcctgcactgccatcgtggtctccgggcacttggtccctttctcttcccctgagtccctttggctcccctgtgccacccttgtgatccacaggctctgcc

SEQ ID NO: 415410 - DNA, 480 bp, Homo sapiens
ttgtatcatacgcatcgacctcaacagtttcttccaggctatttgccattcttgattgaatagactgttaccaaggtcactatgcgccaaatccagtgatcacatttctgtcctcatttttttactcagcggtagcaagtcacaaagttgacagttcttttcttcttcaaacactttctgctgtggcatcatgatgctatgttctcctccatacctactgctcttcttggcctttcttgctgacttctgctctgttggcttccaaatgctggtctgaaagactgtaatctttctgaaggtgattcagtactgtggcgtttaatgccatctaaatgctgatgaatcccaaatgtatatctctaatcctgatctctgcaatgagctcctaatttatgtaaaaaaccctctgcttgacctttccactgggatgtctaagagctatctcaaacttctcaagaccaaaacagagctatccattct

SEQ ID NO: 415411 - DNA, 632 bp, Homo sapiens
aataattacaagtgctatgaaggaagcagagtgctgagacttacagaatttagacaaggcaaggttcttctctgctttaaaccttccagagctccccatgggctgtgcaatgcagttccaagtccttagcatggcattcaaggctctttaaaacatcacatcttgcctgatgttcccggccactgatgctctcaatactccaggcacaactaattactggccactccctggacatgtgtgttgtgccaaggagctcagatattgacctgtcagtgataggagtggttctaagcatggtggtgacacattctcatccaatgtacactgtggatggtaattctgcagtctgtaagagggcctggtcagggagagacacgagaacctgttagaaagcatcaatagggcttcagcaagaggatggcgtggcctgacatgtgagtgggaagcacagatctatgagatactgaagtgatccattctttaagacttggtcatggattggctgtgagggcgaggaaaaggggatagcaaatgacttccagctcctagccttgaacaggttggtgagctgcagactgaggcagtaaaagtcacagaaaagtggtcttaacgtagtaacactcctttaatca

SEQ ID NO: 415412 - DNA, 659 bp, Homo sapiens
tgtctgttttgttttaaccatttccagattatttgcatgggtgcaaaagaaaatggtttgccgctggagtatcaagagaagttaaaagcaatagaaccaaatgactatacaggaaaggtctcagaagaaattgaagacatcatcaaaaagggggaaacacaaactctttagaacataacagaatatatctaagggtattctatgtgctaatataaaatatttttaacacttgagaacagggatctgggggatctccacgtttgatccattttcagcagtgctctgaaggagtatcttacttgggtgattccttgtttttagactataaaaagaaactgggataggagttagacaatttaaaaggggtgtatgagggcctgaaatatgtgacaaatgaatgtgagtaccccttctgtgaacactgaaagctattctcttgaattgatcttaagtgtctccttgctctggtaaaagatagatttgtagctcacttgatgatggtgctggtgaattgctctgctctgtctgagatttttaaaaatcagcttaatgagagtaatctgcagacaattgataataacattttgaaaattggaaagatggtatactgtttttagaggaataaacgtatttgtggtttaacctgttgtctctactaa

SEQ ID NO: 415413 - DNA, 996 bp, Homo sapiens
caaaaatattatgtgtaatgatagaattatgtttttaaaactatttattaaaaaagtttttagaaatatatgtgagtcagaattctagacatgtattttctccctttctttttttctttctctctttctttctttcttttgcctggcaataaatttttgcttcatttttatgatgtagacatgtattaaagtaggaaagaatatttatgagtgtattttaatagatttagtctctctctctttctctttctatatatatatacatatatgtatatatatgtatatgtgtgtgtgtatctatatatatatatatatgcttttgtaatgtttttctccccgtaacacagtattttatgaataccaagattcatttttataggggaaaaaaacatactttctactgctgaaatgtttttcatccctaggtggagaaagaaacgtcacactgcctttcagaatcagggaaatcacccttgcaagcacaagacaagaatgtgggatagagaccccaaaattcctgttcagaacctaagcttagctctctgttggcaggcccaatcaggtcatggcacctgtaataggtaatctggttcctaggcctcgtttggaattttttagtatgaaacctagagaaattagcctggtatagattatgaaagtaccgctaaacacagttgccatttattcccccatgtccaattcagagcaagggtaacctctggcgttgtaaccgaaactgctctctgtaaactttaaattttttttgaagaatggtattttttttcttaaaaggtcatataaattttatatagatatgtttgtcttaatattaaaatatttaaaatcatatattgagaaagttgatattccatgaggatgcttcatttggctttgaaaactccatacacattcatgctcagtgtgagaggaatgatggtattctattttatataattgtttattctagagttatctgaaagctaatacttcatactt

SEQ ID NO: 415414 - DNA, 775 bp, Homo sapiens
gaccggcccacgcttcccgccagtcccctaaccctgaggctgccgcgcggcggtcactgcgccggggtagtgggccccagtgttgcgctctctggccgttccttacactttgcttcaggctccagtgcaggggcgtagtgggatatggccaactcgggctgcaaggacgtcacgggtccagatgaggagagttttctgtactttgcctacggcagcaacctgctgacagagaggatccacctccgaaacccctcggcggcgttcttctgtgtggcccgcctgcagtgccagggaatttttcaaaagctttgaacctttgggcaaattccccaaggccaaaaaccaaagtgcaaaaacctttgggcgcattgcgcacggccgacattagcgcccaacccaattttcttctttcccaagaaagtttccctttgggccggattgcacaggttggtggggggcacggtaacgataaattgggcacccacattggaaaccaaaaaaggacaacagttttttaacaaaaatttttccttccttaggcgaactttggaacgggccaacaaggaaacacgggcgggggggttttttaacacaccaaccgggtttggcggcaaacacttgggcttcaactttgtgttttcgggcttaacacaattcacggcaaaaaacgggtttttaacaaacaagggggtttttttggggcccaaaaaaacttttcccaaaagggaaacaaggcggcacccaacacgggaaaaaaattttaaaaccccccttg

SEQ ID NO: 415415 - DNA, 441 bp, Homo sapiens
gaccggcccacgcttcccgccagtcccctaaccctgaggctgccgcgcggcggtcactgcgccggggtagtgggccccagtgttgcgctctctggccgttccttacactttgcttcaggctccagtgcaggggcgtagtgggatatggccaactcgggctgcaaggacgtcacgggtccagatgaggagagttttctgtactttgcctacggcagcaacctgctgacagagaggatccacctccgaaacccctcggcggcgttcttctgtgtggcccgcctgcagaatttaaattgcttttgttcattttccatactactccccacacttcatcgccaggactctgaaaaatggtggctatccctccatgccaagtttgacttgttttgccttgggaattgccaaagtcaagcttaaaatcctgcaggcgggccacacaga

SEQ ID NO: 415416 - DNA, 861 bp, Homo sapiens
gggcaaatttggtgatatatgttggtaggatactctacagacataaaaggagagagaatattataacccacatgtagccatcacccagcttgtctctaagtaaaaatttatgtgtatgtaagaagactgggaagtaatttgcaaaaatgaaaacaattgtgttcaggcattggggttatgggattttttttccttaaactttttgtttttgttaagatgtctatacatattcagtgtatgtttcatttttaaagaaaaatatttaaaaaacataatccttgggatctgggtcctgtctgtttaactttatattttccacagcttcttatgcatagaaggaactcagtttattgaatgttttaattgcatggagttcaaggtaaatcctttttattttgatgagggaaatttggattcaagtggatattgatcatatcactttgatttcctttgtaggattttaagcttgactttggcaattcccaaggcaaaacaagtcaaacttggcatggagggatagccaccatttttcagagtcctggcgatgaagtgtggggagtagtatggaaaatgaacaaaagcaatttaaattctctggatgagtaggtggcttctaattataagttaaacagtaattaattcagaaagcagattgtatgtgaggatgtgtacctgtgtgttagtttttcaaaaccacatactacagacatattcattatacttttagagtcaacataaaaggcatgataatgtgagtttgctaaaaggtctagaaaggctatattttctgataaagatttggggggatgtttgtaatctcttatgtaaaagatggaagcccttatttttcattctattgtc

SEQ ID NO: 415417 - DNA, 826 bp, Homo sapiens
gggcaaatttggtgatatatgttggtaggatactctacagacataaaaggagagagaatattataacccacatgtagccatcacccagcttgtctctaagtaaaaatttatgtgtatgtaagaagactgggaagtaatttgcaaaaatgaaaacaattgtgttcaggcattggggttatgggattttttttccttaaactttttgtttttgttaagatgtctatacatattcagtgtatgtttcatttttaaagaaaaatatttaaaaaacataatccttgggatctgggtcctgtctgtttaactttatattttccacagcttcttatgcatagaaggaactcagtttattgaatgttttaattgcatggagttcaaggtaaatcctttttattttgatgagggaaatttggattcaagtggatattgatcatatcactttgatttcctttgtaggattttaagcttgactttggcaattcccaaggcaaaacaagtcaaacttggcatggagggatagccaccatttttcagagtcctggcgatgaagtgtggggagtagtatggaaaatgaacaaaagcaatttaaattctctggatgagtaggtggcttctaattataagttaaacagtaattaattcagaaagcagattgtatgtgaggatgtgtacctgtgtgttagtttttcaaaacccttcttccgcactatttcttttcctttataggtacaataaaagcttataatgtgtgttgtttaaaggtataaagggtctatttttttgtgattgggggagtttgtaactcttattgaagggcctttttttt

SEQ ID NO: 415418 - DNA, 1224 bp, Homo sapiens
gaccggcccacgcttcccgccagtcccctaaccctgaggctgccgcgcggcggtcactgcgccggggtagtgggccccagtgttgcgctctctggccgttccttacactttgcttcaggctccagtgcaggggcgtagtgggatatggccaactcgggctgcaaggacgtcacgggtccagatgaggagagttttctgtactttgcctacggcagcaacctgctgacagagaggatccacctccgaaacccctcggcggcgttcttctgtgtggcccgcctgcaggattttaagcttgactttggcaattcccaaggcaaaacaagtcaaacttggcatggagggatagccaccatttttcagagtcctggcgatgaagtgtggggagtagtatggaaaatgaacaaaagcaatttaaattctctggatgagcaagaaggggttaaaagtggaatgtatgttgtaatagaagttaaagttgcaactcaagaaggaaaagaaataacctgtcgaagttatctgatgacaaattacgaaagtgctcccccatccccacagtataaaaagattatttgcatgggtgcaaaagaaaatggtttgccgctggagtatcaagagaagttaaaagcaatagaaccaaatgactatacaggaaaggtctcagaagaaattgaagacatcatcaaaaagggggaaacacaaactctttagaacataacagaatatatctaagggtattctatgtgctaatataaaatatttttaacacttgagaacagggatctgggggatctccacgtttgatccattttcagcagtgctctgaaggagtatcttacttgggtgattccttgtttttagactataaaaagaaactgggataggagttagacaatttaaaaggggtgtatgagggcctgaaatatgtgacaaatgaatgtgagtaccccttctgtgaacactgaaagctattctcttgaattgatcttaagtgtctccttgctctggtaaaagatagatttgtagctcacttgatgatggtgctggtgaattgctctgctctgtctgagatttttaaaaatcagcttaatgagagtaatctgcagacaattgataataacattttgaaaattggaaagatggtatactgtttttagaggaataaacgtattatgatgcggccgtgccttatctaaaatttatatcccccgtcgccgcaccata

SEQ ID NO: 415419 - DNA, 1216 bp, Homo sapiens
  misc_feature (1214)..(1214): n is a, c, g, or t
gaccggcccacgcttcccgccagtcccctaaccctgaggctgccgcgcggcggtcactgcgccggggtagtgggccccagtgttgcgctctctggccgttccttacactttgcttcaggctccagtgcaggggcgtagtgggatatggccaactcgggctgcaaggacgtcacgggtccagatgaggagagttttctgtactttgcctacggcagcaacctgctgacagagaggatccacctccgaaacccctcggcggcgttcttctgtgtggcccgcctgcaggattttaagcttgactttggcaattcccaaggcaaaacaagtcaaacttggcatggagggatagccaccatttttcagagtcctggcgatgaagtgtggggagtagtatggaaaatgaacaaaagcaatttaaattctctggatgagcaagaaggggttaaaagtggaatgtatgttgtaatagaagttaaagttgcaactcaagaaggaaaagaaataacctgtcgaagttatctgatgacaaattacgaaagtgctcccccatccccacagtataaaaagattatttgcatgggtgcaaaagaaaatggtttgccgctggagtatcaagagaagttaaaagcaatagaaccaaatgactatacaggaaaggtctcagaagaaattgaagacatcatcaaaaagggggaaacacaaactctttagaacataacagaatatatctaagggtattctatgtgctaatataaaatatttttaacacttgagaacagggatctgggggatctccacgtttgatccattttcagcagtgctctgaaggagtatcttacttgggtgattccttgtttttagactataaaaagaaactgggataggagttagacaatttaaaaggggtgtatgagggcctgaaatatgtgacaaatgaatgtgagtaccccttctgtgaacactgaaagctattctcttgaattgatcttaagtgtctccttgctctggtaaaagatagatttgtagctcacttgatgatggtgctggtgaattgctctgctctgtctgagatttttaaaaatcagcttaatgagagtaatctgcagacaattgataataacattttgaaaattggaaagatggtatactgtttttagaggaataaacgtattccagatgcgggccgctttcccttttagtggaggggttaattnct

SEQ ID NO: 415420 - DNA, 1053 bp, Homo sapiens
gaccggcccacgcttcccgccagtcccctaaccctgaggctgccgcgcggcggtcactgcgccggggtagtgggccccagtgttgcgctctctggccgttccttacactttgcttcaggctccagtgcaggggcgtagtgggatatggccaactcgggctgcaaggacgtcacgggtccagatgaggagagttttctgtactttgcctacggcagcaacctgctgacagagaggatccacctccgaaacccctcggcggcgttcttctgtgtggcccgcctgcaggcaagaaggggttaaaagtggaatgtatgttgtaatagaagttaaagttgcaactcaagaaggaaaagaaataacctgtcgaagttatctgatgacaaattacgaaagtgctcccccatccccacagtataaaaagattatttgcatgggtgcaaaagaaaatggtttgccgctggagtatcaagagaagttaaaagcaatagaaccaaatgactatacaggaaaggtctcagaagaaattgaagacatcatcaaaaagggggaaacacaaactctttagaacataacagaatatatctaagggtattctatgtgctaatataaaatatttttaacacttgagaacagggatctgggggatctccacgtttgatccattttcagcagtgctctgaaggagtatcttacttgggtgattccttgtttttagactataaaaagaaactgggataggagttagacaatttaaaaggggtgtatgagggcctgaaatatgtgacaaatgaatgtgagtaccccttctgtgaacactgaaagctattctcttgaattgatcttaagtgtctccttgctctggtaaaagatagatttgtagctcacttgatgatggtgctggtgaattgctctgctctgtctgagatttttaaaaatcagcttaatgagagtaatctgcagacaattgataataacattttgaaaattggaaagatggtatactgtttttagaggaataaacgtatttgtggtttaacctgttgtctctactaa

SEQ ID NO: 415421 - DNA, 1946 bp, Homo sapiens
  misc_feature (1082)..(1082): n is a, c, g, or t
gtttcatactgtgaaaaggcatgaagatttctgtaattgttacatatttttgttgattttgaaagtacttgaattcagtttttaaagaacaattatttaagatggcaggtgaatcagtaaataagtaatactttgtaaaagcatctgaggacatgttagaaatgctttgatactttttatgactagagctctcagagttgtgtggcagagcatttcatacaaagaaaagttgcagaaaagagtaggccttgagaagagagggttatctgacatgctcgatactttacctcacttgtgaaggagaaagagccatcctctctacctttgttctaggtggatattctcttgctgtcagaacaccatccatttttgtagcccaaagaacaatgtttccatagtataaagttgaaaaaaaaaacaaactatattgaagcctctttaaagacaagataaatacagagagttatgttaggagtataacaagtaatattatgtctcaggccttctaattgaaatgctaagctaagcttacttttttttttttgtaacggagtctcgctcttgttgcccaggctagagtgcaatggcgtgatctcggctcaccccaacctctgcctcccgggttccagtgattctcccgcctcagcctcccgagtagctgggattacaggcatgcaccaccatgtcggactaattttttgtgtgttttttttttagtagagacaaggtttctccatgttggtcaggctggcctcgaactcctgacctcagatgatccacccacctcggcctcccaaagtgctaggattataggtgtgagccactgcacccggcctttttttttttctttttgagatggagtcttgctgtctcccagcctggattgccacagtgcaatctcggctcactgcaacctcctgacctcaagtgatccacctcagcctcccaaagtgctgggattacagatgtgagccaccgtacccagcctaaatgctaagcttacttttgatgtggtaaatttatatattctctatcccaaatacatagggagcaagtatgttcagatgtagttaaatgtttantcccatacaccatcttgactattataaaaagaccttacccagtgagctaaattggctaggtcaaatgtggttaaaatttggctgttctggtttcaggcaagaaggggttaaaagtggaatgtatgttgtaatagaagttaaagttgcaactcaagaaggaaaagaaataacctgtcgaagttatctgatgacaaattacgaaagtgctcccccatccccacagtataaaaagattatttgcatgggtgcaaaagaaaatggtttgccgctggagtatcaagagaagttaaaagcaatagaaccaaatgactatacaggaaaggtctcagaagaaattgaagacatcatcaaaaagggggaaacacaaactctttagaacataacagaatatatctaagggtattctatgtgctaatataaaatatttttaacacttgagaacagggatctgggggatctccacgtttgatccattttcagcagtgctctgaaggagtatcttacttgggtgattccttgtttttagactataaaaagaaactgggataggagttagacaatttaaaaggggtgtatgagggcctgaaatatgtgacaaatgaatgtgagtaccccttctgtgaacactgaaagctattctcttgaattgatcttaagtgtctccttgctctggtaaaagatagatttgtagctcacttgatgatggtgctggtgaattgctctgctctgtctgagatttttaaaaatcagcttaatgagagtaatctgcagacaattgataataacattttgaaaattggaaagatggtatactgtttttagaggaataaacgtatttgtggtttaacctgttgtctctactaa

SEQ ID NO: 415422 - DNA, 1370 bp, Homo sapiens
gggcaaatttggtgatatatgttggtaggatactctacagacataaaaggagagagaatattataacccacatgtagccatcacccagcttgtctctaagtaaaaatttatgtgtatgtaagaagactgggaagtaatttgcaaaaatgaaaacaattgtgttcaggcattggggttatgggattttttttccttaaactttttgtttttgttaagatgtctatacatattcagtgtatgtttcatttttaaagaaaaatatttaaaaaacataatccttgggatctgggtcctgtctgtttaactttatattttccacagcttcttatgcatagaaggaactcagtttattgaatgttttaattgcatggagttcaaggtaaatcctttttattttgatgagggaaatttggattcaagtggatattgatcatatcactttgatttcctttgtaggattttaagcttgactttggcaattcccaaggcaaaacaagtcaaacttggcatggagggatagccaccatttttcagagtcctggcgatgaagtgtggggagtagtatggaaaatgaacaaaagcaatttaaattctctggatgagcaagaaggggttaaaagtggaatgtatgttgtaatagaagttaaagttgcaactcaagaaggaaaagaaataacctgtcgaagttatctgatgacaaattacgaaagtgctcccccatccccacagtataaaaagattatttgcatgggtgcaaaagaaaatggtttgccgctggagtatcaagagaagttaaaagcaatagaaccaaatgactatacaggaaaggtctcagaagaaattgaagacatcatcaaaaagggggaaacacaaactctttagaacataacagaatatatctaagggtattctatgtgctaatataaaatatttttaacacttgagaacagggatctgggggatctccacgtttgatccattttcagcagtgctctgaaggagtatcttacttgggtgattccttgtttttagactataaaaagaaactgggataggagttagacaatttaaaaggggtgtatgagggcctgaaatatgtgacaaatgaatgtgagtaccccttctgtgaacactgaaagctattctcttgaattgatcttaagtgtctccttgctctggtaaaagatagatttgtagctcacttgatgatggtgctggtgaattgctctgctctgtctgagatttttaaaaatcagcttaatgagagtaatctgcagacaattgataataacattttgaaaattggaaagatggtatactgtttttagaggaataaacgtatttgtggtttaacctgttgtctctactaa

SEQ ID NO: 415423 - DNA, 1078 bp, Homo sapiens
gaccggcccacgcttcccgccagtcccctaaccctgaggctgccgcgcggcggtcactgcgccggggtagtgggccccagtgttgcgctctctggccgttccttacactttgcttcaggctccagtgcaggggcgtagtgggatatggccaactcgggctgcaaggacgtcacgggtccagatgaggagagttttctgtactttgcctacggcagcaacctgctgacagagaggatccacctccgaaacccctcggcggcgttcttctgtgtggcccgcctgcaggcaagaaggggttaaaagtggaatgtatgttgtaatagaagttaaagttgcaactcaagaaggaaaagaaataacctgtcgaagttatctgatgacaaattacgaaagtgctcccccatccccacagtataaaaagattatttgcatgggtgcaaaagaaaatggtttgccgctggagtatcaagagaagttaaaagcaatagaaccaaatgactatacaggaaaggtctcagaagaaattgaagacatcatcaaaaagggggaaacacaaactctttagaacataacagaatatatctaagggtattctatgtgctaatataaaatatttttaacacttgagaacagggatctgggggatctccacgtttgatccattttcagcagtgctctgaaggagtatcttacttgggtgattccttgtttttagactataaaaagaaactgggataggagttagacaatttaaaaggggtgtatgagggcctgaaatatgtgacaaatgaatgtgagtaccccttctgtgaacactgaaagctattctcttgaattgatcttaagtgtctccttgctctggtaaaagatagatttgtagctcacttgatgatggtgctggtgaattgctctgctctgtctgagatttttaaaaatcagcttaatgagagtaatctgcagacaattgataataacattttgaaaattggaaagatggtatactgtttttagaggaataaacgtattatgatgcggccgtgccttatctaaaatttatatcccccgtcgccgcaccata

SEQ ID NO: 415424 - DNA, 1355 bp, Homo sapiens
gaccggcccacgcttcccgccagtcccctaaccctgaggctgccgcgcggcggtcactgcgccggggtagtgggccccagtgttgcgctctctggccgttccttacactttgcttcaggctccagtgcaggggcgtagtgggatatggccaactcgggctgcaaggacgtcacgggtccagatgaggagagttttctgtactttgcctacggcagcaacctgctgacagagaggatccacctccgaaacccctcggcggcgttcttctgtgtggcccgcctgcaggattttaagcttgactttggcaattcccaaggcaaaacaagtcaaacttggcatggagggatagccaccatttttcagagtcctggcgatgaagtgtggggagtagtatggaaaatgaacaaaagcaatttaaattctctggatgagcaagaaggggttaaaagtggaatgtatgttgtaatagaagttaaagttgcaactcaagaaggaaaagaaataacctgtcgaagttatctgatgacaaattacgaaagtgctcccccatccccacagtataaaaaggtggagaaagaaacgtcacactgcctttcagaatcagggaaatcacccttgcaagcacaagacaagaatgtgggatagagaccccaaaattcctgttcagaacctaagcttagctctctgttggcaggcccaatcaggtcatggcacctgtaatagattatttgcatgggtgcaaaagaaaatggtttgccgctggagtatcaagagaagttaaaagcaatagaaccaaatgactatacaggaaaggtctcagaagaaattgaagacatcatcaaaaagggggaaacacaaactctttagaacataacagaatatatctaagggtattctatgtgctaatataaaatatttttaacacttgagaacagggatctgggggatctccacgtttgatccattttcagcagtgctctgaaggagtatcttacttgggtgattccttgtttttagactataaaaagaaactgggataggagttagacaatttaaaaggggtgtatgagggcctgaaatatgtgacaaatgaatgtgagtaccccttctgtgaacactgaaagctattctcttgaattgatcttaagtgtctccttgctctggtaaaagatagatttgtagctcacttgatgatggtgctggtgaattgctctgctctgtctgagatttttaaaaatcagcttaatgagagtaatctgcagacaattgataataacattttgaaaattggaaagatggtatactgtttttagaggaataaacgtatttgtggtttaacctgttgtctctactaa

SEQ ID NO: 415425 - DNA, 962 bp, Homo sapiens
gtgtagctgcagcgactctcttataataccaccgttacagcgcactttaactttagacgtggggcaattcataatgcctaactcactgactttcgtgatcgtcagggatatccactattgttaacagtcttaggctatcgaaaaggcgggaatactgtggtacacgaacacaagggtttacattctctggatgagcaagaaggggttaaaagtggaatgtatgttgtaatagaagttaaagttgcaactcaagaaggaaaagaaataacctgtcgaagttatctgatgacaaattacgaaagtgctcccccatccccacagtataaaaagattatttgcatgggtgcaaaagaaaatggtttgccgctggagtatcaagagaagttaaaagcaatagaaccaaatgactatacaggaaaggtctcagaagaaattgaagacatcatcaaaaagggggaaacacaaactctttagaacataacagaatatatctaagggtattctatgtgctaatataaaatatttttaacacttgagaacagggatctgggggatctccacgtttgatccattttcagcagtgctctgaaggagtatcttacttgggtgattccttgtttttagactataaaaagaaactgggataggagttagacaatttaaaaggggtgtatgagggcctgaaatatgtgacaaatgaatgtgagtaccccttctgtgaacactgaaagctattctcttgaattgatcttaagtgtctccttgctctggtaaaagatagatttgtagctcacttgatgatggtgctggtgaattgctctgctctgtctgagatttttaaaaatcagcttaatgagagtaatctgcagacaattgataataacattttgaaaattggaaagatggtatactgtttttagaggaataaacgtatttgtggtttaacctgttgtctctactaa

SEQ ID NO: 415426 - DNA, 1145 bp, Homo sapiens
gaccggcccacgcttcccgccagtcccctaaccctgaggctgccgcgcggcggtcactgcgccggggtagtgggccccagtgttgcgctctctggccgttccttacactttgcttcaggctccagtgcaggggcgtagtgggatatggccaactcgggctgcaaggacgtcacgggtccagatgaggagagttttctgtactttgcctacggcagcaacctgctgacagagaggatccacctccgaaacccctcggcggcgttcttctgtgtggcccgcctgcaggattttaagcttgactttggcaattcccaaggcaaaacaagtcaaacttggcatggagggatagccaccatttttcagagtcctggcgatgaagtgtggggagtagtatggaaaatgaacaaaagcaatttaaattctctggatgagcaagaaggggttaaaagtggaatgtatgttgtaatagaagttaaagttgcaactcaagaaggaaaagaaataacctgtcgaagttatctgatgacaaattacgaaagtgctcccccatccccacagtataaaaagattatttgcatgggtgcaaaagaaaatggtttgccgctggagtatcaagagaagttaaaagcaatagaaccaaatgactatacaggaaaggtctcagaagaaattgaagacatcatcaaaaagggggaaacacaaacatttttaacacttgagaacagggatctgggggatctccacgtttgatccattttcagcagtgctctgaaggagtatcttacttgggtgattccttgtttttagactataaaaagaaactgggataggagttagacaatttaaaaggggtgtatgagggcctgaaatatgtgacaaatgaatgtgagtaccccttctgtgaacactgaaagctattctcttgaattgatcttaagtgtctccttgctctggtaaaagatagatttgtagctcacttgatgatggtgctggtgaattgctctgctctgtctgagatttttaaaaatcagcttaatgagagtaatctgcagacaattgataataacattttgaaaattggaaagatggtatactgtttttagaggaataaacgtatttgtggtttaacctgttgtctctactaa

SEQ ID NO: 415427 - DNA, 917 bp, Homo sapiens
gaccggcccacgcttcccgccagtcccctaaccctgaggctgccgcgcggcggtcactgcgccggggtagtgggccccagtgttgcgctctctggccgttccttacactttgcttcaggctccagtgcaggggcgtagtgggatatggccaactcgggctgcaaggacgtcacgggtccagatgaggagagttttctgtactttgcctacggcagcaacctgctgacagagaggatccacctccgaaacccctcggcggcgttcttctgtgtggcccgcctgcagattatttgcatgggtgcaaaagaaaatggtttgccgctggagtatcaagagaagttaaaagcaatagaaccaaatgactatacaggaaaggtctcagaagaaattgaagacatcatcaaaaagggggaaacacaaactctttagaacataacagaatatatctaagggtattctatgtgctaatataaaatatttttaacacttgagaacagggatctgggggatctccacgtttgatccattttcagcagtgctctgaaggagtatcttacttgggtgattccttgtttttagactataaaaagaaactgggataggagttagacaatttaaaaggggtgtatgagggcctgaaatatgtgacaaatgaatgtgagtaccccttctgtgaacactgaaagctattctcttgaattgatcttaagtgtctccttgctctggtaaaagatagatttgtagctcacttgatgatggtgctggtgaattgctctgctctgtctgagatttttaaaaatcagcttaatgagagtaatctgcagacaattgataataacattttgaaaattggaaagatggtatactgtttttagaggaataaacgtatttgtggtttaacctgttgtctctactaa

SEQ ID NO: 415428 - DNA, 1213 bp, Homo sapiens
caaaaatattatgtgtaatgatagaattatgtttttaaaactatttattaaaaaagtttttagaaatatatgtgagtcagaattctagacatgtattttctccctttctttttttctttctctctttctttctttcttttgcctggcaataaatttttgcttcatttttatgatgtagacatgtattaaagtaggaaagaatatttatgagtgtattttaatagatttagtctctctctctttctctttctatatatatatacatatatgtatatatatgtatatgtgtgtgtgtatctatatatatatatatatgcttttgtaatgtttttctccccgtaacacagtattttatgaataccaagattcatttttataggggaaaaaaacatactttctactgctgaaatgtttttcatccctaggtggagaaagaaacgtcacactgcctttcagaatcagggaaatcacccttgcaagcacaagacaagaatgtgggatagagaccccaaaattcctgttcagaacctaagcttagctctctgttggcaggcccaatcaggtcatggcacctgtaatagattatttgcatgggtgcaaaagaaaatggtttgccgctggagtatcaagagaagttaaaagcaatagaaccaaatgactatacaggaaaggtctcagaagaaattgaagacatcatcaaaaagggggaaacacaaactctttagaacataacagaatatatctaagggtattctatgtgctaatataaaatatttttaacacttgagaacagggatctgggggatctccacgtttgatccattttcagcagtgctctgaaggagtatcttacttgggtgattccttgtttttagactataaaaagaaactgggataggagttagacaatttaaaaggggtgtatgagggcctgaaatatgtgacaaatgaatgtgagtaccccttctgtgaacactgaaagctattctcttgaattgatcttaagtgtctccttgctctggtaaaagatagatttgtagctcacttgatgatggtgctggtgaattgctctgctctgtctgagatttttaaaaatcagcttaatgagagtaatctgcagacaattgataataacattttgaaaattggaaagatggtatactgtttttagaggaataaacgtatttgtggtttaacctgttgtctctactaa

SEQ ID NO: 415429 - DNA, 1138 bp, Homo sapiens
gaccggcccacgcttcccgccagtcccctaaccctgaggctgccgcgcggcggtcactgcgccggggtagtgggccccagtgttgcgctctctggccgttccttacactttgcttcaggctccagtgcaggggcgtagtgggatatggccaactcgggctgcaaggacgtcacgggtccagatgaggagagttttctgtactttgcctacggcagcaacctgctgacagagaggatccacctccgaaacccctcggcggcgttcttctgtgtggcccgcctgcaggattttaagcttgactttggcaattcccaaggcaaaacaagtcaaacttggcatggagggatagccaccatttttcagagtcctggcgatgaagtgtggggagtagtatggaaaatgaacaaaagcaatttaaattctctggatgagcaagaaggggttaaaagtggaatgtatgttgtaatagaagttaaagttgcaactcaagaaggaaaagaaataacctgtcgaagttatctgatgacaaattacgaaagtgctcccccatccccacagtataaaaaggtggagaaagaaacgtcacactgcctttcagaatcagggaaatcacccttgcaagcacaagacaagaatgtgggatagagaccccaaaattcctgttcagaacctaagcttagctctctgttggcaggcccaatcaggtcatggcacctgtaataggtaatctggttcctaggcctcgtttggaattttttagtatgaaacctagagaaattagcctggtatagattatgaaagtaccgctaaacacagttgccatttattcccccatgtccaattcagagcaagggtaacctctggcgttgtaaccgaaactgctctctgtaaactttaaattttttttgaagaatggtattttttttcttaaaaggtcatataaattttatatagatatgtttgtcttaatattaaaatatttaaaatcatatattgagaaagttgatattccatgaggatgcttcatttggctttgaaaactccatacacattcatgctcagtgtgagaggaatgatggtattctattttatataattgtttattctagagttatctgaaagctaatacttcatactt

SEQ ID NO: 415430 - DNA, 1050 bp, Homo sapiens
gaccggcccacgcttcccgccagtcccctaaccctgaggctgccgcgcggcggtcactgcgccggggtagtgggccccagtgttgcgctctctggccgttccttacactttgcttcaggctccagtgcaggggcgtagtgggatatggccaactcgggctgcaaggacgtcacgggtccagatgaggagagttttctgtactttgcctacggcagcaacctgctgacagagaggatccacctccgaaacccctcggcggcgttcttctgtgtggcccgcctgcagggtgagtgccccctcccgcgctacccacgccggggccgggatgcccagaaggcgcttcctcgggggcacacgtggccgatcgggccaggaatgcagttcttcttgatgagggtactaggacgcggcttccgcctcctgggcgggtccacctcctccgctgcgcccactgcccggccctgcccgggccacggtgccctctcgggctgcctggagctttccccctcctggcctttgcaccggctgctcggtctgcaccgatttggcctctcgtccactaacttaacagattgcatacagttggtacttctggagagtcttctctgacccgtgtctgggaattggttgccttctgttctgtacataacctttgttacagcacttctcacctggcattgtgaaaatccgtttacctgcctttcgcgcctcatctaagaggtcctgaaagctgggatcatgtcttatttgtaataatgctgtgttcagttaggtcaaggggctgcatgaactataaccagtgttggtaaatcattgctcttcagcccagtccattcattcatttagtacatattcttccggcacttaacactaagggtataaacatgattgagtaaagtggctgtttcgaggaactctcagtctgtaggacagaggtgcaatagattatgttcaaaacctttttgacagcgtcgaatgagacaaacatgatctctgctaacatcgtgagttcttagttgcaagcaacagaaactggctgatttaagcaaa

SEQ ID NO: 415431 - DNA, 1199 bp, Homo sapiens
gaccggcccacgcttcccgccagtcccctaaccctgaggctgccgcgcggcggtcactgcgccggggtagtgggccccagtgttgcgctctctggccgttccttacactttgcttcaggctccagtgcaggggcgtagtgggatatggccaactcgggctgcaaggacgtcacgggtccagatgaggagagttttctgtactttgcctacggcagcaacctgctgacagagaggatccacctccgaaacccctcggcggcgttcttctgtgtggcccgcctgcaggattttaagcttgactttggcaattcccaaggcaaaacaagtcaaacttggcatggagggatagccaccatttttcagagtcctggcgatgaagtgtggggagtagtatggaaaatgaacaaaagcaatttaaattctctggatgagcaagaaggggttaaaagtggaatgtatgttgtaatagaagttaaagttgcaactcaagaaggaaaagaaataacctgtcgaagttatctgatgacaaattacgaaagtgctcccccatccccacagtataaaaagattatttgcatgggtgcaaaagaaaatggtttgccgctggagtatcaagagaagttaaaagcaatagaaccaaatgactatacaggaaaggtctcagaagaaattgaagacatcatcaaaaagggggaaacacaaactctttagaacataacagaatatatctaagggtattctatgtgctaatataaaatatttttaacacttgagaacagggatctgggggatctccacgtttgatccattttcagcagtgctctgaaggagtatcttacttgggtgattccttgtttttagactataaaaagaaactgggataggagttagacaatttaaaaggggtgtatgagggcctgaaatatgtgacaaatgaatgtgagtaccccttctgtgaacactgaaagctattctcttgaattgatcttaagtgtctccttgctctggtaaaagatagatttgtagctcacttgatgatggtgctggtgaattgctctgctctgtctgagatttttaaaaatcagcttaatgagagtaatctgcagacaattgataataacattttgaaaattggaaagatggtatactgtttttagaggaataaacgtatttgtggtttaacctgttgtctctactaa

SEQ ID NO: 415432 - DNA, 1664 bp, Homo sapiens
gaccggcccacgcttcccgccagtcccctaaccctgaggctgccgcgcggcggtcactgcgccggggtagtgggccccagtgttgcgctctctggccgttccttacactttgcttcaggctccagtgcaggggcgtagtgggatatggccaactcgggctgcaaggacgtcacgggtccagatgaggagagttttctgtactttgcctacggcagcaacctgctgacagagaggatccacctccgaaacccctcggcggcgttcttctgtgtggcccgcctgcaggattttaagcttgactttggcaattcccaaggcaaaacaagtcaaacttggcatggagggatagccaccatttttcagagtcctggcgatgaagtgtggggagtagtatggaaaatgaacaaaagcaatttaaattctctggatgagcaagaaggggttaaaagtggaatgtatgttgtaatagaagttaaagttgcaactcaagaaggaaaagaaataacctgtcgaagttatctgatgacaaattacgaaagtgctcccccatccccacagtataaaaagattatttgcatgggtgcaaaagaaaatggtttgccgctggagtatcaagagaagttaaaagcaatagaaccaaatgactatacaggaaaggtctcagaagaaattgaagacatcatcaaaaagggggaaacacaaactctttagaacataacagaatatatctaagggtattctatgtgctaatataaaatatttttaacacttgagaacagggatctgggggatctccacgtttgatccattttcagcagtgctctgaaggagtatcttacttgggtgattccttgtttttagactataaaaagaaactgggataggagttagacaatttaaaaggggtgtatgagggcctgaaatatgtgacaaatgaatgtgagtaccccttctgtgaacactgaaagctattctcttgaattgatcttaagtgtctccttgctctggtaaaagatagatttgtagctcacttgatgatggtgctggtgaattgctctgctctgtctgagatttttaaaaatcagcttaatgagagtaatctgcagacaattgataataacattttgaaaattggaaagatggtatactgtttttagaggaataaacgtattaaaaaaaaaaaaaaaaaaaaaaaaaaaaaaaaaaaaaaaaaaaaaaagggggaggaagatcaaagattttccatagggggggccaaggttaagacatacacaagtccgtgtacacacaggggaccaaatagggagaagaacaatacaaactacgccacggacgcggtgcaaccaaccgagagacgcggaaacagggcaaccgagaaacctggcatagagcacctgattaacatgaggagccggagacaccacagatggcggcacacacctgccgtccaccaaccagattctaaaaccccctcagagggtcgcacacattcaaacatctttacagcggaatcaattggcggttgattccaccaagcgagatctatagtctggatgggccgaaacagatatgaggctcccgcgcgccaagcgtcagcaaatacattttggcggtcgcacgtgtgacagagcagtacatgcgcggagcgaacaactaccgacctg

SEQ ID NO: 415433 - DNA, 1063 bp, Homo sapiens
gaccggcccacgcttcccgccagtcccctaaccctgaggctgccgcgcggcggtcactgcgccggggtagtgggccccagtgttgcgctctctggccgttccttacactttgcttcaggctccagtgcaggggcgtagtgggatatggccaactcgggctgcaaggacgtcacgggtccagatgaggagagttttctgtactttgcctacggcagcaacctgctgacagagaggatccacctccgaaacccctcggcggcgttcttctgtgtggcccgcctgcaggattttaagcttgactttggcaattcccaaggcaaaacaagtcaaacttggcatggagggatagccaccatttttcagagtcctggcgatgaagtgtggggagtagtatggaaaatgaacaaaagcaatttaaattctctggatgaattatttgcatgggtgcaaaagaaaatggtttgccgctggagtatcaagagaagttaaaagcaatagaaccaaatgactatacaggaaaggtctcagaagaaattgaagacatcatcaaaaagggggaaacacaaactctttagaacataacagaatatatctaagggtattctatgtgctaatataaaatatttttaacacttgagaacagggatctgggggatctccacgtttgatccattttcagcagtgctctgaaggagtatcttacttgggtgattccttgtttttagactataaaaagaaactgggataggagttagacaatttaaaaggggtgtatgagggcctgaaatatgtgacaaatgaatgtgagtaccccttctgtgaacactgaaagctattctcttgaattgatcttaagtgtctccttgctctggtaaaagatagatttgtagctcacttgatgatggtgctggtgaattgctctgctctgtctgagatttttaaaaatcagcttaatgagagtaatctgcagacaattgataataacattttgaaaattggaaagatggtatactgtttttagaggaataaacgtatttgtggtttaacctgttgtctctactaa

SEQ ID NO: 415434 - DNA, 1219 bp, Homo sapiens
gaccggcccacgcttcccgccagtcccctaaccctgaggctgccgcgcggcggtcactgcgccggggtagtgggccccagtgttgcgctctctggccgttccttacactttgcttcaggctccagtgcaggggcgtagtgggatatggccaactcgggctgcaaggacgtcacgggtccagatgaggagagttttctgtactttgcctacggcagcaacctgctgacagagaggatccacctccgaaacccctcggcggcgttcttctgtgtggcccgcctgcaggattttaagcttgactttggcaattcccaaggcaaaacaagtcaaacttggcatggagggatagccaccatttttcagagtcctggcgatgaagtgtggggagtagtatggaaaatgaacaaaagcaatttaaattctctggatgagtggagaaagaaacgtcacactgcctttcagaatcagggaaatcacccttgcaagcacaagacaagaatgtgggatagagaccccaaaattcctgttcagaacctaagcttagctctctgttggcaggcccaatcaggtcatggcacctgtaatagattatttgcatgggtgcaaaagaaaatggtttgccgctggagtatcaagagaagttaaaagcaatagaaccaaatgactatacaggaaaggtctcagaagaaattgaagacatcatcaaaaagggggaaacacaaactctttagaacataacagaatatatctaagggtattctatgtgctaatataaaatatttttaacacttgagaacagggatctgggggatctccacgtttgatccattttcagcagtgctctgaaggagtatcttacttgggtgattccttgtttttagactataaaaagaaactgggataggagttagacaatttaaaaggggtgtatgagggcctgaaatatgtgacaaatgaatgtgagtaccccttctgtgaacactgaaagctattctcttgaattgatcttaagtgtctccttgctctggtaaaagatagatttgtagctcacttgatgatggtgctggtgaattgctctgctctgtctgagatttttaaaaatcagcttaatgagagtaatctgcagacaattgataataacattttgaaaattggaaagatggtatactgtttttagaggaataaacgtatttgtggtttaacctgttgtctctactaa

SEQ ID NO: 415435 - DNA, 691 bp, Homo sapiens
  misc_feature (16)..(16): n is a, c, g, or t
acccccttcctagccntcttacctacgaaagtgctcccccatccccacagtataaaaagattatttgcatgggtgcaaaagaaaatggtttgccgctggagtatcaagagaagttaaaagcaatagaaccaaatgactatacaggaaaggtctcagaagaaattgaagacatcatcaaaaagggggaaacacaaactctttagaacataacagaatatatctaagggtattctatgtgctaatataaaatatttttaacacttgagaacagggatctgggggatctccacgtttgatccattttcagcagtgctctgaaggagtatcttacttgggtgattccttgtttttagactataaaaagaaactgggataggagttagacaatttaaaaggggtgtatgagggcctgaaatatgtgacaaatgaatgtgagtaccccttctgtgaacactgaaagctattctcttgaattgatcttaagtgtctccttgctctggtaaaagatagatttgtagctcacttgatgatggtgctggtgaattgctctgctctgtctgagatttttaaaaatcagcttaatgagagtaatctgcagacaattgataataacattttgaaaattggaaagatggtatactgtttttagaggaataaacgtatttgtggtttaacctgttgtctctactaa

SEQ ID NO: 415436 - DNA, 771 bp, Homo sapiens
gaccggcccacgcttcccgccagtcccctaaccctgaggctgccgcgcggcggtcactgcgccggggtagtgggccccagtgttgcgctctctggccgttccttacactttgcttcaggctccagtgcaggggcgtagtgggatatggccaactcgggctgcaaggacgtcacgggtccagatgaggagagttttctgtactttgcctacggcagcaacctgctgacagagaggatccacctccgaaacccctcggcggcgttcttctgtgtggcccgcctgcaggattttaagcttgactttggcaattcccaaggcaaaacaagtcaaacttggcatggagggatagccaccatttttcagagtcctggcgatgaagtgtggggagtagtatggaaaatgaacaaaagcaatttaaattctctggatgagcaagaaggggttaaaagtggaatgtatgttgtaatagaagttaaagttgcaactcaagaaggaaaagaaataacctgtcgaagttatctgatgacaaattacgaaagtgctcccccatccccacagtataaaaaggtaagctatttacagactggtggtgattactttttaaatttcactgagagaaactaaagaatatattgtttttaaaagactttaggcccaacgtggtggctcatgcctgtaatgccaccactttggaaggctggggcgggcagatcacctgaagttaggagtttgagaccagcctagccaacgtggtgaaacctcatctctact

SEQ ID NO: 415437 - DNA, 4029 bp, Homo sapiens
cagtcaatcagcggcagagctgagaagggcacagccgcgcggcggagggcagagtcagccgagccgagtccagccggacgagcggaccagcgcagggcagcccaagcagcgcgcagcgaacgcccgccgccgcccacaccctctgcggtccccgcggcgcctgccacccttccctccttccccgcgtccccgcctcgccggccagtcagcttgccgggttcgctgccccgcgaaaccccgaggtcaccagcccgcgcctctgcttccctgggccgcgcgccgcctccacgccctccttctcccctggcccggcgcctggcaccggggaccgttgcctgacgcgaggcccagctctacttttcgccccgcgtctcctccgcctgctcgcctcttccaccaactccaactccttctccctccagctccactcgctagtccccgactccgccagccctcggcccgctgccgtagcgccgcttcccgtccggtcccaaaggtgggaacgcgtccgccccggcccgcaccatggcacggttcggcttgcccgcgcttctctgcaccctggcagtgctcagcgccgcgctgctggctgccgagctcaagtcgaaaagttgctcggaagtgcgacgtctttacgtgtccaaaggcttcaacaagaacgatgcccccctccacgagatcaacggtgatcatttgaagatctgtccccagggttctacctgctgctctcaagagatggaggagaagtacagcctgcaaagtaaagatgatttcaaaagtgtggtcagcgaacagtgcaatcatttgcaagctgtctttgcttcacgttacaagaagtttgatgaattcttcaaagaactacttgaaaatgcagagaaatccctgaatgatatgtttgtgaagacatatggccatttatacatgcaaaattctgagctatttaaagatctcttcgtagagttgaaacgttactacgtggtgggaaatgtgaacctggaagaaatgctaaatgacttctgggctcgcctcctggagcggatgttccgcctggtgaactcccagtaccactttacagatgagtatctggaatgtgtgagcaagtatacggagcagctgaagcccttcggagatgtccctcgcaaattgaagctccaggttactcgtgcttttgtagcagcccgtactttcgctcaaggcttagcggttgcgggagatgtcgtgagcaaggtctccgtggtaaaccccacagcccagtgtacccatgccctgttgaagatgatctactgctcccactgccggggtctcgtgactgtgaagccatgttacaactactgctcaaacatcatgagaggctgtttggccaaccaaggggatctcgattttgaatggaacaatttcatagatgctatgctgatggtggcagagaggctagagggtcctttcaacattgaatcggtcatggatcccatcgatgtgaagatttctgatgctattatgaacatgcaggataatagtgttcaagtgtctcagaaggttttccagggatgtggaccccccaagcccctcccagctggacgaatttctcgttccatctctgaaagtgccttcagtgctcgcttcagaccacatcaccccgaggaacgcccaaccacagcagctggcactagtttggaccgactggttactgatgtcaaggataaactgaaacaggccaagaaattctggtcctcccttccgagcaacgtttgcaacgatgagaggatggctgcaggaaacggcaatgaggatgactgttggaatgggaaaggcaaaagcaggtacctgtttgcagtgacaggaaatggattagccaaccagggcaacaacccagaggtccaggttgacaccagcaaaccagacatactgatccttcgtcaaatcatggctcttcgagtgatgaccagcaagatgaagaatgcatacaatgggaacgacgtggacttctttgatatcagtgatgaaagtagtggagaaggaagtggaagtggctgtgagtatcagcagtgcccttcagagtttgactacaatgccactgaccatgctgggaagagtgccaatgagaaagccgacagtgctggtgtccgtcctggggcacaggcctacctcctcactgtcttctgcatcttgttcctggttatgcagagagagtggagataattctcaaactctgagaaaaagtgttcatcaaaaagttaaaaggcaccagttatcacttttctaccatcctagtgactttgctttttaaatgaatggacaacaatgtacagtttttactatgtggccactggtttaagaagtgctgactttgttttctcattcagttttgggaggaaaagggactgtgcattgagttggttcctgctcccccaaaccatgttaaacgtggctaacagtgtaggtacagaactatagttagttgtgcatttgtgattttatcactctattatttgtttgtatgtttttttctcatttcgtttgtgggtttttttttccaactgtgatctcgccttgtttcttacaagcaaaccagggtcccttcttggcacgtaacatgtacgtatttctgaaatattaaatagctgtacagaagcaggttttatttatcatgttatcttattaaaagaaaaagcccaaaaagcagtaaaatttccatttctccctgttattttagttgccttatctggagagacgtggaggtgattttcttttttttaaattattattaagacagaatgtgaaggcacaagcaggcttctgagccacttgtcagattgtattcaaagcatcaatccaagaaggaggttatgtgtacttcatttattggtgatagttggaagagactgcagactactgctttgaatgagttgaattacataagctaagatcactataggtccatttcttgaacccacttatacataaaatgtaacccatttagaaaaagattctggatatcatcccccttgaaagatagaaagcattcaggatgtcccagttatcacatgttcacacttgggtttaggggtgtttttttttaaaaccaggcaggttagctagcccaccctgtgctagttttcatgttcacgctgaccctatttgaattaatatcctttgttagagtggtcgagatttcaaacccaattatgtacagggagctgtctgagagctagccagaactggggtacagcctgggctcagggaatagctgtcaacactcgggcaaagtttttgtctgtgcatgtgtatctccatttgttttgggatcccagtttttgttttaagagagtataaggtgtctcatttgagtctttttcttacctagccccctcttatcagtaaaacaaaggacttgccatggttcacagcaatgtgctacgatccaagatatcagccaaggagcccacttaggggagaactaggtgtccagatttttgtatgtgttgtttttcttgggggatggggtggggtgggagtaggtagagctgagaatactacatcttagtggtgacctttagccacgtgggtgaagtggcaaaggccatggccatatctgttgtcccaggccaaagactaacaactgccttgggaatcccttccttgtgtccttaccaaatgatagctcataaaactctgataatgtaacaaatcactttcaaaggagttcccagaagtcttcagaaagactaaaattctgtctcttcctgctttagacagccattaagatcccaactaattttaccgaacctaaaacccacaaagaggttgtttgtgttattgttcaatcttcagttgtaagagtaattctctatttttatattgaaacataattacttgatagctcagggtctacatttcattcaactttttacaccaaattctgcagagtggtcaaaatggaatattgggggctgttgtaaacagaggcttaattttattagaagtagccagttatttattaaagcatgatgttaataaaataggcatattctg

SEQ ID NO: 415438 - DNA, 873 bp, Homo sapiens
cagtcaatcagcggcagagctgagaagggcacagccgcgcggcggagggcagagtcagccgagccgagtccagccggacgagcggaccagcgcagggcagcccaagcagcgcgcagcgaacgcccgccgccgcccacaccctctgcggtccccgcggcgcctgccacccttccctccttccccgcgtccccgcctcgccggccagtcagcttgccgggttcgctgccccgcgaaaccccgaggtcaccagcccgcgcctctgcttccctgggccgcgcgccgcctccacgccctccttctcccctggcccggcgcctggcaccggggaccgttgcctgacgcgaggcccagctctacttttcgccccgcgtctcctccgcctgctcgcctcttccaccaactccaactccttctccctccagctccactcgctagtccccgactccgccagccctcggcccgctgccgtagcgccgcttcccgtccggtcccaaaggtgggaacgcgtccgccccggcccgcaccatggcacggttcggcttgcccgcgcttctctgcaccctggcagtgctcagcgccgcgctgctggctgccgagctcaagtcgaaaagttgctcggaagtgcgacgtctttacgtgtccaaaggcttcaacaagaacgatgcccccctccacgagatcaacggtgatcatttgaagatctgtccccagggttctacctgctgctctcaagagatggaggagaagtacagcctgcaaagtaaagatgatttcaaaagtgtggtcagcgaacagtgcaatcatttgcaagctgtctttgcttcacgttacaagaagtttgatggtatgttattcaagtcatatgtaagaacc

SEQ ID NO: 415439 - DNA, 381 bp, Homo sapiens
  misc_feature (37)..(37): n is a, c, g, or t
  misc_feature (41)..(41): n is a, c, g, or t
  misc_feature (89)..(89): n is a, c, g, or t
  misc_feature (103)..(103): n is a, c, g, or t
ttgacgtcaagctggggaaaagatttgagctgggagncctnccttggcccactctgcctcatgggtcatcgcttccatttttaagacgncttctgccctggtntcttccttcgaggcagctgcttcagagggaggggtgaattaatatcctttgttagagtggtcgagatttcaaacccaattatgtacagggagctgtctgagagctagccagaactggggtacagcctgggctcagggaatagctgtcaacactcgggcaaagtttttgtctgtgcatgtgtatctccttgttcaattcccacctatgagtgagaatatatggtgtttggttttttgttcttgcgatagtttactgagaatgatgatttccaatttcat

SEQ ID NO: 415440 - DNA, 454 bp, Homo sapiens
tgggttggattgtttccaataggtggcccgaatgtttccccttctcaacatttagtactccactaaacattcctctaaattgtatgtcacacctttctactttctagggatctaccacagctctcaactgtcaggtttggaaaggacctttaaaagctccgatctgggccaggcgcggtggctcacgcctgtaatcccagcactttgggaggccgaggcgggtggatcatgaggtcaggagatcgagaccatcctggctaacaaggtgaaaccccgtctctactaaaaatacaaaaaattagccgggcgcggtggcgggcgcctgtagtcccagctgctcgggaggctgaggcaggagaatggcgtgaacccgggaagcggagcttgcagtgagccgagattgcgccactgcagtccgcagtccggcctgggcgacagagcgagactctgtctc

SEQ ID NO: 415441 - DNA, 288 bp, Homo sapiens
gaaagtaacagcatggatttcagctatggtgctttatcctaaaaggagttgcaggtttcattattgcctgttgatattaattccaaaaatgtcaagttccccagttgggacaatgaacagtcagcaaccctgagaacgaaggcatatccaaatgtgaccacaggagtattgggtaggtgtaactggagtctaaccccacatgtttgtggtagacagtcatctggaactctgacctagattacttagaatctgtgggaaatccaggctatgcccataggcctcagtgcc

SEQ ID NO: 415442 - DNA, 338 bp, Homo sapiens
catctgtcaccccctccgctacaccactatcatgaaagagggactgtgtaacttactagtcactgtgtcctggatcctctcctgtaccaatgccctgtctcacactctcctcctggcccagctgtccttttgtgctgacaacaccatcccccatttcttctgtgatcttgttgccctactcaagctctcatgctcagacatctccctcaatgagctggtcattttcacagtgggacaggcagtcattactctaccactaatatgcatcttgatctcttatggccacattggggtcaccatcctcaaggctccatctactaagggcatcttcaaagctt

SEQ ID NO: 415443 - DNA, 477 bp, Homo sapiens
cagttttctacaaggtgaatttatttcccatcaacttctgctataaaatcggaaatatgtttccagggggaatattatccaattaaccatgttgaaggttttagcaaaggcagtgtaagatagagtggggcctgtagcattgcagggagagtgtctttcacttggaattttgttttgcagcacatattacagtagttttgctagtcccttttctccagaccgtagggatttctctcaataagtattcactatttctctaaattttattctatttttttgttgagcagggaatagaaaggattacgatgtaaaatttctgggaggattaggtagctatctcctacttcaccagtaagtgaagtgcctcacatgagccatcccaaagattcattattccaaaccttgggtttggcagtataagtcacaggcctacctgtttatgaaaacttacttacttaaaataagagctacttttgg

SEQ ID NO: 415444 - DNA, 112 bp, Homo sapiens
tgccttgaatatcaatctggccccccagatggtcataccacaatcactcttaccttcttccaatctttctcttctccccaaccagaatgattctttgaaagcttcagtatga

SEQ ID NO: 415445 - DNA, 657 bp, Homo sapiens
caccacacccggcctcaatcctgcctttcactaacccatacatatcatacataaggtcagtaaaaaataaggtggcgcggggcatggtagctcacatctacaattccagtgttttgggaggccaaagcaggaggaatgcttgaggccagaggttcgagaccagcctgggcaacatagtgagaccccatctgtataagaaattaaaattacaaaattaaaaaaaaatttttaaagatggattttgccacaacctgggaaatttctccagccaaagggttgttgtcattttagggcatcaaaggccttaataattttatgtttgggtcaaaacctcttgggaactcatctttaagaacagcattcagaattaggtttctaagtgactcaataaaaggagtccttgtccttcacaaactctcctgatcacatatagtattgagtggctttgtcacttgccttagtcttgggccttagctctgactcttattcctaaaaggaaaaattaagtccattctcagtaggtgaaaacctatcataggccgggcacagtgggtttacgcttgtaatccccgcactttgggaggtcgaggcgggtgggtcacttgaggtcaggagttcgagaccagcctggccaacatggtgaaaccccgtcactac

SEQ ID NO: 415446 - DNA, 1967 bp, Homo sapiens
gatcagccacagaagttaaacttctttccagggaagaagggcggggatgtcagggctggagagtgcccgtgtccttctgtgtgcattgggctccttcctccttaattctctgctttccacttttaggctgaactccagtgcacccagttagacttggagcggaaactcaagttgaatgaaaatgccatctccaggctccaggctaaccaaaagtctgttctggtgtcggtgtcagaggtcaaagcggtggctgaaatgcagtttggggaactccttgctgctgtgaggaaggcccaggccaatgtgatgctcttcttagaggagaaggagcaagctgcgctgagccaggccaacggtatcaaggcccacctggagtacaggagtgccgagatggagaagagcaagcaggagctggagaggatggcggccatcagcaacactgtccagttcttggaggagtactgcaagtttaagaacactgaagacatcaccttccctagtgtttacgtagggctgaaggataaactctcgggcatccgcaaagttatcacggaatccactgtacacttaatccagttgctggagaactataagaaaaagctccaggagttttccaaggaagaggagtatgacatcagaactcaagtgtctgccgttgttcagcgcaaatattggacttccaaacctgagcccagcaccagggaacagttcctccaatatgcgtatgacatcacgtttgacccggacacagcacacaagtatctccggctgcaggaggagaaccgcaaggtcaccaacaccacgccctgggagcatccctacccggacctccccagcaggttcctgcactggcggcaggtgctgtcccagcagagtctgtacctgcacaggtactattttgaggtggagatcttcggggcaggcacctatgttggcctgacctgcaaaggcatcgaccggaaaggggaggagcgcaacagttgcatttccggaaacaacttctcctggagcctccaatggaacgggaaggagttcacggcctggtacagtgacatggagaccccactcaaagctggccctttccggaggctcggggtctatatcgacttcccgggagggatcctttccttctatggcgtagagtatgataccatgactctggttcacaagtttgcctgcaaattttcagaaccagtctatgctgccttctggctttccaagaaggaaaacgccatccggattgtagatctgggagaggaacccgagaagccagcaccgtccttggtggggactgctccctagactccaggagccatatcccagacctttgccagctacagtgatgggatttgcattttagggtgatttgggggcagaaataactgctgatggtagctggcttttgaaatcctatggggtctctgaatgaaaacattctccagctgctctcttttgctccatatggtgctgttctctatgtgtttgcagtaattcttttttttttttttgagacggagtctcgcactgttgcccaggctggagagcagtggcgcgatcttggctcactgcaagctccgcctcccgagttcaagcaattctcctgcctcagcctcccgagtagctgggattacaggtgcctgccaccacacccagctaatgttttgtatttttagtagagatggggtttcaccatgttggccaggcagatctcaaactcctgacctcgtgatgcacccacctcggcctcccaaagtgctgggattacatgcgtgagccactgcgccctgcctgtttgtagtaatttttaggcaccaaatctccctcatcttctagtgccattctcctctctgttcaggtaaatgtcacactgtgcccagaatggatgaccaggaaccttaaagagtggctgaaaagattgcagagttatcataataaattgctaacttgcgtatttcctatgtgccaga

SEQ ID NO: 415447 - DNA, 2939 bp, Homo sapiens
  misc_feature (49)..(49): n is a, c, g, or t
tacgactcgagctgagaccatgtcccctagcggccatacaatgaatttngcttacacgtctttaatttcttttactgcctcatgtccagttctatgagatgggagtagatgaatggctgtcctggtgttgaagtccttacattttacttctctttaaaaatgaaaacaaaaaaaaatgtcgcttgtcagaccacacaaagccacacaggcttataacagagctcaggaatcttctgtcctttccagagcaggcacagagacacgtggtcttcagcagagcctatggggttcagatgattcacataagaatagaagtttcagggctggacctggggaggcagcctgagcctgagccggctgtcctgagcctgagtactctagctgccttgtcgtcatcgcatctggctgccatccagcgccagcacacagtaatgagtggccgagcttcctctgggagggaggaaacagttaaaatcttgcagcagctgcaatcatctaggcgtggttctcttgtctgacttgggctgcacagatcctgggccaagggacagaagaaagacagcctaggagcagagcctcccagatggctgagttggatctaatggctccagggccactgcccagggccactgctcagcccccagcccctctcagcccagactctgggtcacccagcccagattctgggtcagccagcccagtggaagaagaggacgtgggctcctcggagaagcttggcagggagacggaggaacaggacagcgactctgcagagcagggggatcctgctggtgaggggaaagaggtcctgtgtgacttctgccttgatgacaccagaagagtgaaggcagtgaagtcctgtctaacctgcatggtgaattactgtgaagagcacttgcagccgcatcaggtgaacatcaaactgcaaagccacctgctgaccgagccagtgaaggaccacaactggcgatactgccctgcccaccacagcccactgtctgccttctgctgccctgatcagcagtgcatctgccaggactgttgccaggagcacagtggccacaccatagtctccctggatgcagcccgcagggacaaggagaactccagtgcacccagttagacttggagcggaaactcaagttgaatgaaaatgccatctccaggctccaggctaaccaaaagtctgttctggtgtcggtgtcagaggtcaaagcggtggctgaaatgcagtttggggaactccttgctgctgtgaggaaggcccaggccaatgtgatgctcttcttagaggagaaggagcaagctgcgctgagccaggccaacggtatcaaggcccacctggagtacaggagtgccgagatggagaagagcaagcaggagctggagaggatggcggccatcagcaacactgtccagttcttggaggagtactgcaagtttaagaacactgaagacatcaccttccctagtgtttacgtagggctgaaggataaactctcgggcatccgcaaagttatcacggaatccactgtacacttaatccagttgctggagaactataagaaaaagctccaggagttttccaaggaagaggagtatgacatcagaactcaagtgtctgccgttgttcagcgcaaatattggacttccaaacctgagcccagcaccagggaacagttcctccaatatgcgtatgacatcacgtttgacccggacacagcacacaagtatctccggctgcaggaggagaaccgcaaggtcaccaacaccacgccctgggagcatccctacccggacctccccagcaggttcctgcactggcggcaggtgctgtcccagcagagtctgtacctgcacaggtactattttgaggtggagatcttcggggcaggcacctatgttggcctgacctgcaaaggcatcgaccggaaaggggaggagcgcaacagttgcatttccggaaacaacttctcctggagcctccaatggaacgggaaggagttcacggcctggtacagtgacatggagaccccactcaaagctggccctttccggaggctcggggtctatatcgacttcccgggagggatcctttccttctatggcgtagagtatgataccatgactctggttcacaagtttgcctgcaaattttcagaaccagtctatgctgccttctggctttccaagaaggaaaacgccatccggattgtagatctgggagaggaacccgagaagccagcaccgtccttggtggggactgctccctagactccaggagccatatcccagacctttgccagctacagtgatgggatttgcattttagggtgatttgggggcagaaataactgctgatggtagctggcttttgaaatcctatggggtctctgaatgaaaacattctccagctgctctcttttgctccatatggtgctgttctctatgtgtttgcagtaattcttttttttttttttgagacggagtctcgcactgttgcccaggctggagagcagtggcgcgatcttggctcactgcaagctccgcctcccgagttcaagcaattctcctgcctcagcctcccgagtagctgggattacaggtgcctgccaccacacccagctaatgttttgtatttttagtagagatggggtttcaccatgttggccaggcagatctcaaactcctgacctcgtgatgcacccacctcggcctcccaaagtgctgggattacatgcgtgagccactgcgccctgcctgtttgtagtaatttttaggcaccaaatctccctcatcttctagtgccattctcctctctgttcaggtaaatgtcacactgtgcccagaatggatgaccaggaaccttaaagagtggctgaaaagattgcagagttatcataataaattgctaacttgcgtatttcctatgtgccaga

SEQ ID NO: 415448 - DNA, 2990 bp, Homo sapiens
gaggaaacagattcagagaggtaagctacttacaaaggtcacacagctaaaaggtgctgggatcaggaactctgtctcaaaaaaaaaaaaaaagaaaagaaaagaaacatgcatcctattcctagctgcctcatgtccagttctatgagatgggagtagatgaatggctgtcctggtgttgaagtccttacattttacttctctttaaaaatgaaaacaaaaaaaaatgtcgcttgtcagaccacacaaagccacacaggcttataacagagctcaggaatcttctgtcctttccagagcaggcacagagacacgtggtcttcagcagagcctatggggttcagatgattcacataagaatagaagtttcagggctggacctggggaggcagcctgagcctgagccggctgtcctgagcctgagtactctagctgccttgtcgtcatcgcatctggctgccatccagcgccagcacacagtaatgagtggccgagcttcctctgggagggaggaaacagttaaaatcttgcagcagctgcaatcatctaggcgtggttctcttgtctgacttgggctgcacagatcctgggccaagggacagaagaaagacagcctaggagcagagcctcccagatggctgagttggatctaatggctccagggccactgcccagggccactgctcagcccccagcccctctcagcccagactctgggtcacccagcccagattctgggtcagccagcccagtggaagaagaggacgtgggctcctcggagaagcttggcagggagacggaggaacaggacagcgactctgcagagcagggggatcctgctggtgaggggaaagaggtcctgtgtgacttctgccttgatgacaccagaagagtgaaggcagtgaagtcctgtctaacctgcatggtgaattactgtgaagagcacttgcagccgcatcaggtgaacatcaaactgcaaagccacctgctgaccgagccagtgaaggaccacaactggcgatactgccctgcccaccacagcccactgtctgccttctgctgccctgatcagcagtgcatctgccaggactgttgccaggagcacagtggccacaccatagtctccctggatgcagcccgcagggacaaggagaactccagtgcacccagttagacttggagcggaaactcaagttgaatgaaaatgccatctccaggctccaggctaaccaaaagtctgttctggtgtcggtgtcagaggtcaaagcggtggctgaaatgcagtttggggaactccttgctgctgtgaggaaggcccaggccaatgtgatgctcttcttagaggagaaggagcaagctgcgctgagccaggccaacggtatcaaggcccacctggagtacaggagtgccgagatggagaagagcaagcaggagctggagaggatggcggccatcagcaacactgtccagttcttggaggagtactgcaagtttaagaacactgaagacatcaccttccctagtgtttacgtagggctgaaggataaactctcgggcatccgcaaagttatcacggaatccactgtacacttaatccagttgctggagaactataagaaaaagctccaggagttttccaaggaagaggagtatgacatcagaactcaagtgtctgccgttgttcagcgcaaatattggacttccaaacctgagcccagcaccagggaacagttcctccaatatgcgtatgacatcacgtttgacccggacacagcacacaagtatctccggctgcaggaggagaaccgcaaggtcaccaacaccacgccctgggagcatccctacccggacctccccagcaggttcctgcactggcggcaggtgctgtcccagcagagtctgtacctgcacaggtactattttgaggtggagatcttcggggcaggcacctatgttggcctgacctgcaaaggcatcgaccggaaaggggaggagcgcaacagttgcatttccggaaacaacttctcctggagcctccaatggaacgggaaggagttcacggcctggtacagtgacatggagaccccactcaaagctggccctttccggaggctcggggtctatatcgacttcccgggagggatcctttccttctatggcgtagagtatgataccatgactctggttcacaagtttgcctgcaaattttcagaaccagtctatgctgccttctggctttccaagaaggaaaacgccatccggattgtagatctgggagaggaacccgagaagccagcaccgtccttggtggggactgctccctagactccaggagccatatcccagacctttgccagctacagtgatgggatttgcattttagggtgatttgggggcagaaataactgctgatggtagctggcttttgaaatcctatggggtctctgaatgaaaacattctccagctgctctcttttgctccatatggtgctgttctctatgtgtttgcagtaattcttttttttttttttgagacggagtctcgcactgttgcccaggctggagagcagtggcgcgatcttggctcactgcaagctccgcctcccgagttcaagcaattctcctgcctcagcctcccgagtagctgggattacaggtgcctgccaccacacccagctaatgttttgtatttttagtagagatggggtttcaccatgttggccaggcagatctcaaactcctgacctcgtgatgcacccacctcggcctcccaaagtgctgggattacatgcgtgagccactgcgccctgcctgtttgtagtaatttttaggcaccaaatctccctcatcttctagtgccattctcctctctgttcaggtaaatgtcacactgtgcccagaatggatgaccaggaaccttaaagagtggctgaaaagattgcagagttatcataataaattgctaacttgcgtatttcctatgtgccaga

SEQ ID NO: 415449 - DNA, 2485 bp, Homo sapiens
ccgcgcgtggcgagtctgtgtcctccctgtcccccagagcagacaccctctctgtgtctggaccggggaggagcagacgctggacaggtttctggtagaatgctggcaatttccaggaagatacgtggagaacggaaaggttgctacacccaaatagtgaagcaaaggctatgattatggaggattggacctgcaaactccagaacagagcaaccttgtaaaatgtgtgtgggcagcacagagaacttgggcaagttaacagtttcctcatctgtgaatactgatttatggaaagcacctggtgcgtgttctgccctctgaggaccctgccctttcccaaaaggggtatcttaagaaggaaaatatggctgctctttgcggacagcagagtcccagaaccccatgcaggtgtttcagggctttatgtcattcaaggatgtggctgtgaacttcactaggaagaatggagagaactggaccttgctcagagagtcttgtacagggatgtaatgctggagaactataggaacctggtctccttggtaggatttccattttccaaacctggtatcatctcctagttggaagaagtggtaagcccacgaacacaaatgcaggagggagaggtgccaagaagcagcggtacacaactccagtgcacccagttagacttggagcggaaactcaagttgaatgaaaatgccatctccaggctccaggctaaccaaaagtctgttctggtgtcggtgtcagaggtcaaagcggtggctgaaatgcagtttggggaactccttgctgctgtgaggaaggcccaggccaatgtgatgctcttcttagaggagaaggagcaagctgcgctgagccaggccaacggtatcaaggcccacctggagtacaggagtgccgagatggagaagagcaagcaggagctggagaggatggcggccatcagcaacactgtccagttcttggaggagtactgcaagtttaagaacactgaagacatcaccttccctagtgtttacgtagggctgaaggataaactctcgggcatccgcaaagttatcacggaatccactgtacacttaatccagttgctggagaactataagaaaaagctccaggagttttccaaggaagaggagtatgacatcagaactcaagtgtctgccgttgttcagcgcaaatattggacttccaaacctgagcccagcaccagggaacagttcctccaatatgcgtatgacatcacgtttgacccggacacagcacacaagtatctccggctgcaggaggagaaccgcaaggtcaccaacaccacgccctgggagcatccctacccggacctccccagcaggttcctgcactggcggcaggtgctgtcccagcagagtctgtacctgcacaggtactattttgaggtggagatcttcggggcaggcacctatgttggcctgacctgcaaaggcatcgaccggaaaggggaggagcgcaacagttgcatttccggaaacaacttctcctggagcctccaatggaacgggaaggagttcacggcctggtacagtgacatggagaccccactcaaagctggccctttccggaggctcggggtctatatcgacttcccgggagggatcctttccttctatggcgtagagtatgataccatgactctggttcacaagtttgcctgcaaattttcagaaccagtctatgctgccttctggctttccaagaaggaaaacgccatccggattgtagatctgggagaggaacccgagaagccagcaccgtccttggtggggactgctccctagactccaggagccatatcccagacctttgccagctacagtgatgggatttgcattttagggtgatttgggggcagaaataactgctgatggtagctggcttttgaaatcctatggggtctctgaatgaaaacattctccagctgctctcttttgctccatatggtgctgttctctatgtgtttgcagtaattcttttttttttttttgagacggagtctcgcactgttgcccaggctggagagcagtggcgcgatcttggctcactgcaagctccgcctcccgagttcaagcaattctcctgcctcagcctcccgagtagctgggattacaggtgcctgccaccacacccagctaatgttttgtatttttagtagagatggggtttcaccatgttggccaggcagatctcaaactcctgacctcgtgatgcacccacctcggcctcccaaagtgctgggattacatgcgtgagccactgcgccctgcctgtttgtagtaatttttaggcaccaaatctccctcatcttctagtgccattctcctctctgttcaggtaaatgtcacactgtgcccagaatggatgaccaggaaccttaaagagtggctgaaaagattgcagagttatcataataaattgctaacttgcgtatttcctatgtgccaga

SEQ ID NO: 415450 - DNA, 2029 bp, Homo sapiens
gatcagccacagaagttaaacttctttccagggaagaagggcggggatgtcagggctggagagtgcccgtgtccttctgtgtgcattgggctccttcctccttaattctctgctttccacttttaggctgaactccagtgcacccagttagacttggagcggaaactcaagttgaatgaaaatgccatctccaggctccaggctaaccaaaagtctgttctggctccttgaatgtattgaggcctctcctctctgtactgtttctgcttgtcatcattttcatggtgtcggtgtcagaggtcaaagcggtggctgaaatgcagtttggggaactccttgctgctgtgaggaaggcccaggccaatgtgatgctcttcttagaggagaaggagcaagctgcgctgagccaggccaacggtatcaaggcccacctggagtacaggagtgccgagatggagaagagcaagcaggagctggagaggatggcggccatcagcaacactgtccagttcttggaggagtactgcaagtttaagaacactgaagacatcaccttccctagtgtttacgtagggctgaaggataaactctcgggcatccgcaaagttatcacggaatccactgtacacttaatccagttgctggagaactataagaaaaagctccaggagttttccaaggaagaggagtatgacatcagaactcaagtgtctgccgttgttcagcgcaaatattggacttccaaacctgagcccagcaccagggaacagttcctccaatatgcgtatgacatcacgtttgacccggacacagcacacaagtatctccggctgcaggaggagaaccgcaaggtcaccaacaccacgccctgggagcatccctacccggacctccccagcaggttcctgcactggcggcaggtgctgtcccagcagagtctgtacctgcacaggtactattttgaggtggagatcttcggggcaggcacctatgttggcctgacctgcaaaggcatcgaccggaaaggggaggagcgcaacagttgcatttccggaaacaacttctcctggagcctccaatggaacgggaaggagttcacggcctggtacagtgacatggagaccccactcaaagctggccctttccggaggctcggggtctatatcgacttcccgggagggatcctttccttctatggcgtagagtatgataccatgactctggttcacaagtttgcctgcaaattttcagaaccagtctatgctgccttctggctttccaagaaggaaaacgccatccggattgtagatctgggagaggaacccgagaagccagcaccgtccttggtggggactgctccctagactccaggagccatatcccagacctttgccagctacagtgatgggatttgcattttagggtgatttgggggcagaaataactgctgatggtagctggcttttgaaatcctatggggtctctgaatgaaaacattctccagctgctctcttttgctccatatggtgctgttctctatgtgtttgcagtaattcttttttttttttttgagacggagtctcgcactgttgcccaggctggagagcagtggcgcgatcttggctcactgcaagctccgcctcccgagttcaagcaattctcctgcctcagcctcccgagtagctgggattacaggtgcctgccaccacacccagctaatgttttgtatttttagtagagatggggtttcaccatgttggccaggcagatctcaaactcctgacctcgtgatgcacccacctcggcctcccaaagtgctgggattacatgcgtgagccactgcgccctgcctgtttgtagtaatttttaggcaccaaatctccctcatcttctagtgccattctcctctctgttcaggtaaatgtcacactgtgcccagaatggatgaccaggaaccttaaagagtggctgaaaagattgcagagttatcataataaattgctaacttgcgtatttcctatgtgccaga

SEQ ID NO: 415451 - DNA, 2095 bp, Homo sapiens
tacctcttgaaatatgactatcaagtagactgaatacacacattgctctggtaggaaaatcaatttcggaaacttgactaacaatcccggagtgtcagagttgtgagggatctcagaggtcatagaggaattcactctctcatcaaatggatgaggagaccaagttaatacgtaaatcctttttccaggaacctggaattcacatgagaataaaggattccttttacaatagggaactgctccctaatatatgtgtttctcaagctgacatttctgtatgttgagtttctatcaagttgtatgcctcactaagaaatgtttggctgccttccacccccaccccctgccaggtgtcggtgtcagaggtcaaagcggtggctgaaatgcagtttggggaactccttgctgctgtgaggaaggcccaggccaatgtgatgctcttcttagaggagaaggagcaagctgcgctgagccaggccaacggtatcaaggcccacctggagtacaggagtgccgagatggagaagagcaagcaggagctggagaggatggcggccatcagcaacactgtccagttcttggaggagtactgcaagtttaagaacactgaagacatcaccttccctagtgtttacgtagggctgaaggataaactctcgggcatccgcaaagttatcacggaatccactgtacacttaatccagttgctggagaactataagaaaaagctccaggagttttccaaggaagaggagtatgacatcagaactcaagtgtctgccgttgttcagcgcaaatattggacttccaaacctgagcccagcaccagggaacagttcctccaatatgcgtatgacatcacgtttgacccggacacagcacacaagtatctccggctgcaggaggagaaccgcaaggtcaccaacaccacgccctgggagcatccctacccggacctccccagcaggttcctgcactggcggcaggtgctgtcccagcagagtctgtacctgcacaggtactattttgaggtggagatcttcggggcaggcacctatgttggcctgacctgcaaaggcatcgaccggaaaggggaggagcgcaacagttgcatttccggaaacaacttctcctggagcctccaatggaacgggaaggagttcacggcctggtacagtgacatggagaccccactcaaagctggccctttccggaggctcggggtctatatcgacttcccgggagggatcctttccttctatggcgtagagtatgataccatgactctggttcacaagtttgcctgcaaattttcagaaccagtctatgctgccttctggctttccaagaaggaaaacgccatccggattgtagatctgggagaggaacccgagaagccagcaccgtccttggtggggactgctccctagactccaggagccatatcccagacctttgccagctacagtgatgggatttgcattttagggtgatttgggggcagaaataactgctgatggtagctggcttttgaaatcctatggggtctctgaatgaaaacattctccagctgctctcttttgctccatatggtgctgttctctatgtgtttgcagtaattcttttttttttttttgagacggagtctcgcactgttgcccaggctggagagcagtggcgcgatcttggctcactgcaagctccgcctcccgagttcaagcaattctcctgcctcagcctcccgagtagctgggattacaggtgcctgccaccacacccagctaatgttttgtatttttagtagagatggggtttcaccatgttggccaggcagatctcaaactcctgacctcgtgatgcacccacctcggcctcccaaagtgctgggattacatgcgtgagccactgcgccctgcctgtttgtagtaatttttaggcaccaaatctccctcatcttctagtgccattctcctctctgttcaggtaaatgtcacactgtgcccagaatggatgaccaggaaccttaaagagtggctgaaaagattgcagagttatcataataaattgctaacttgcgtatttcctatgtgccaga

SEQ ID NO: 415452 - DNA, 1876 bp, Homo sapiens
gtgtttaaattgtcaaaaaacaagtactgacggaatgaacaaagcaagaatgttctttattttttggtccccagtctggactgtgtattggagctgttcatggccatctagtacatcttgatttttaaaatcccatgttctcacttgttttttttaaaatcccacttattctgagggtctagcagctagagaagtgctttctattttgttagaccctgagcttgacacttcacatgtactttctttgtgaaggacacattaccgtcagcccattttacagatgcaaaaagtgacttaatgaggagagaagcccgagtttagaaatacagaaaccacagcaagttctgctgtttccttttctgcaggagtactgcaagtttaagaacactgaagacatcaccttccctagtgtttacgtagggctgaaggataaactctcgggcatccgcaaagttatcacggaatccactgtacacttaatccagttgctggagaactataagaaaaagctccaggagttttccaaggaagaggagtatgacatcagaactcaagtgtctgccgttgttcagcgcaaatattggacttccaaacctgagcccagcaccagggaacagttcctccaatatgcgtatgacatcacgtttgacccggacacagcacacaagtatctccggctgcaggaggagaaccgcaaggtcaccaacaccacgccctgggagcatccctacccggacctccccagcaggttcctgcactggcggcaggtgctgtcccagcagagtctgtacctgcacaggtactattttgaggtggagatcttcggggcaggcacctatgttggcctgacctgcaaaggcatcgaccggaaaggggaggagcgcaacagttgcatttccggaaacaacttctcctggagcctccaatggaacgggaaggagttcacggcctggtacagtgacatggagaccccactcaaagctggccctttccggaggctcggggtctatatcgacttcccgggagggatcctttccttctatggcgtagagtatgataccatgactctggttcacaagtttgcctgcaaattttcagaaccagtctatgctgccttctggctttccaagaaggaaaacgccatccggattgtagatctgggagaggaacccgagaagccagcaccgtccttggtggggactgctccctagactccaggagccatatcccagacctttgccagctacagtgatgggatttgcattttagggtgatttgggggcagaaataactgctgatggtagctggcttttgaaatcctatggggtctctgaatgaaaacattctccagctgctctcttttgctccatatggtgctgttctctatgtgtttgcagtaattcttttttttttttttgagacggagtctcgcactgttgcccaggctggagagcagtggcgcgatcttggctcactgcaagctccgcctcccgagttcaagcaattctcctgcctcagcctcccgagtagctgggattacaggtgcctgccaccacacccagctaatgttttgtatttttagtagagatggggtttcaccatgttggccaggcagatctcaaactcctgacctcgtgatgcacccacctcggcctcccaaagtgctgggattacatgcgtgagccactgcgccctgcctgtttgtagtaatttttaggcaccaaatctccctcatcttctagtgccattctcctctctgttcaggtaaatgtcacactgtgcccagaatggatgaccaggaaccttaaagagtggctgaaaagattgcagagttatcataataaattgctaacttgcgtatttcctatgtgccaga

SEQ ID NO: 415453 - DNA, 1801 bp, Homo sapiens
gatcagccacagaagttaaacttctttccagggaagaagggcggggatgtcagggctggagagtgcccgtgtccttctgtgtgcattgggctccttcctccttaattctctgctttccacttttaggctgaactccagtgcacccagttagacttggagcggaaactcaagttgaatgaaaatgccatctccaggctccaggctaaccaaaagtctgttctggtgtcggtgtcagaggtcaaagcggtggctgaaatgcagtttggggaactccttgctgctgtgaggaaggcccaggccaatgtgatgctcttcttagaggagaaggagcaagctgcgctgagccaggccaacggtatcaaggcccacctggagtacaggagtgccgagatggagaagagcaagcaggagctggagaggatggcggccatcagcaacactgtccagttcttggagaggagtatgacatcagaactcaagtgtctgccgttgttcagcgcaaatattggacttccaaacctgagcccagcaccagggaacagttcctccaatatgcgtatgacatcacgtttgacccggacacagcacacaagtatctccggctgcaggaggagaaccgcaaggtcaccaacaccacgccctgggagcatccctacccggacctccccagcaggttcctgcactggcggcaggtgctgtcccagcagagtctgtacctgcacaggtactattttgaggtggagatcttcggggcaggcacctatgttggcctgacctgcaaaggcatcgaccggaaaggggaggagcgcaacagttgcatttccggaaacaacttctcctggagcctccaatggaacgggaaggagttcacggcctggtacagtgacatggagaccccactcaaagctggccctttccggaggctcggggtctatatcgacttcccgggagggatcctttccttctatggcgtagagtatgataccatgactctggttcacaagtttgcctgcaaattttcagaaccagtctatgctgccttctggctttccaagaaggaaaacgccatccggattgtagatctgggagaggaacccgagaagccagcaccgtccttggtggggactgctccctagactccaggagccatatcccagacctttgccagctacagtgatgggatttgcattttagggtgatttgggggcagaaataactgctgatggtagctggcttttgaaatcctatggggtctctgaatgaaaacattctccagctgctctcttttgctccatatggtgctgttctctatgtgtttgcagtaattcttttttttttttttgagacggagtctcgcactgttgcccaggctggagagcagtggcgcgatcttggctcactgcaagctccgcctcccgagttcaagcaattctcctgcctcagcctcccgagtagctgggattacaggtgcctgccaccacacccagctaatgttttgtatttttagtagagatggggtttcaccatgttggccaggcagatctcaaactcctgacctcgtgatgcacccacctcggcctcccaaagtgctgggattacatgcgtgagccactgcgccctgcctgtttgtagtaatttttaggcaccaaatctccctcatcttctagtgccattctcctctctgttcaggtaaatgtcacactgtgcccagaatggatgaccaggaaccttaaagagtggctgaaaagattgcagagttatcataataaattgctaacttgcgtatttcctatgtgccaga

SEQ ID NO: 415454 - DNA, 989 bp, Homo sapiens
cccggaggtcgcgcaaggtctgggatatggctcctggagtctagggagcagtcaccaccaaggacggtgctggcttctcgggttcctctcccagatctacaatccggatggctcggggtctatatcgacttcccgggagggatcctttccttctatggcgtagagtatgataccatgactctggttcacaagtttgcctgcaaattttcagaaccagtctatgctgccttctggctttccaagaaggaaaacgccatccggattgtagatctgggagaggaacccgagaagccagcaccgtccttggtggggactgctccctagactccaggagccatatcccagacctttgccagctacagtgatgggatttgcattttagggtgatttgggggcagaaataactgctgatggtagctggcttttgaaatcctatggggtctctgaatgaaaacattctccagctgctctcttttgctccatatggtgctgttctctatgtgtttgcagtaattcttttttttttttttgagacggagtctcgcactgttgcccaggctggagagcagtggcgcgatcttggctcactgcaagctccgcctcccgagttcaagcaattctcctgcctcagcctcccgagtagctgggattacaggtgcctgccaccacacccagctaatgttttgtatttttagtagagatggggtttcaccatgttggccaggcagatctcaaactcctgacctcgtgatgcacccacctcggcctcccaaagtgctgggattacatgcgtgagccactgcgccctgcctgtttgtagtaatttttaggcaccaaatctccctcatcttctagtgccattctcctctctgttcaggtaaatgtcacactgtgcccagaatggatgaccaggaaccttaaagagtggctgaaaagattgcagagttatcataataaattgctaacttgcgtatttcctatgtgccaga

SEQ ID NO: 415455 - DNA, 1802 bp, Homo sapiens
  misc_feature (49)..(49): n is a, c, g, or t
tacgactcgagctgagaccatgtcccctagcggccatacaatgaatttngcttacacgtctttaatttcttttactgcctcatgtccagttctatgagatgggagtagatgaatggctgtcctggtgttgaagtccttacattttacttctctttaaaaatgaaaacaaaaaaaaatgtcgcttgtcagaccacacaaagccacacaggcttataacagagctcaggaatcttctgtcctttccagagcaggcacagagacacgtggtcttcagcagagcctatggggttcagatgattcacataagaatagaagtttcagggctggacctggggaggcagcctgagcctgagccggctgtcctgagcctgagtactctagctgccttgtcgtcatcgcatctggctgccatccagcgccagcacacagtaatgagtggccgagcttcctctgggagggaggaaacagttaaaatcttgcagcagctgcaatcatctaggcgtggttctcttgtctgacttgggctgcacagatcctgggccaagggacagaagaaagacagcctaggagcagagcctcccagatggctgagttggatctaatggctccagggccactgcccagggccactgctcagcccccagcccctctcagcccagactctgggtcacccagcccagattctgggtcagccagcccagtggaagaagaggacgtgggctcctcggagaagcttggcagggagacggaggaacaggacagcgactctgcagagcagggggatcctgctggtgaggggaaagaggtcctgtgtgacttctgccttgatgacaccagaagagtgaaggcagtgaagtcctgtctaacctgcatggtgaattactgtgaagagcacttgcagccgcatcaggtgaacatcaaactgcaaagccacctgctgaccgagccagtgaaggaccacaactggcgatactgccctgcccaccacagcccactgtctgccttctgctgccctgatcagcagtgcatctgccaggactgttgccaggagcacagtggccacaccatagtctccctggatgcagcccgcagggacaaggagaactccagtgcacccagttagacttggagcggaaactcaagttgaatgaaaatgccatctccaggctccaggctaaccaaaagtctgttctggtgtcggtgtcagaggtcaaagcggtggctgaaatgcagtttggggaactccttgctgctgtgaggaaggcccaggccaatgtgatgctcttcttagaggagaaggagcaagctgcgctgagccaggccaacggtatcaaggcccacctggagtacaggagtgccgagatggagaagagcaagcaggagctggagaggatggcggccatcagcaacactgtccagttcttggaggagtactgcaagtttaagaacactgaagacatcaccttccctagtgtttacgtagggctgaaggataaactctcgggcatccgcaaagttatcacggaatccactgtacacttaatccagttgctggagaactataagaaaaagctccaggagttttccaaggaagaggagtatgacatcagaactcaagtgtctgccgttgttcagcgcaaatattggacttccaaacctgagcccagcaccagggaacagttcctccaatgtaaatgtcacactgtgcccagaatggatgaccaggaaccttaaagagtggctgaaaagattgcagagttatcataataaattgctaacttgcgtatttcctatgtgccaga

SEQ ID NO: 415456 - DNA, 1014 bp, Homo sapiens
ccgcgcgtggcgagtctgtgtcctccctgtcccccagagcagacaccctctctgtgtctggaccggggaggagcagacgctggacaggtttctggtagaatgctggcaatttccaggaagatacgtggagaacggaaaggttgctacacccaaatagtgaagcaaaggctatgattatggaggattggacctgcaaactccagaacagagcaaccttgtaaaatgtgtgtgggcagcacagagaacttgggcaagttaacagtttcctcatctgtgaatactgatttatggaaagcacctggtgcgtgttctgccctctgaggaccctgccctttcccaaaaggggtatcttaagaaggaaaatatggctgctctttgcggacagcagagtcccagaaccccatgcaggtgtttcagggctttatgtcattcaaggatgtggctgtgaacttcactaggaagaatggagagaactggaccttgctcagagagtcttgtacagggatgtaatgctggagaactataggaacctggtctccttggtaggatttccattttccaaacctggtatcatctcctagttggaagaagtggtaagcccacgaacacaaatgcaggagggagaggtgccaagaagcagcggtacactgcctcagcctcccgagtagctgggattacaggtgcctgccaccacacccagctaatgttttgtatttttagtagagatggggtttcaccatgttggccaggcagatctcaaactcctgacctcgtgatgcacccacctcggcctcccaaagtgctgggattacatgcgtgagccactgcgccctgcctgtttgtagtaatttttaggcaccaaatctccctcatcttctagtgccattctcctctctgttcaggtaaatgtcacactgtgcccagaatggatgaccaggaaccttaaagagtggctgaaaagattgcagagttatcataataaattgctaacttgcgtatttcctatgtgccaga

SEQ ID NO: 415457 - DNA, 995 bp, Homo sapiens
  misc_feature (49)..(49): n is a, c, g, or t
tacgactcgagctgagaccatgtcccctagcggccatacaatgaatttngcttacacgtctttaatttcttttactgcctcatgtccagttctatgagatgggagtagatgaatggctgtcctggtgttgaagtccttacattttacttctctttaaaaatgaaaacaaaaaaaaatgtcgcttgtcagaccacacaaagccacacaggcttataacagagctcaggaatcttctgtcctttccagagcaggcacagagacacgtggtcttcagcagagcctatggggttcagatgattcacataagaatagaagtttcagggctggacctggggaggcagcctgagcctgagccggctgtcctgagcctgagtactctagctgccttgtcgtcatcgcatctggctgccatccagcgccagcacacagtaatgagtggccgagcttcctctgggagggaggaaacagttaaaatcttgcagcagctgcaatcatctaggcgtggttctcttgtctgacttgggctgcacagatcctgggccaagggacagaagaaagacagcctaggagcagagcctcccagatggctgagttggatctaatggctccagggccactgcccagggccatgcctcagcctcccgagtagctgggattacaggtgcctgccaccacacccagctaatgttttgtatttttagtagagatggggtttcaccatgttggccaggcagatctcaaactcctgacctcgtgatgcacccacctcggcctcccaaagtgctgggattacatgcgtgagccactgcgccctgcctgtttgtagtaatttttaggcaccaaatctccctcatcttctagtgccattctcctctctgttcaggtaaatgtcacactgtgcccagaatggatgaccaggaaccttaaagagtggctgaaaagattgcagagttatcataataaattgctaacttgcgtatttcctatgtgccaga

SEQ ID NO: 415458 - DNA, 1487 bp, Homo sapiens
  misc_feature (49)..(49): n is a, c, g, or t
tacgactcgagctgagaccatgtcccctagcggccatacaatgaatttngcttacacgtctttaatttcttttactgcctcatgtccagttctatgagatgggagtagatgaatggctgtcctggtgttgaagtccttacattttacttctctttaaaaatgaaaacaaaaaaaaatgtcgcttgtcagaccacacaaagccacacaggcttataacagagctcaggaatcttctgtcctttccagagcaggcacagagacacgtggtcttcagcagagcctatggggttcagatgattcacataagaatagaagtttcagggctggacctggggaggcagcctgagcctgagccggctgtcctgagcctgagtactctagctgccttgtcgtcatcgcatctggctgccatccagcgccagcacacagtaatgagtggccgagcttcctctgggagggaggaaacagttaaaatcttgcagcagctgcaatcatctaggcgtggttctcttgtctgacttgggctgcacagatcctgggccaagggacagaagaaagacagcctaggagcagagcctcccagatggctgagttggatctaatggctccagggccactgcccagggccactgctcagcccccagcccctctcagcccagactctgggtcacccagcccagattctgggtcagccagcccagtggaagaagaggacgtgggctcctcggagaagcttggcagggagacggaggaacaggacagcgactctgcagagcagggggatcctgctggtgaggggaaagaggtcctgtgtgacttctgccttgatgacaccagaagagtgaaggcagtgaagtcctgtctaacctgcatggtgaattactgtgaagagcacttgcagccgcatcaggtgaacatcaaactgcaaagccacctgctgaccgagccagtgaaggaccacaactggcgatactgccctgcccaccacagcccactgtctgccttctgctgccctgatcagcagtgcatctgccaggactgttgccaggagcacagtggccacaccatagtctccctggatgcagcccgcagggacaaggaggtgagtgcttggggaccattcatccatttgggagagggcggtgggggatggtgtgcccagctggctgcagctgctaggtccactgacgccactactatgctctgagcatacctgaaaaagactagcttcagcgtctgcctgctgggtcagtgtaaatatacattgcacttggttttggaaactgtgtggagtaggttgctccgtccccatctctgtcccactgtctctgtgcgatctctgtctgtgtctgtctctcctccttcttgctagtttcctgctgtgccttatacagcttttggtgatgtgtgtttgggtggagggtgcagaagttgtgggggcttagggcggtgatatgtccctgtggctggatctgcatggcacatcc

SEQ ID NO: 415459 - DNA, 768 bp, Homo sapiens
ccgcgcgtggcgagtctgtgtcctccctgtcccccagagcagacaccctctctgtgtctggaccggggaggagcagacgctggacaggtttctggtagaatgctggcaatttccaggaagatacgtggagaacggaaaggttgctacacccaaatagtgaagcaaaggctatgattatggaggattggacctgcaaactccagaacagagcaaccttgtaaaatgtgtgtgggcagcacagagaacttgggcaagttaacagtttcctcatctgtgaatactgatttatggaaagcacctggtgcgtgttctgccctctgaggaccctgccctttcccaaaaggggtatcttaagaaggaaaatatggctgctctttgcggacagcagagtcccagaaccccatgcaggtgtttcagggctttatgtcattcaaggatgtggctgtgaacttcactaggaagaatggagagaactggaccttgctcagagagtcttgtacagggatgtaatgctggagaactataggaacctggtctccttggtaggatttccattttccaaacctggtatcatctcctagttggaagaagtggtaagcccacgaacacaaatgcaggagggagaggtgccaagaagcagcggtacacgagaaagacagggctggagaccagtttgctgatagtgaccccaaaccagaaagttcattgggcctgcacctccagtagaactggacctgaggcagctaggaataggatgcatgtttctga

SEQ ID NO: 415460 - DNA, 455 bp, Homo sapiens
ttcaaggaaaaaacatgttttacaacttgagtttatctgcctagtgaccttgcagctgcagagctagagaaacagcgtcttcacaatgcctgggaaagggagagaaaaggctcactggccacagaaaaacaagcagttaatttttaaaggacttcagctctttctcttcctcagggggaattgggttttcttacatacaatgaatttttgcttacacgttctttaatttcttttaattccttttccagtagaactggacctgaggcagctaggaataggatgcatgtttctgaccctggccaggatcagaaagaaggaaacctctcctgagggtcttcagcagtggaagagggcagtcaggacagggacagtgaggaaacgttacatcgctaaaaagggctacttatgcgtattctatgcgtggttgaaaataaacagcactgtgtctggaatga

SEQ ID NO: 415461 - DNA, 230 bp, Homo sapiens
  misc_feature (15)..(15): n is a, c, g, or t
cgcagcgcggtgacntagaggatccccagccacactgcgcacgtgcagtcattctgaaaggacctttccctgtacttacctttcaacatgcttcaatcttatcaacgctacattttgtatttttcaaacaagtataaattctgcaataaagagatgtagttttttttttttttttttttttttttttttttttttttttttttttttttttttttttttttttttttttt

SEQ ID NO: 415462 - DNA, 336 bp, Homo sapiens
  misc_feature (41)..(41): n is a, c, g, or t
ggtccatcagtatggttaactataccttttatctagagggnaaaatcaaatcaactataccttttatcgagaaggaaaatcactaagttttattcaggctctaccaacccccattatatctactgtttgtttatgtcctaaattaacctttcatcctatgaagtaataaagttcattttaaaccaacgattaccaaatgcatttttttcaaaggaagggcaaaaaccaaatggcactgttttctctgaatggaaatctgtaagttagttaaaatgtttatacttcattttaagaccaaacaccaataaggacttctgaaaaattgttccttttttc

SEQ ID NO: 415463 - DNA, 2349 bp, Homo sapiens
cacccaggccatcaggtgctgatagaaatgtatcagtggactctacccaccccactaaaaagccagggactcgccgcccacccttgccacccagacctacacacccacgaagaaaacctttaccaccaaataatgtcactggaaagccaggaagtgcaggaatcatttcatcaggcccaataactacaccacccctgaggtcaacacccaggcctactggaactcccttggagagaatagagacagatataaagcaaccaacagttcctgcctctggagaagaactggaaaatataactgactttagctcaagcccaacaagagaaactgatcctcttgggaagccaagattcaaaggacctcatgtgcgatacatccaaaagcctgacaacagtccctgctccattactgactctgtcaaacggttccccaaagaggaggccacagaggggaatgccaccagcccaccacagaacccacccaccaacctcactgtggtcaccgtggaagggtgcccctcatttgtcatcttggactgggaaaagccactaaatgacactgtcactgaatatgaagttatatccagagaaaatgggtcattcagtgggaagaacaagtccattcaaatgacaaatcagacattttccacagtagaaaatctgaaaccaaacacgagttatgaattccaggtgaaacccaaaaacccgcttggtgaaggcccggtcagcaacacagtggcattcagtactgaatcagcggacccaagagtgagtgagccagtttctgcaggaagagatgccatctggactgaaagaccctttaattcagactcttactcagagtgtaagggcaaacaatatgtcaaaaggacatggtataaaaaatttgtaggagtgcagctgtgcaactctctcagatacaagatttacttgagcgactccctcacaggaaaattttataacataggtgatcagaggggccatggagaagatcactgccagtttgtggattcatttttagatggacgcactgggcagcaactcacttctgaccagttaccaatcaaagaaggttatttcagagcagttcgccaggaacctgtccaatttggagaaataggtggtcacacccaaatcaattatgttcagtggtatgaatgtgggactacaattcctggaaaatggtagatgctgcacaaagttaccttctgtttcatcattgcaaacaaaaatcattgaaaatactatgccgcattcatttaaagctattttgtttactatgtataaaagtctacaatctaattaatagcaatactagatgtttattattagaaaagattgctgagagtatttatcaggttttacaaagtcattttaagaaagcaagatactgatgttaacagaataacatttttggggaagctggctccctattcatggtattttaagagatcatttgtatattatttatcacactgttgtaatgatgttttgagatacttttataacaaaattaacatcaaaaaggtatatactttttaaaaaaaatttacttttattgatgtgtactcttcctattgatgagttaattccataaatctctacttagtttaacttattggatcaaattatcttcagcatgtatatctggggaaaaaaggtccgaattttcacatttatatttaaacttcaattttttatatttaaacttcaattttttagcaacagctgaatagctttgcggaggagtttaatagttacacattcatgctaatatacatttcctttaaacatccacaaattcttaaaaagattgaatcagtaaatttcatttcagctaaaaatggagtctaatatattgtttcaaaagatacatttttacccaccataaatgttacaatatctgaatatgctttgtcaaactatccctttatgcaatcgtcttcatattgtttttatgattctaatcaagctgtatgtagagactgaatgtgaagtcaagtctgagcacaaaaagataatgcacgatgagattgcctaccattttataggatatttactatgtatttatacgttaagacctctatgaatgaatgtatcagagaatgtctttgtaactaactgtttaattcaatctgtaataaaaatctaactaactaactcatttatttctattaaaaaggtattgtcctttaggcggggaatgggaatccttgctgcactgttgcagtcattctgaaaggacctttccctgtacttacctttcaacatgcttcaatcttatcaacgctacattttgtatttttcaaacaagtataaattctgcaataaagagatgtagttttttttt

SEQ ID NO: 415464 - DNA, 2680 bp, Homo sapiens
cacccaggccatcaggtgctgatagaaatgtatcagtggactctacccaccccactaaaaagccagggactcgccgcccacccttgccacccagacctacacacccacgaagaaaacctttaccaccaaataatgtcactggaaagccaggaagtgcaggaatcatttcatcaggcccaataactacaccacccctgaggtcaacacccaggcctactggaactcccttggagagaatagagacagatataaagcaaccaacagttcctgcctctggagaagaactggaaaatataactgactttagctcaagcccaacaagagaaactgatcctcttgggaagccaagattcaaaggacctcatgtgcgatacatccaaaagcctgacaacagtccctgctccattactgactctgtcaaacggttccccaaagaggaggccacagaggggaatgccaccagcccaccacagaacccacccaccaacctcactgtggtcaccgtggaagggtgcccctcatttgtcatcttggactgggaaaagccactaaatgacactgtcactgaatatgaagttatatccagagaaaatgggtcattcagtgggaagaacaagtccattcaaatgacaaatcagacattttccacagtagaaaatctgaaaccaaacacgagttatgaattccaggtgaaacccaaaaacccgcttggtgaaggcccggtcagcaacacagtggcattcagtactgaatcagcggacccaagagtgagtgagccagtttctgcaggaagagatgccatctggactgaaagaccctttaattcagactcttactcagagtgtaagggcaaacaatatgtcaaaaggacatggtataaaaaatttgtaggagtgcagctgtgcaactctctcagatacaagatttacttgagcgactccctcacaggaaaattttataacataggtgatcagaggggccatggagaagatcactgccagtttgtggattcatttttagatggacgcactgggcagcaactcacttctgaccagttaccaatcaaagaaggttatttcagagcagttcgccaggaacctgtccaatttggagaaataggtggtcacacccaaatcaattatgttcagtggtatgaatgtgggactacaattcctggaaaatggtagatgctgcacaaagttaccttctgtttcatcattgcaaacaaaaatcattgaaaatactatgccgcattcatttaaagctattttgtttactatgtataaaagtctacaatctaattaatagcaatactagatgtttattattagaaaagattgctgagagtatttatcaggttttacaaagtcattttaagaaagcaagatactgatgttaacagaataacatttttggggaagctggctccctattcatggtattttaagagatcatttgtatattatttatcacactgttgtaatgatgttttgagatacttttataacaaaattaacatcaaaaaggtatatactttttaaaaaaaatttacttttattgatgtgtactcttcctattgatgagttaattccataaatctctacttagtttaacttattggatcaaattatcttcagcatgtatatctggggaaaaaaggtccgaattttcacatttatatttaaacttcaattttttatatttaaacttcaattttttagcaacagctgaatagctttgcggaggagtttaatagttacacattcatgctaatatacatttcctttaaacatccacaaattcttaaaaagattgaatcagtaaatttcatttcagctaaaaatggagtctaatatattgtttcaaaagatacatttttacccaccataaatgttacaatatctgaatatgctttgtcaaactatccctttatgcaatcgtcttcatattgtttttatgattctaatcaagctgtatgtagagactgaatgtgaagtcaagtctgagcacaaaaagataatgcacgatgagattgcctaccattttataggatatttactatgtatttatacgttaagacctctatgaatgaatgtatcagagaatgtctttgtaactaactgtttaattcaatctgtaataaaaatctaactaactaactcatttatttctattaaaaaggtattgtcctttaggcggggaatgggaatccttgctgcactgttgcagtcattctgaaaggacctttccctgtacttacctttcaacatgcttcaatcttatcaacgctacattttgtatttttcaaacaagtataaattctgcaataaagagatgtagtttttttttaagattgagtttttgtttgttatttctgaatggttcatcagtatgttaactataccttttatcgagaaggaaaatcactaagttttattcaggctctaccaacccccattatatctactgtttgtttatgtcctaaattaacctttcatcctatgaagtaataaagttcattttaaaccaacgattaccaaatgcatttttttcaaaggaagggcaaaaaccaaatggcactgttttctctgaatggaaatctgtaagttagttaaaatgtttatacttcattttaagaccaaacaccaataaggacttctgaaaaattgttccttttttc

SEQ ID NO: 415465 - DNA, 2411 bp, Homo sapiens
cacccaggccatcaggtgctgatagaaatgtatcagtggactctacccaccccactaaaaagccagggactcgccgcccacccttgccacccagacctacacacccacgaagaaaacctttaccaccaaataatgtcactggaaagccaggaagtgcaggaatcatttcatcaggcccaataactacaccacccctgaggtcaacacccaggcctactggaactcccttggagagaatagagacagatataaagcaaccaacagttcctgcctctggagaagaactggaaaatataactgactttagctcaagcccaacaagagaaactgatcctcttgggaagccaagattcaaaggacctcatgtgcgatacatccaaaagcctgacaacagtccctgctccattactgactctgtcaaacggttccccaaagaggaggccacagaggggaatgccaccagcccaccacagaacccacccaccaacctcactgtggtcaccgtggaagggtgcccctcatttgtcatcttggactgggaaaagccactaaatgacactgtcactgaatatgaagttatatccagagaaaatgggtcattcagtgggaagaacaagtccattcaaatgacaaatcagacattttccacagtagaaaatctgaaaccaaacacgagttatgaattccaggtgaaacccaaaaacccgcttggtgaaggcccggtcagcaacacagtggcattcagtactgaatcagcggacccaagagtgagtgagccagtttctgcaggaagagatgccatctggactgaaagaccctttaattcagactcttactcagagtgtaagggcaaacaatatgtcaaaaggacatggtataaaaaatttgtaggagtgcagctgtgcaactctctcagatacaagatttacttgagcgactccctcacaggaaaattttataacataggtgatcagaggggccatggagaagatcactgccagtttgtggattcatttttagatggacgcactgggcagcaactcacttctgaccagttaccaatcaaagaaggttatttcagagcagttcgccaggaacctgtccaatttggagaaataggtggtcacacccaaatcaattatgttcagtggtatgaatgtgggactacaattcctggaaaatggtagatgctgcacaaagttaccttctgtttcatcattgcaaacaaaaatcattgaaaatactatgccgcattcatttaaagctattttgtttactatgtataaaagtctacaatctaattaatagcaatactagatgtttattattagaaaagattgctgagagtatttatcaggttttacaaagtcattttaagaaagcaagatactgatgttaacagaataacatttttggggaagctggctccctattcatggtattttaagagatcatttgtatattatttatcacactgttgtaatgatgttttgagatacttttataacaaaattaacatcaaaaaggtatatactttttaaaaaaaatttacttttattgatgtgtactcttcctattgatgagttaattccataaatctctacttagtttaacttattggatcaaattatcttcagcatgtatatctggggaaaaaaggtccgaattttcacatttatatttaaacttcaattttttatatttaaacttcaattttttagcaacagctgaatagctttgcggaggagtttaatagttacacattcatgctaatatacatttcctttaaacatccacaaattcttaaaaagattgaatcagtaaatttcatttcagctaaaaatggagtctaatatattgtttcaaaagatacatttttacccaccataaatgttacaatatctgaatatgctttgtcaaactatccctttatgcaatcgtcttcatattgtttttatgattctaatcaagctgtatgtagagactgaatgtgaagtcaagtctgagcacaaaaagataatgcacgatgagattgcctaccattttataggatatttactatgtatttatacgttaagacctctatgaatgaatgtatcagagaatgtctttgtaactaactgtttaattcaatctgtaataaaaatctaactaactaactcatttatttctattaaaaaggtattgtcctttaggcggggaatgggaatccttgctgcactgttgcagtcattctgaaaggacctttccctgtacttacctttcaacatgcttcaatcttatcaacgctacattttgtatttttcaaacaagtataaattctgcaataaagagatgtagttttttttttttttttttttttttttttttttttttttttttttttttttttttttttttttttttttttt

SEQ ID NO: 415466 - DNA, 176 bp, Homo sapiens
caaaacagatcagcttcttaaaatatttttccacattcccttctggttcatcataaattctgttgtctagttaggaacaaattatacatatacctgatcataatttattttctgcacataaacttatcagacaaataacaagcaggctgattttatttaaatctaccaagacattt

SEQ ID NO: 415467 - DNA, 327 bp, Homo sapiens
ttccgtttgtctcgccaaaccagttttgaatacagagccttcacctctagttctaaaccatagctctctaaagactcaaccttcgttcctccttccttacagcccactcagctacatctgttctttgctactcaggttaacactgcctcggttagaccttctctgattgtccagactgggttatatctccattgtaagttcccatcaaaccctgtccttctcctttgcagcattgtttgtttaatagtttaccaaccagatagagaagacaactcatgggcatgaggtcatgtgtgatgcttgcgcactggtgtatccctaacgtct

SEQ ID NO: 415468 - DNA, 6277 bp, Homo sapiens
gttcctagaaaatggagctgtcttggcatgtagtctttattgccctgctaagtttttcatgctgggggtcagactgggagtctgatagaaatttcatttccaccgctggtcctctaaccaatgacttgctgcacaacctgagtggtctcctgggagaccagagttctaactttgtagcaggggacaaagacatgtatgtttgtcaccagccactgcccactttcctgccagaatacttcagcagtctccatgccagtcagatcacccattataaggtatttctgtcatgggcacagctcctcccagcaggaagcacccagaatccagacgagaaaacagtgcagtgctaccggcgactcctcaaggccctcaagactgcacggcttcagcccatggtcatcctgcaccaccagaccctccctgccagcaccctccggagaaccgaagcctttgctgacctcttcgccgactatgccacattcgccttccactccttcggggacctagttgggatctggttcaccttcagtgacttggaggaagtgatcaaggagcttccccaccaggaatcaagagcgtcacaactccagaccctcagtgatgcccacagaaaagcctatgagatttaccacgaaagctatgcttttcagggcggaaaactctctgttgtcctgcgagctgaagatatcccggagctcctgctagaaccacccatatctgcgcttgcccaggacacggtcgatttcctctctcttgatttgtcttatgaatgccaaaatgaggcaagtctgcggcagaagctgagtaaattgcagaccattgagccaaaagtgaaagttttcatcttcaacctaaaactcccagactgcccctccaccatgaagaacccagccagtctgctcttcagcctttttgaagccataaataaagaccaagtgctcaccattgggtttgatattaatgagtttctgagttgttcatcaagttccaagaaaagcatgtcttgttctctgactggcagcctggcccttcagcctgaccagcagcaggaccacgagaccacggactcctctcctgcctctgcctatcagagagtctgggaagcatttgccaatcagtccagagcggaaagggatgccttcctgcaggatactttccctgaaggcttcctctggggtgcctccacaggagcctttaacgtggaaggaggctgggccgagggtgggagaggggtgagcatctgggatccacgcaggcccctgaacaccactgagggccaagcgacgctggaggtggccagcgacagttaccacaaggtagcctctgacgtcgccctgctttgcggcctccgggctcaggtgtacaagttctccatctcctggtcccggatcttccccatggggcacgggagcagccccagcctcccaggcgttgcctactacaacaagctgattgacaggctacaggatgcgggcatcgagcccatggccacgctgttccactgggacctgcctcaggccctgcaggatcatggtggatggcagaatgagagcgtggtggatgccttcctggactatgcggccttctgcttctccacatttggggaccgtgtgaagctgtgggtgaccttccatgagccgtgggtgatgagctacgcaggctatggcaccggccagcaccctcccggcatctctgacccaggagtggcctcttttaaggtggctcacttggtcctcaaggctcatgccagaacttggcaccactacaacagccatcatcgcccacagcagcaggggcacgtgggcattgtgctgaactcagactgggcagaacccctgtctccagagaggcctgaggacctgagagcctctgagcgcttcttgcacttcatgctgggctggtttgcacaccccgtctttgtggatggagactacccagccaccctgaggacccagatccaacagatgaacagacagtgctcccatcctgtggctcaactccccgagttcacagaggcagagaagcagctcctgaaaggctctgctgattttctgggtctgtcgcattacacctcccgcctcatcagcaacgccccacaaaacacctgcatccctagctatgataccattggaggcttctcccaacacgtgaaccatgtgtggccccagacctcatcctcttggattcgtgtggtgccctgggggataaggaggctgttgcagtttgtatccctggaatacacaagaggaaaagttccaatataccttgccgggaatggcatgcccataggggaaagtgaaaatctctttgatgattccttaagagtagactacttcaatcaatatatcaatgaggtgctcaaggctatcaaggaagactctgtggatgttcgttcctacattgctcgttccctcattgatggcttcgaaggcccttctggttacagccagcggtttggcctgcaccacgtcaacttcagcgacagcagcaagtcaaggactcccaggaaatctgcctactttttcactagcatcatagaaaagaacggtttcctcaccaagggggcaaaaagactgctaccacctaatacagtaaacctcccctccaaagtcagagccttcacttttccatctgaggtgccctccaaggctaaagtcgtttgggaaaagttctccagccaacccaagttcgaaagagatttgttctaccacgggacgtttcgggatgactttctgtggggcgtgtcctcttccgcttatcagattgaaggcgcgtgggatgccgatggcaaaggccccagcatctgggataactttacccacacaccagggagcaatgtgaaagacaatgccactggagacatcgcctgtgacagctatcaccagctggatgccgatctgaatatgctccgagctttgaaggtgaaggcctaccgcttctctatctcctggtctcggattttcccaactgggagaaacagctctatcaacagtcatggggttgattattacaacaggctgatcaatggcttggtggcaagcaacatctttcccatggtgacattgttccattgggacctgccccaggccctccaggatatcggaggctgggagaatcctgccttgattgacttgtttgacagctacgcagacttttgtttccagacctttggtgatagagtcaagttttggatgacttttaatgagcccatgtacctggcatggctaggttatggctcaggggaatttcccccaggggtgaaggacccaggctgggcaccatataggatagcccacaccgtcatcaaagcccatgccagagtctatcacacgtacgatgagaaatacaggcaggagcagaagggggtcatctcgctgagcctcagtacacactgggcagagcccaagtcaccaggggtccccagagatgtggaagccgctgaccgaatgctgcagttctccctgggctggtttgctcaccccatttttagaaacggagactatcctgacaccatgaagtggaaagtggggaacaggagtgaactgcagcacttagccacctcccgcctgccaagcttcactgaggaagagaagaggttcatcagggcgacggccgacgtcttctgcctcaacacgtactactccagaatcgtgcagcacaaaacacccaggctaaacccaccctcctacgaagacgaccaggagatggctgaggaggaggacccttcgtggccttccacggcaatgaacagagctgcgccctgggggacgcgaaggctgctgaactggatcaaggaagagtatggtgacatccccatttacatcaccgaaaacggagtggggctgaccaatccgaacacggaggatactgataggatattttaccacaaaacctacatcaatgaggctttgaaagcctacaggctcgatggtatagaccttcgagggtatgtcgcctggtctctgatggacaactttgagtggctaaatggctacacggtcaagtttggactgtaccatgttgatttcaacaacacgaacaggcctcgcacagcaagagcctccgccaggtactacacagaggtcattaccaacaacggcatgccactggccagggaggatgagtttctgtacggacggtttcctgagggcttcatctggagtgcagcttctgctgcatatcagattgaaggtgcgtggagagcagatggcaaaggactcagcatttgggacacgttttctcacacaccactgagggttgagaacgatgccattggagacgtggcctgtgacagttatcacaagattgctgaggatctggtcaccctgcagaacctgggtgtgtcccactaccgtttttccatctcctggtctcgcatcctccctgatggaaccaccaggtacatcaatgaagcgggcctgaactactacgtgaggctcatcgatacactgctggccgccagcatccagccccaggtgaccatttaccactgggacctaccacagacgctccaagatgtaggaggctgggagaatgagaccatcgtgcagcggtttaaggagtatgcagatgtgctcttccagaggctgggagacaaggtgaagttttggatcacgttgaatgagccctttgtcattgcttaccagggctatggctacggaacagcagctccaggagtctccaataggcctggcactgccccctacattgttggccacaatctaataaaggctcatgctgaggcctggcatctgtacaacgatgtgtaccgcgccagtcaaggtggcgtgatttccatcaccatcagcagtgactgggctgaacccagagatccctctaaccaggaggatgtggaggcagccaggagatatgttcagttcatgggaggctggtttgcacatcctattttcaagaatggagattacaatgaggtgatgaagacgcggatccgtgacaggagcttggctgcaggcctcaacaagtctcggctgccagaatttacagagagtgagaagaggaggatcaacggcacctatgacttttttgggttcaatcactacaccactgtcctcgcctacaacctcaactatgccactgccatctcttcttttgatgcagacagaggagttgcttccatcgcagatcgctcgtggccagactctggctccttctggctgaagatgacgccttttggcttcaggaggatcctgaactggttaaaggaggaatacaatgaccctccaatttatgtcacagagaatggagtgtcccagcgggaagaaacagacctcaatgacactgcaaggatctactaccttcggacttacatcaatgaggccctcaaagctgtgcaggacaaggtggaccttcgaggatacacagtttggagtgcgatggacaattttgagtgggccacaggcttttcagagagatttggtctgcattttgtgaactacagtgacccttctctgccaaggatccccaaagcatcagcgaagttctacgcctctgtggtccgatgcaatggcttccctgaccccgctacagggcctcacgcttgtctccaccagccagatgctggacccaccatcagccccgtgagacaggaggaggtgcagttcctggggctaatgctcggcaccacagaagcacagacagctttgtacgttctcttttctcttgtgcttcttggagtctgtggcttggcatttctgtcatacaagtactgcaagcgctctaagcaagggaaaacacaacgaagccaacaggaattgagcccggtgtcttcattctgatgagttaccacctcaagttctatgaagcaggcctagtttcttcatctatctttaccggccaccaaacaccttagggtcttagactctgctgatactggacttctccataaagtcctgctgcaccgttagagatgactttaatcttgaatgatttcgacttgctgagtaaaatggaaatatctccatcttgctccagtatcagagttcatttgggcatttgagaagcaagtagctcttgcggaaacgtgtagatactggtctagtgggtctgtgaaccacttaattgaacttaacagggctgttttaagtttcagagttgttaagggttgttaagggagcaaaaaccgtaaaaatccttcctataagaagaaatcaactccattgcatagactgcaatatcatctcctgcccttctgcaagctctccctagcttcacatcttgtgttttccagaaaataaaaacagcagactgtcaaaaaaac

SEQ ID NO: 415469 - DNA, 462 bp, Homo sapiens
tgcgtaatttatagagaaaaaaggtttatttagctcatggttctggggactgggaagttcaagatcaggcagccacatctggtcagcttctggtgagggcctcatgctgcatcctaacctggcagagaagtggaaggggaaggaagtgcctgcaaacagataaaacaccagaagcagcctcactttataacaaccactgtatggtaactaatccagtcccactagaatgggaactcactcactccctggagactgcactaatccctgaaggcggatccctcatgacccaaatgcctcttaaaagtccataacctctcaataatgttacactggcaattaaatttcaacatgagtttttgtagggacaaaccacatccaaaccatagcacacctggaccccatcccagcaatgggttggctccacagggcccctgaagtttatccatagataccatttaataa

SEQ ID NO: 415470 - DNA, 919 bp, Homo sapiens
ctcactccctggagactgcactaatccctgaaggcggatccctcatgacccaaatgcctcttaaaagtccataacctctcaataatgttacactggcaattaaatttcaacatgagtttttgtagggacaaaccacatccaaaccatagcacacctggaccccatcccagcaatgggttggctccacagggcccctgaagtttatccatagataccatttaataatgcttatctgaactcacctttgatggcataacaatttctgttcttagatcccacctctctctaagtggttaaaattgtaccttttctgtttatgcgtattttaccacaattttaaaaatattccacccctttctgatctttgagttcttctaaatcaattgttcccaaagttgtggtccccagaccagcagcatcaacattagcatcacctgggagctcattagaaatgcatattcttgagccctacttgagacctactgcatcagacactcttggggtgggaccagcaacctgtgttttaacaagctctacagatgattttgattcaccttgaagtttgagaaccacttttaagtaataagtaagtagaattcacttctaagcttttaaagtcgttagcccatggtattttccaaaggggcttggaaccactgcttggagtttgggtgtgtcgtatgagcgaggaaaactgttgatttcagacttgcatgttcttagttggcatttacatagagttaattcaatttcttctcttacagccataaataaagaccaagtgctcaccattgggtttgatattaatgagtttctgagttgttcatcaagttccaagaaaaggtaatgtcaggttgcctattgaactatcaataactgatatttgtagaatactctgtttcttttacatgtataatct

SEQ ID NO: 415471 - DNA, 5513 bp, Homo sapiens
gttcctagaaaatggagctgtcttggcatgtagtctttattgccctgctaagtttttcatgctgggggtcagactgggagtctgatagaaatttcatttccaccgctggtcctctaaccaatgacttgctgcacaacctgagtggtctcctgggagaccagagttctaactttgtagcaggggacaaagacatgtatgtttgtcaccagccactgcccactttcctgccagaatacttcagcagtctccatgccagtcagatcacccattataaggtatttctgtcatgggcacagctcctcccagcaggaagcacccagaatccagacgagaaaacagtgcagtgctaccggcgactcctcaaggccctcaagactgcacggcttcagcccatggtcatcctgcaccaccagaccctccctgccagcaccctccggagaaccgaagcctttgctgacctcttcgccgactatgccacattcgccttccactccttcggggacctagttgggatctggttcaccttcagtgacttggaggaagtgatcaaggagcttccccaccaggaatcaagagcgtcacaactccagaccctcagtgatgcccacagaaaagcctatgagatttaccacgaaagctatgcttttcagggcggaaaactctctgttgtcctgcgagctgaagatatcccggagctcctgctagaaccacccatatctgcgcttgcccaggacacggtcgatttcctctctcttgatttgtcttatgaatgccaaaatgaggcaagtctgcggcagaagctgagtaaattgcagaccattgagccaaaagtgaaagttttcatcttcaacctaaaactcccagactgcccctccaccatgaagaacccagccagtctgctcttcagcctttttgaagccataaataaagaccaagtgctcaccattgggtttgatattaatgagtttctgagttgttcatcaagttccaagaaaagcatgtcttgttctctgactggcagcctggcccttcagcctgaccagcagcaggaccacgagaccacggactcctctcctgcctctgcctatcagagagtctgggaagcatttgccaatcagtccagagcggaaagggatgccttcctgcaggatactttccctgaaggcttcctctggggtgcctccacaggagcctttaacgtggaaggaggctgggccgagggtgggagaggggtgagcatctgggatccacgcaggcccctgaacaccactgagggccaagcgacgctggaggtggccagcgacagttaccacaaggtagcctctgacgtcgccctgctttgcggcctccgggctcaggtgtacaagttctccatctcctggtcccggatcttccccatggggcacgggagcagccccagcctcccaggcgttgcctactacaacaagctgattgacaggctacaggatgcgggcatcgagcccatggccacgctgttccactgggacctgcctcaggccctgcaggatcatggtggatggcagaatgagagcgtggtggatgccttcctggactatgcggccttctgcttctccacatttggggaccgtgtgaagctgtgggtgaccttccatgagccgtgggtgatgagctacgcaggctatggcaccggccagcaccctcccggcatctctgacccaggagtggcctcttttaaggtggctcacttggtcctcaaggctcatgccagaacttggcaccactacaacagccatcatcgcccacagcagcaggggcacgtgggcattgtgctgaactcagactgggcagaacccctgtctccagagaggcctgaggacctgagagcctctgagcgcttcttgcacttcatgctgggctggtttgcacaccccgtctttgtggatggagactacccagccaccctgaggacccagatccaacagatgaacagacagtgctcccatcctgtggctcaactccccgagttcacagaggcagagaagcagctcctgaaaggctctgctgattttctgggtctgtcgcattacacctcccgcctcatcagcaacgccccacaaaacacctgcatccctagctatgataccattggaggcttctcccaacacgtgaaccatgtgtggccccagacctcatcctcttggattcgtgtggtgccctgggggataaggaggctgttgcagtttgtatccctggaatacacaagaggaaaagttccaatataccttgccgggaatggcatgcccataggggaaagtgaaaatctctttgatgattccttaagagtagactacttcaatcaatatatcaatgaggtgctcaaggctatcaaggaagactctgtggatgttcgttcctacattgctcgttccctcattgatggcttcgaaggcccttctggttacagccagcggtttggcctgcaccacgtcaacttcagcgacagcagcaagtcaaggactcccaggaaatctgcctactttttcactagcatcatagaaaagaacggtttcctcaccaagggggcaaaaagactgctaccacctaatacagtaaacctcccctccaaagtcagagccttcacttttccatctgaggtgccctccaaggctaaagtcgtttgggaaaagttctccagccaacccaagttcgaaagagatttgttctaccacgggacgtttcgggatgactttctgtggggcgtgtcctcttccgcttatcagattgaaggcgcgtgggatgccgatggcaaaggccccagcatctgggataactttacccacacaccagggagcaatgtgaaagacaatgccactggagacatcgcctgtgacagctatcaccagctggatgccgatctgaatatgctccgagctttgaaggtgaaggcctaccgcttctctatctcctggtctcggattttcccaactgggagaaacagctctatcaacagtcatggggttgattattacaacaggctgatcaatggcttggtggcaagcaacatctttcccatggtgacattgttccattgggacctgccccaggccctccaggatatcggaggctgggagaatcctgccttgattgacttgtttgacagctacgcagacttttgtttccagacctttggtgatagagtcaagttttggatgacttttaatgagcccatgtacctggcatggctaggttatggctcaggggaatttcccccaggggtgaaggacccaggctgggcaccatataggatagcccacaccgtcatcaaagcccatgccagagtctatcacacgtacgatgagaaatacaggcaggagcagaagggggtcatctcgctgagcctcagtacacactgggcagagcccaagtcaccaggggtccccagagatgtggaagccgctgaccgaatgctgcagttctccctgggctggtttgctcaccccatttttagaaacggagactatcctgacaccatgaagtggaaagtggggaacaggagtgaactgcagcacttagccacctcccgcctgccaagcttcactgaggaagagaagaggttcatcagggcgacggccgacgtcttctgcctcaacacgtactactccagaatcgtgcagcacaaaacacccaggctaaacccaccctcctacgaagacgaccaggagatggctgaggaggaggacccttcgtggccttccacggcaatgaacagagctgcgccctgggggacgcgaaggctgctgaactggatcaaggaagagtatggtgacatccccatttacatcaccgaaaacggagtggggctgaccaatccgaacacggaggatactgataggatattttaccacaaaacctacatcaatgaggctttgaaagcctacaggctcgatggtatagaccttcgagggtatgtcgcctggtctctgatggacaactttgagtggctaaatggctacacggtcaagtttggactgtaccatgttgatttcaacaacacgaacaggcctcgcacagcaagagcctccgccaggtactacacagaggtcattaccaacaacggcatgccactggccagggaggatgagtttctgtacggacggtttcctgagggcttcatctggagtgcagcttctgctgcatatcagattgaaggtgcgtggagagcagatggcaaaggactcagcatttgggacacgttttctcacacaccactgagggttgagaacgatgccattggagacgtggcctgtgacagttatcacaagattgctgaggatctggtcaccctgcagaacctgggtgtgtcccactaccgtttttccatctcctggtctcgcatcctccctgatggaaccaccaggtacatcaatgaagcgggcctgaactactacgtgaggctcatcgatacactgctggccgccagcatccagccccaggtgaccatttaccactgggacctaccacagacgctccaagatgtaggaggctgggagaatgagaccatcgtgcagcggtttaaggagtatgcagatgtgctcttccagaggctgggagacaaggtgaagttttggatcacgttgaatgagccctttgtcattgcttaccagggctatggctacggaacagcagctccaggagtctccaataggcctggcactgccccctacattgttggccacaatctaataaaggctcatgctgaggcctggcatctgtacaacgatgtgtaccgcgccagtcaaggtggcgtgatttccatcaccatcagcagtgactgggctgaacccagagatccctctaaccaggaggatgtggaggcagccaggagatatgttcagttcatgggaggctggtttgcacatcctattttcaagaatggagattacaatgaggtgatgaagacgcggatccgtgacaggagcttggctgcaggcctcaacaagtctcggctgccagaatttacagagagtgagaagaggaggatcaacggcacctatgacttttttgggttcaatcactacaccactgtcctcgcctacaacctcaactatgccactgccatctcttcttttgatgcagacaggtaagtccaccaacagggagcccggagccatctctggaaaaggcagaaaggtgcccttggctgtgctctctgaggcctgcccagcctcaaaacagggcctccaacgccgaatgtgccggggtttgcaagatgctcgccaccccacagatcccaaggaaatctccagcaagcaagagggagagaaggccggggtctccagggcacctcccattagggcacatgtgcttggctttttgtttttttatttcatttttaaaatttatttattttgcgttctttttcacaggctgcttaactctaaaaatgcttggttgttaaaaaggattttcaagaaaaaaattgtttaggttttatcaaaattcgctttaatattaataaatattacaataat

SEQ ID NO: 415472 - DNA, 2212 bp, Homo sapiens
ggcacgaggtgagaagctgcagcgagcccaggctgaactggagaatgtgtctggggcgctgaacgaggcactgctgagcagcaaggatgacgtcggcaagagcgtgcatgagctggaacgagcctgccgggtagcagaacaggcagccaatgatctgcgagcacaggtgacagaactggaggatgagctgacagcggccgaggatgccaagctgcgtctggaggtgactgtgcaggctctcaagactcagcatgagcgtgacctgcagggccgtgatgaggctggtgaagagaggcggaggcagctggccaagcagctgagagatgcagaggtggagcgggatgaggagcggaagcagcgcactctggccgtggctgcccgcaagaagctggagggagagctggaggagctgaaggctcagatggcctctgccggccagggcaaggaggaggcggtgaagcagcttcgcaagatgcaggcccagatgaaggagctatggcgggaggtggaggagacacgcacctcccgggaggagatcttctcccagaatcgggaaagtgaaaagcgcctcaagggcctggaggctgaggtgctgcggctgcaggaggaactggccgcctcggaccgtgctcggcggcaggcccagcaggaccgggatgagatggcagatgaggtggccaatggtaaccttagcaaggcagccattctggaggagaagcgtcagctggaggggcgcctggggcagttggaggaagagctggaggaggagcagagcaactcagagctgctcaatgaccgctaccgcaagctgctcctgcaggtagagtcactgaccacagagctgtcagctgagcgcagtttctcagccaaggcagagagcgggcggcagcagctggaacggcagatccaggagctacggggacgcctgggtgaggaggatgctggggcccgtgcccgccacaagatgaccattgctgcccttgagtctaagttggcccaggctgaggagcagctagagcaagagaccagagagcgcatcctctctggaaagctggtgcgcagagctgagaagcggcttaaagaggtggtgctccaggtggaggaggagcggagggtggctgaccagctccgggaccagctggagaagggaaaccttcgagtcaagcagctgaagcggcagctggaggaggccgaggaggaggcatcccgggctcaggccggccgccggaggctgcagcgtgagctggaagatgtcacagagtcggccgagtccatgaaccgtgaagtgaccacactgaggaaccggcttcgacgcggccccctcaccttcaccacccgcacggtgcgccaggtcttccgactagaggagggcgtggcatccgacgaggaggcagaggaagcacagcctgggtctgggccatccccggagcctgaggggtccccaccagcccacccccagtgaccctaccctgtccccagatgcactaacagatggggcccagcccccttcctccctggaccccacgggcccctgtcccaggaaccccgccctctgacttcttgccctttggaaatggtgcagcactctggcatttatcacccccacctgggtcccctgcaacctcccatcaaaggatgacccctaaacacagaggagcggggcaggcagggaggcaaggactggagctaccttgcttgttgggggactgggtacagttggcaagctgtgtttccatcagctccctgtcctcctttcttccctcgttattgatctatagacattaggaagggagtgagacggctcctccaccatcctcagccagtgcaacccattccctctgcttctctctctctctctctctctccctccctctccttccctaccctctcaccatctttcttggcctctctgagggtctctctgtgcatctttttaggaatctcgctctcactctctacgtagccactctccttcccccatttctgcgtccacccctgaactcctgagcgacagaagccccaggcctccaccagccttgaacccttgcaaaggggcaggacaaggggacccctctcactcctgctgctgcccatgctctgccctcccttctggttgctctgagggttcggagcttccctctgggactaaaggagtgtcctttaccctcccagcctccaggctctggcagaaataaactccaacccgactgga

SEQ ID NO: 415473 - DNA, 1397 bp, Homo sapiens
caccagggcaaaggtgcatgggagaagacccggctggccctggaggccgaggtgtccgagctgcgggcagaactgagcagcctgcagactgcacgtcaggagggtgagcagcggaggcgccgcctggagttacagctgcaggaggtgcagggccgggctggtgatggggagagggcacgagcggaggctgctgagaagctgcagcgagcccaggctgaactggagaatgtgtctggggcgctgaacgaggctgagtccaaaaccatccgtcttagcaaggagctgagcagcacagaagcccagctgcacgatgcccaggagctgctgcaggaggagaccagggcgaaattggccttggggtcccgggtgcgagccatggaggctgaggcagccgggctgcgtgagcagctggaggaggaggcagctgccagggaacgggcgggccgtgaactgcagactgcccaggcccagctttccgagtggcggcggcgccaggaggaggaggcaggggcactggaggcaggggaggaggcacggcgccgggcagcccgggaggccgaggccctgacccagcgcctggcagaaaagacagagaccgtggatcggctggagcggggccgccgccggctgcagcaggagctggacgacgccaccctgtccccagatgcactaacagatggggcccagcccccttcctccctggaccccacgggcccctgtcccaggaaccccgccctctgacttcttgccctttggaaatggtgcagcactctggcatttatcacccccacctgggtcccctgcaacctcccatcaaaggatgacccctaaacacagaggagcggggcaggcagggaggcaaggactggagctaccttgcttgttgggggactgggtacagttggcaagctgtgtttccatcagctccctgtcctcctttcttccctcgttattgatctatagacattaggaagggagtgagacggctcctccaccatcctcagccagtgcaacccattccctctgcttctctctctctctctctctctccctccctctccttccctaccctctcaccatctttcttggcctctctgagggtctctctgtgcatctttttaggaatctcgctctcactctctacgtagccactctccttcccccatttctgcgtccacccctgaactcctgagcgacagaagccccaggcctccaccagccttgaacccttgcaaaggggcaggacaaggggacccctctcactcctgctgctgcccatgctctgccctcccttctggttgctctgagggttcggagcttccctctgggactaaaggagtgtcctttaccctcccagcctccaggctctggcagaaataaactccaacccgactgga

SEQ ID NO: 415474 - DNA, 3042 bp, Homo sapiens
caccagggcaaaggtgcatgggagaagacccggctggccctggaggccgaggtgtccgagctgcgggcagaactgagcagcctgcagactgcacgtcaggagggtgagcagcggaggcgccgcctggagttacagctgcaggaggtgcagggccgggctggtgatggggagagggcacgagcggaggctgctgagaagctgcagcgagcccaggctgaactggagaatgtgtctggggcgctgaacgaggctgagtccaaaaccatccgtcttagcaaggagctgagcagcacagaagcccagctgcacgatgcccaggagctgctgcaggaggagaccagggcgaaattggccttggggtcccgggtgcgagccatggaggctgaggcagccgggctgcgtgagcagctggaggaggaggcagctgccagggaacgggcgggccgtgaactgcagactgcccaggcccagctttccgagtggcggcggcgccaggaggaggaggcaggggcactggaggcaggggaggaggcacggcgccgggcagcccgggaggccgaggccctgacccagcgcctggcagaaaagacagagaccgtggatcggctggagcggggccgccgccggctgcagcaggagctggacgacgccaccatggacctggagcagcagcggcagcttgtgagcaccctggagaagaagcagcgcaagtttgaccagcttctggcagaggagaaggcagctgtacttcgggcagtggaggaacgtgagcgggccgaggcagagggccgggagcgtgaggctcgggccctgtcactgacacgggcactggaggaggagcaggaggcacgtgaggagctggagcggcagaaccgggccctgcgggctgagctggaggcactgctgagcagcaaggatgacgtcggcaagagcgtgcatgagctggaacgagcctgccgggtagcagaacaggcagccaatgatctgcgagcacaggtgacagaactggaggatgagctgacagcggccgaggatgccaagctgcgtctggaggtgactgtgcaggctctcaagactcagcatgagcgtgacctgcagggccgtgatgaggctggtgaagagaggcggaggcagctggccaagcagctgagagatgcagaggtggagcgggatgaggagcggaagcagcgcactctggccgtggctgcccgcaagaagctggagggagagctggaggagctgaaggctcagatggcctctgccggccagggcaaggaggaggcggtgaagcagcttcgcaagatgcaggcccagatgaaggagctatggcgggaggtggaggagacacgcacctcccgggaggagatcttctcccagaatcgggaaagtgaaaagcgcctcaagggcctggaggctgaggtgctgcggctgcaggaggaactggccgcctcggaccgtgctcggcggcaggcccagcaggaccgggatgagatggcagatgaggtggccaatggtaaccttagcaaggcagccattctggaggagaagcgtcagctggaggggcgcctggggcagttggaggaagagctggaggaggagcagagcaactcagagctgctcaatgaccgctaccgcaagctgctcctgcaggtagagtcactgaccacagagctgtcagctgagcgcagtttctcagccaaggcagagagcgggcggcagcagctggaacggcagatccaggagctacggggacgcctgggtgaggaggatgctggggcccgtgcccgccacaagatgaccattgctgcccttgagtctaagttggcccaggctgaggagcagctagagcaagagaccagagagcgcatcctctctggaaagctggtgcgcagagctgagaagcggcttaaagaggtggtgctccaggtggaggaggagcggagggtggctgaccagctccgggaccagctggagaagggaaaccttcgagtcaagcagctgaagcggcagctggaggaggccgaggaggaggcatcccgggctcaggccggccgccggaggctgcagcgtgagctggaagatgtcacagagtcggccgagtccatgaaccgtgaagtgaccacactgaggaaccggcttcgacgcggccccctcaccttcaccacccgcacggtgcgccaggtcttccgactagaggagggcgtggcatccgacgaggaggcagaggaagcacagcctgggtctgggccatccccggagcctgaggggtccccaccagcccacccccagtgaccctaccctgtccccagatgcactaacagatggggcccagcccccttcctccctggaccccacgggcccctgtcccaggaaccccgccctctgacttcttgccctttggaaatggtgcagcactctggcatttatcacccccacctgggtcccctgcaacctcccatcaaaggatgacccctaaacacagaggagcggggcaggcagggaggcaaggactggagctaccttgcttgttgggggactgggtacagttggcaagctgtgtttccatcagctccctgtcctcctttcttccctcgttattgatctatagacattaggaagggagtgagacggctcctccaccatcctcagccagtgcaacccattccctctgcttctctctctctctctctctctccctccctctccttccctaccctctcaccatctttcttggcctctctgagggtctctctgtgcatctttttaggaatctcgctctcactctctacgtagccactctccttcccccatttctgcgtccacccctgaactcctgagcgacagaagccccaggcctccaccagccttgaacccttgcaaaggggcaggacaaggggacccctctcactcctgctgctgcccatgctctgccctcccttctggttgctctgagggttcggagcttccctctgggactaaaggagtgtcctttaccctcccagcctccaggctctggcagaaataaactccaacccgactgga

SEQ ID NO: 415475 - DNA, 2981 bp, Homo sapiens
caccagggcaaaggtgcatgggagaagacccggctggccctggaggccgaggtgtccgagctgcgggcagaactgagcagcctgcagactgcacgtcaggagggtgagcagcggaggcgccgcctggagttacagctgcaggaggtgcagggccgggctggtgatggggagagggcacgagcggaggctgctgagaagctgcagcgagcccaggctgaactggagaatgtgtctggggcgctgaacgaggctgagtccaaaaccatccgtcttagcaaggagctgagcagcacagaagcccagctgcacgatgcccaggagctgctgcaggaggagaccagggcgaaattggccttggggtcccgggtgcgagccatggaggctgaggcagccgggctgcgtgagcagctggaggaggaggcagctgccagggaacgggcgggccgtgaactgcagactgcccaggcccagctttccgagtggcggcggcgccaggaggaggaggcaggggcactggaggcaggggaggaggcacggcgccgggcagcccgggaggccgaggccctgacccagcgcctggcagaaaagacagagaccgtggatcggctggagcggggccgccgccggctgcagcaggagctggacgacgccaccatggacctggagcagcagcggcagcttgtgagcaccctggagaagaagcagcgcaagtttgaccagcttctggcagaggagaaggcagctgtacttcgggcagtggaggaacgtgagcgggccgaggcagagggccgggagcgtgaggctcgggccctgtcactgacacgggcactggaggaggagcaggaggcacgtgaggagctggagcggcagaaccgggccctgcgggctgagctggaggcactgctgagcagcaaggatgacgtcggcaagagcgtgcatgagctggaacgagcctgccgggtagcagaacaggcagccaatgatctgcgagcacaggtgacagaactggaggatgagctgacagcggccgaggatgccaagctgcgtctggaggtgactgtgcaggctctcaagactcagcatgagcgtgacctgcagggccgtgatgaggctggtgaagagaggcggaggcagctggccaagcagctgagagatgcagaggtggagcgggatgaggagcggaagcagcgcactctggccgtggctgcccgcaagaagctggagggagagctggaggagctgaaggctcagatggcctctgccggccagggcaaggaggaggcggtgaagcagcttcgcaagatgcaggcccagatgaaggagctatggcgggaggtggaggagacacgcacctcccgggaggagatcttctcccagaatcgggaaagtgaaaagcgcctcaagggcctggaggctgaggtgctgcggctgcaggaggaactggccgcctcggaccgtgctcggcggcaggcccagcaggaccgggatgagatggcagatgaggtggccaatggtaaccttagcaaggcagccattctggaggagaagcgtcagctggaggggcgcctggggcagttggaggaagagctggaggaggagcagagcaactcagagctgctcaatgaccgctaccgcaagctgctcctgcaggtagagtcactgaccacagagctgtcagctgagcgcagtttctcagccaaggcagagagcgggcggcagcagctggaacggcagatccaggagctacggggacgcctgggtgaggaggatgctggggcccgtgcccgccacaagatgaccattgctgcccttgagtctaagttggcccaggctgaggagcagctagagcaagagaccagagagcgcatcctctctggaaagctggtgcgcagagctgagaagcggcttaaagaggtggtgctccaggtggaggaggagcggagggtggctgaccagctccgggaccagctggagaagggaaaccttcgagtcaagcagctgaagcggcagctggaggaggccgaggaggaggcatcccgggctcaggccggccgccggaggctgcagcgtgagctggaagatgtcacagagtcggccgagtccatgaaccgtgaagtgaccacactgaggaaccggcttcgacgcggccccctcaccttcaccacccgcacggtgcgccaggtcttccgactagaggagggcgtggcatccgacgaggaggcagaggaagcacagcctgggtctgggccatccccggagcctgaggggtccccaccagcccacccccagtgaccctaccctgtccccagatgcactaacagatggggcccagcccccttcctccctggaccccacgggcccctgtcccaggaaccccgccctctgacttcttgccctttggaaatggtgcagcactctggcatttatcacccccacctgggtcccctgcaacctcccatcaaaggatgacccctaaacacagaggagcggggcaggcagggaggcaaggactggagctaccttgcttgttgggggactgggtacagttggcaagctgtgtttccatcagctccctgtcctcctttcttccctcgttattgatctatagacattaggaagggagtgagacggctcctccaccatcctcagccagtgcaacccattccctctgcttctctctgagggtctctctgtgcatctttttaggaatctcgctctcactctctacgtagccactctccttcccccatttctgcgtccacccctgaactcctgagcgacagaagccccaggcctccaccagccttgaacccttgcaaaggggcaggacaaggggacccctctcactcctgctgctgcccatgctctgccctcccttctggttgctctgagggttcggagcttccctctgggactaaaggagtgtcctttaccctcccagcctccaggctctggcagaaataaactccaacccgactgga

SEQ ID NO: 415476 - DNA, 3167 bp, Homo sapiens
caccagggcaaaggtgcatgggagaagacccggctggccctggaggccgaggtgtccgagctgcgggcagaactgagcagcctgcagactgcacgtcaggagggtgagcagcggaggcgccgcctggagttacagctgcaggaggtgcagggccgggctggtgatggggagagggcacgagcggaggctgctgagaagctgcagcgagcccaggctgaactggagaatgtgtctggggcgctgaacgaggctgagtccaaaaccatccgtcttagcaaggagctgagcagcacagaagcccagctgcacgatgcccaggagctgctgcaggaggagaccagggcgaaattggccttggggtcccgggtgcgagccatggaggctgaggcagccgggctgcgtgagcagctggaggaggaggcagctgccagggaacgggcgggccgtgaactgcagactgcccaggcccagctttccgagtggcggcggcgccaggaggaggaggcaggggcactggaggcaggggaggaggcacggcgccgggcagcccgggaggccgaggccctgacccagcgcctggcagaaaagacagagaccgtggatcggctggagcggggccgccgccggctgcagcaggagctggacgacgccaccatggacctggagcagcagcggcagcttgtgagcaccctggagaagaagcagcgcaagtttgaccagcttctggcagaggagaaggcagctgtacttcgggcagtggaggaacgtgagcgggccgaggcagagggccgggagcgtgaggctcgggccctgtcactgacacgggcactggaggaggagcaggaggcacgtgaggagctggagcggcagaaccgggccctgcgggctgagctggaggcactgctgagcagcaaggatgacgtcggcaagagcgtgcatgagctggaacgagcctgccgggtagcagaacaggcagccaatgatctgcgagcacaggtgacagaactggaggatgagctgacagcggccgaggatgccaagctgcgtctggaggtgactgtgcaggctctcaagactcagcatgagcgtgacctgcagggccgtgatgaggctggtgaagagaggcggaggcagctggccaagcagctgagagatgcagaggtggagcgggatgaggagcggaagcagcgcactctggccgtggctgcccgcaagaagctggagggagagctggaggagctgaaggctcagatggcctctgccggccagggcaaggaggaggcggtgaagcagcttcgcaagatgcaggcccagatgaaggagctatggcgggaggtggaggagacacgcacctcccgggaggagatcttctcccagaatcgggaaagtgaaaagcgcctcaagggcctggaggctgaggtgctgcggctgcaggaggaactggccgcctcggaccgtgctcggcggcaggcccagcaggaccgggatgagatggcagatgaggtggccaatggtaaccttagcaaggcagccattctggaggagaagcgtcagctggaggggcgcctggggcagttggaggaagagctggaggaggagcagagcaactcagagctgctcaatgaccgctaccgcaagctgctcctgcaggtagagtcactgaccacagagctgtcagctgagcgcagtttctcagccaaggcagagagcgggcggcagcagctggaacggcagatccaggagctacggggacgcctgggtgaggaggatgctggggcccgtgcccgccacaagatgaccattgctgcccttgagtctaagttggcccaggctgaggagcagctagagcaagagaccagagagcgcatcctctctggaaagctggtgcgcagagctgagaagcggcttaaagaggtggtgctccaggtggaggaggagcggagggtggctgaccagctccgggaccagctggagaagggaaaccttcgagtcaagcagctgaagcggcagctggaggaggccgaggaggaggcatcccgggctcaggccggccgccggaggctgcagcgtgagctggaagatgtcacagagtcggccgagtccatgaaccgtgaagtgaccacactgaggaaccggcttcgacgcggccccctcaccttcaccacccgcacggtgcgccaggtcttccgactagaggagggcgtggcatccgacgaggaggcagaggaagcacagcctgggtctgggccatccccggagcctgaggggtccccaccagcccacccccagtgaccctaccctgtccccagatgcactaacagatggggcccagcccccttcctccctggaccccacgggcccctgtcccaggaaccccgccctctgacttcttgccctttggaaatggtgcagcactctggcatttatcacccccacctgggtcccctgcaacctcccatcaaaggatgacccctaaacacagaggagcggggcaggcagggaggcaaggactggagctaccttgcttgttgggggactgggtacagttggcaagctgtgtttccatcagctccctgtcctcctttcttccctcgttattgatctatagacattaggaagggagtgagacggctcctccaccatcctcagccagtgcaacccattccctctgcttctctctctctctctctctctccctccctctccttccctaccctctcaccatctttcttggcctctctgagggtctctctgtgcatctttttaggaatctcgctctcactctctacgtagccactctccttcccccatttctgcgtccacccctgaactcctgagcgacagaagccccaggcctccaccagccttgaacccttgcaaaggggcaggacaaggggacccctctcactcctgctgctgcccatgctctgccctcccttctggttgctctgagggttcggagcttccctctgggactaaaggagtgtcctttaccctcccagcctccaggctctggcagaaataaactccaacccgactggaaaaaaaaaaaaaaaaaaactcgaggggggcccgtccccaattcgcctataggagtgtattacaattactggccgcggttacaacgtctgactggaaaaccttgcgtacccaactaatggctggag

SEQ ID NO: 415477 - DNA, 1651 bp, Homo sapiens
ttgacatgatagaattgagctggtaccggtgtttataaggtgtgtgctgggatggagcttggactgtgtgcgttgtgttaaacgtggatggatggggatgagatggagatgaggtggcaatggtaaccttagcaaggcagccattctggaggagaagcgtcagctggaggggcgcctggggcagttggaggaagagctggaggaggagcagagcaactcagagctgctcaatgaccgctaccgcaagctgctcctgcaggtagagtcactgaccacagagctgtcagctgagcgcagtttctcagccaaggcagagagcgggcggcagcagctggaacggcagatccaggagctacggggacgcctgggtgaggaggatgctggggcccgtgcccgccacaagatgaccattgctgcccttgagtctaagttggcccaggctgaggagcagctagagcaagagaccagagagcgcatcctctctggaaagctggtgcgcagagctgagaagcggcttaaagaggtggtgctccaggtggaggaggagcggagggtggctgaccagctccgggaccagctggagaagggaaaccttcgagtcaagcagctgaagcggcagctggaggaggccgaggaggaggcatcccgggctcaggccggccgccggaggctgcagcgtgagctggaagatgtcacagagtcggccgagtccatgaaccgtgaagtgaccacactgaggaaccggcttcgacgcggccccctcaccttcaccacccgcacggtgcgccaggtcttccgactagaggagggcgtggcatccgacgaggaggcagaggaagcacagcctgggtctgggccatccccggagcctgaggggtccccaccagcccacccccagtgaccctaccctgtccccagatgcactaacagatggggcccagcccccttcctccctggaccccacgggcccctgtcccaggaaccccgccctctgacttcttgccctttggaaatggtgcagcactctggcatttatcacccccacctgggtcccctgcaacctcccatcaaaggatgacccctaaacacagaggagcggggcaggcagggaggcaaggactggagctaccttgcttgttgggggactgggtacagttggcaagctgtgtttccatcagctccctgtcctcctttcttccctcgttattgatctatagacattaggaagggagtgagacggctcctccaccatcctcagccagtgcaacccattccctctgcttctctctctctctctctctctccctccctctccttccctaccctctcaccatctttcttggcctctctgagggtctctctgtgcatctttttaggaatctcgctctcactctctacgtagccactctccttcccccatttctgcgtccacccctgaactcctgagcgacagaagccccaggcctccaccagccttgaacccttgcaaaggggcaggacaaggggacccctctcactcctgctgctgcccatgctctgccctcccttctggttgctctgagggttcggagcttccctctgggactaaaggagtgtcctttaccctcccagcctccaggctctggcagaaataaactccaacccgactgga

SEQ ID NO: 415478 - DNA, 2947 bp, Homo sapiens
caccagggcaaaggtgcatgggagaagacccggctggccctggaggccgaggtgtccgagctgcgggcagaactgagcagcctgcagactgcacgtcaggagggtgagcagcggaggcgccgcctggagttacagctgcaggaggtgcagggccgggctggtgatggggagagggcacgagcggaggctgctgagaagctgcagcgagcccaggctgaactggagaatgtgtctggggcgctgaacgaggctgagtccaaaaccatccgtcttagcaaggagctgagcagcacagaagcccagctgcacgatgcccaggagctgctgcaggaggagaccagggcgaaattggccttggggtcccgggtgcgagccatggaggctgaggcagccgggctgcgtgagcagctggaggaggaggcagctgccagggaacgggcgggccgtgaactgcagactgcccaggcccagctttccgagtggcggcggcgccaggaggaggaggcaggggcactggaggcaggggaggaggcacggcgccgggcagcccgggaggccgaggccctgacccagcgcctggcagaaaagacagagaccgtggatcggctggagcggggccgccgccggctgcagcaggagctggacgacgccaccatggacctggagcagcagcggcagcttgtgagcaccctggagaagaagcagcgcaagtttgaccagcttctggcagaggagaaggcagctgtacttcgggcagtggaggaacgtgagcgggccgaggcagagggccgggagcgtgaggctcgggccctgtcactgacacgggcactggaggaggagcaggaggcacgtgaggagctggagcggcagaaccgggccctgcgggctgagctggaggcactgctgagcagcaaggatgacgtcggcaagagcgtgcatgagctggaacgagcctgccgggtagcagaacaggcagccaatgatctgcgagcacaggtgacagaactggaggatgagctgacagcggccgaggatgccaagctgcgtctggaggtgactgtgcaggctctcaagactcagcatgagcgtgacctgcagggccgtgatgaggctggtgaagagaggcggaggcagctggccaagcagctgagagatgcagaggtggagcgggatgaggagcggaagcagcgcactctggccgtggctgcccgcaagaagctggagggagagctggaggagctgaaggctcagatggcctctgccggccagggcaaggaggaggcggtgaagcagcttcgcaagatgcaggcccagatgaaggagctatggcgggaggtggaggagacacgcacctcccgggaggagatcttctcccagaatcgggaaagtgaaaagcgcctcaagggcctggaggctgaggtgctgcggctgcaggaggaactggccgcctcggaccgtgctcggcggcaggcccagcaggaccgggatgagatggcagatgaggtggccaatggtaaccttagcaaggcagccattctggaggagaagcgtcagctggaggggcgcctggggcagttggaggaagagctggaggaggagcagagcaactcagagctgctcaatgaccgctaccgcaagctgctcctgcaggtagagtcactgaccacagagctgtcagctgagcgcagtttctcagccaaggcagagagcgggcggcagcagctggaacggcagatccaggagctacggggacgcctgggtgaggaggatgctggggcccgtgcccgccacaagatgaccattgctgcccttgagtctaagttggcccaggctgaggagcagctagagcaagagaccagagagcgcatcctctctggaaagctggtgcgcagagctgagaagcggcttaaagaggtggtgctccaggtggaggaggagcggagggtggctgaccagctccgggaccagctggagaagggaaaccttcgagtcaagcagctgaagcggcagctggaggaggccgaggaggaggcatcccgggctcaggccggccgccggaggctgcagcgtgagctggaagatgtcacagagtcggccgagtccatgaaccgtgaagtgaccacactgaggaaccggcttcgacgcggccccctcaccttcaccacccgcacggtgcgccaggtcttccgactagaggagggcgtggcatccgacgaggaggcagaggaagcacagcctgggtctgggccatccccggagcctgaggggtccccaccagcccacccccagtgaccctaccctgtccccagatgcactaacagatggggcccagcccccttcctccctggaccccacgggcccctgtcccaggaaccccgccctctgacttcttgccctttggaaatggtgcagcactctggcatttatcacccccacctgggtcccctgcaacctcccatcaaaggatgacccctaaacacagaggagcggggcaggcagggaggcaaggactggagctaccttgcttgttgggggactgggtacagttggcaagctgtgtttccatcagctccctgtcctcctttcttccctcgttattgatctatagacattaggaagggagtgagacggctcctccaccatcctcagccagtgcaacccattccctctgcttctctctctctctctctctctccctcccttctccttcccccatttctgcgtccacccctgaactcctgagcgacagaagccccaggcctccaccagccttgaacccttgcaaaggggcaggacaaggggacccctctcactcctgctgctgcccatgctctgccctcccttctggttgctctgagggttcggagcttccctctgggactaaaggagtgtcctttaccctcccagcctccaggctctggcagaaataaactccaacccgactgga

SEQ ID NO: 415479 - DNA, 2837 bp, Homo sapiens
caccagggcaaaggtgcatgggagaagacccggctggccctggaggccgaggtgtccgagctgcgggcagaactgagcagcctgcagactgcacgtcaggagggtgagcagcggaggcgccgcctggagttacagctgcaggaggtgcagggccgggctggtgatggggagagggcacgagcggaggctgctgagaagctgcagcgagcccaggctgaactggagaatgtgtctggggcgctgaacgaggctgagtccaaaaccatccgtcttagcaaggagctgagcagcacagaagcccagctgcacgatgcccaggagctgctgcaggaggagaccagggcgaaattggccttggggtcccgggtgcgagccatggaggctgaggcagccgggctgcgtgagcagctggaggaggaggcagctgccagggaacgggcgggccgtgaactgcagactgcccaggcccagctttccgagtggcggcggcgccaggaggaggaggcaggggcactggaggcaggggaggaggcacggcgccgggcagcccgggaggccgaggccctgacccagcgcctggcagaaaagacagagaccgtggatcggctggagcggggccgccgccggctgcagcaggagctggacgacgccaccatggacctggagcagcagcggcagcttgtgagcaccctggagaagaagcagcgcaagtttgaccagcttctggcagaggagaaggcagctgtacttcgggcagtggaggaacgtgagcgggccgaggcagagggccgggagcgtgaggctcgggccctgtcactgacacgggcactggaggaggagcaggaggcacgtgaggagctggagcggcagaaccgggccctgcgggctgagctggaggcactgctgagcagcaaggatgacgtcggcaagagcgtgcatgagctggaacgagcctgccgggtagcagaacaggcagccaatgatctgcgagcacaggtgacagaactggaggatgagctgacagcggccgaggatgccaagctgcgtctggaggtgactgtgcaggctctcaagactcagcatgagcgtgacctgcagggccgtgatgaggctggtgaagagaggcggaggcagctggccaagcagctgagagatgcagaggtggagcgggatgaggagcggaagcagcgcactctggccgtggctgcccgcaagaagctggagggagagctggaggagctgaaggctcagatggcctctgccggccagggcaaggaggaggcggtgaagcagcttcgcaagatgcaggcccagatgaaggagctatggcgggaggtggaggagacacgcacctcccgggaggagatcttctcccagaatcgggaaagtgaaaagcgcctcaagggcctggaggctgaggtgctgcggctgcaggaggaactggccgcctcggaccgtgctcggcggcaggcccagcaggaccgggatgagatggcagatgaggtggccaatggtaaccttagcaaggcagccattctggaggagaagcgtcagctggaggggcgcctggggcagttggaggaagagctggaggaggagcagagcaactcagagctgctcaatgaccgctaccgcaagctgctcctgcaggtagagtcactgaccacagagctgtcagctgagcgcagtttctcagccaaggcagagagcgggcggcagcagctggaacggcagatccaggagctacggggacgcctgggtgaggaggatgctggggcccgtgcccgccacaagatgaccattgctgcccttgagtctaagttggcccaggctgaggagcagctagagcaagagaccagagagcgcatcctctctggaaagctggtgcgcagagctgagaagcggcttaaagaggtggtgctccaggtggaggaggagcggagggtggctgaccagctccgggaccagctggagaagggaaaccttcgagtcaagcagctgaagcggcagctggaggaggccgaggaggaggcatcccgggctcaggccggccgccggaggctgcagcgtgagctggaagatgtcacagagtcggccgagtccatgaaccgtgaagtgaccacactgaggaaccggcttcgacgcggccccctcaccttcaccacccgcacggtgcgccaggtcttccgactagaggagggcgtggcatccgacgaggaggcagaggaagcacagcctgggtctgggccatccccggagcctgaggggtccccaccagcccacccccagtgaccctaccctgtccccagatgcactaacagatggggcccagcccccttcctccctggaccccacgggcccctgtcccaggaaccccgccctctgacttcttgccctttggaaatggtgcagcactctggcatttatcacccccacctgggtcccctgcaacctcccatcaaaggatgacccctaaacacagaggagcggggcaggcagggaggcaaggactggagctaccttgcttgttgggggactgggtacagttggcaagctgtgtttccatcagctccctgtcctcctttcttccctcgttattgatctatagacattaggaagggagtgagacggctcctccaccatcctcagccagtgcaacccattccctctgcttctctctctctctctctctctccctccctctccttccctaccctctcaccatctttcttggcctctctgagggtctctctgtgcatttatacacctcacctcgatacatccaaccatcccatcacaccataaaccctaaacacacaacacaccaccaagcaaac

SEQ ID NO: 415480 - DNA, 2869 bp, Homo sapiens
caccagggcaaaggtgcatgggagaagacccggctggccctggaggccgaggtgtccgagctgcgggcagaactgagcagcctgcagactgcacgtcaggagggtgagcagcggaggcgccgcctggagttacagctgcaggaggtgcagggccgggctggtgatggggagagggcacgagcggaggctgctgagaagctgcagcgagcccaggctgaactggagaatgtgtctggggcgctgaacgaggctgagtccaaaaccatccgtcttagcaaggagctgagcagcacagaagcccagctgcacgatgcccaggagctgctgcaggaggagaccagggcgaaattggccttggggtcccgggtgcgagccatggaggctgaggcagccgggctgcgtgagcagctggaggaggaggcagctgccagggaacgggcgggccgtgaactgcagactgcccaggcccagctttccgagtggcggcggcgccaggaggaggaggcaggggcactggaggcaggggaggaggcacggcgccgggcagcccgggaggccgaggccctgacccagcgcctggcagaaaagacagagaccgtggatcggctggagcggggccgccgccggctgcagcaggagctggacgacgccaccatggacctggagcagcagcggcagcttgtgagcaccctggagaagaagcagcgcaagtttgaccagcttctggcagaggagaaggcagctgtacttcgggcagtggaggaacgtgagcgggccgaggcagagggccgggagcgtgaggctcgggccctgtcactgacacgggcactggaggaggagcaggaggcacgtgaggagctggagcggcagaaccgggccctgcgggctgagctggaggcactgctgagcagcaaggatgacgtcggcaagagcgtgcatgagctggaacgagcctgccgggtagcagaacaggcagccaatgatctgcgagcacaggtgacagaactggaggatgagctgacagcggccgaggatgccaagctgcgtctggaggtgactgtgcaggctctcaagactcagcatgagcgtgacctgcagggccgtgatgaggctggtgaagagaggcggaggcagctggccaagcagctgagagatgcagaggtggagcgggatgaggagcggaagcagcgcactctggccgtggctgcccgcaagaagctggagggagagctggaggagctgaaggctcagatggcctctgccggccagggcaaggaggaggcggtgaagcagcttcgcaagatgcaggcccagatgaaggagctatggcgggaggtggaggagacacgcacctcccgggaggagatcttctcccagaatcgggaaagtgaaaagcgcctcaagggcctggaggctgaggtgctgcggctgcaggaggaactggccgcctcggaccgtgctcggcggcaggcccagcaggaccgggatgagatggcagatgaggtggccaatggtaaccttagcaaggcagccattctggaggagaagcgtcagctggaggggcgcctggggcagttggaggaagagctggaggaggagcagagcaactcagagctgctcaatgaccgctaccgcaagctgctcctgcaggtagagtcactgaccacagagctgtcagctgagcgcagtttctcagccaaggcagagagcgggcggcagcagctggaacggcagatccaggagctacggggacgcctgggtgaggaggatgctggggcccgtgcccgccacaagatgaccattgctgcccttgagtctaagttggcccaggctgaggagcagctagagcaagagaccagagagcgcatcctctctggaaagctggtgcgcagagctgagaagcggcttaaagaggtggtgctccaggtggaggaggagcggagggtggctgaccagctccgggaccagctggagaagggaaaccttcgagtcaagcagctgaagcggcagctggaggaggccgaggaggaggcatcccgggctcaggccggccgccggaggctgcagcgtgagctggaagatgtcacagagtcggccgagtccatgaaccgtgaagtgaccacactgaggaaccggcttcgacgcggccccctcaccttcaccacccgcacggtgcgccaggtcttccgactagaggagggcgtggcatccgacgaggaggcagaggaagcacagcctgggtctgggccatccccggagcctgaggggtccccaccagcccacccccagtgaccctaccctgtccccagatgcactaacagatggggcccagcccccttcctccctggaccccacgggcccctgtcccaggaaccccgccctctgacttcttgccctttggaaatggtgcagcactctggcatttatcacccccacctgggtcccctgcaacctcccatcaaaggatgacccctaaacacagaggagcggggcaggcagggaggcaaggactggagctaccttgcttgttgggggactgggtacagttggcaagctgtgtttccatcagctccctgtcctcctttcttccctcgttattgatctatagacattaggaagggagtgagacggctcctccaccatcctcagccagtgcaacccattccctctgcttctctctctctctctctctctccctccctctccttccctaccctctcaccatctttcttggcctctctgagggtctctctgtgttatcacccccacctgggtcccctgcaacctcccatcaaaggatgacccctaaacacagaggagcggggcaggcagggaggcaatgactggagctaccttgcttgttccgctg

SEQ ID NO: 415481 - DNA, 2697 bp, Homo sapiens
caccagggcaaaggtgcatgggagaagacccggctggccctggaggccgaggtgtccgagctgcgggcagaactgagcagcctgcagactgcacgtcaggagggtgagcagcggaggcgccgcctggagttacagctgcaggaggtgcagggccgggctggtgatggggagagggcacgagcggaggctgctgagaagctgcagcgagcccaggctgaactggagaatgtgtctggggcgctgaacgaggctgagtccaaaaccatccgtcttagcaaggagctgagcagcacagaagcccagctgcacgatgcccaggagctgctgcaggaggagaccagggcgaaattggccttggggtcccgggtgcgagccatggaggctgaggcagccgggctgcgtgagcagctggaggaggaggcagctgccagggaacgggcgggccgtgaactgcagactgcccaggcccagctttccgagtggcggcggcgccaggaggaggaggcaggggcactggaggcaggggaggaggcacggcgccgggcagcccgggaggccgaggccctgacccagcgcctggcagaaaagacagagaccgtggatcggctggagcggggccgccgccggctgcagcaggagctggacgacgccaccatggacctggagcagcagcggcagcttgtgagcaccctggagaagaagcagcgcaagtttgaccagcttctggcagaggagaaggcagctgtacttcgggcagtggaggaacgtgagcgggccgaggcagagggccgggagcgtgaggctcgggccctgtcactgacacgggcactggaggaggagcaggaggcacgtgaggagctggagcggcagaaccgggccctgcgggctgagctggaggcactgctgagcagcaaggatgacgtcggcaagagcgtgcatgagctggaacgagcctgccgggtagcagaacaggcagccaatgatctgcgagcacaggtgacagaactggaggatgagctgacagcggccgaggatgccaagctgcgtctggaggtgactgtgcaggctctcaagactcagcatgagcgtgacctgcagggccgtgatgaggctggtgaagagaggcggaggcagctggccaagcagctgagagatgcagaggtggagcgggatgaggagcggaagcagcgcactctggccgtggctgcccgcaagaagctggagggagagctggaggagctgaaggctcagatggcctctgccggccagggcaaggaggaggcggtgaagcagcttcgcaagatgcaggcccagatgaaggagctatggcgggaggtggaggagacacgcacctcccgggaggagatcttctcccagaatcgggaaagtgaaaagcgcctcaagggcctggaggctgaggtgctgcggctgcaggaggaactggccgcctcggaccgtgctcggcggcaggcccagcaggaccgggatgagatggcagatgaggtggccaatggtaaccttagcaaggcagccattctggaggagaagcgtcagctggaggggcgcctggggcagttggaggaagagctggaggaggagcagagcaactcagagctgctcaatgaccgctaccgcaagctgctcctgcaggtagagtcactgaccacagagctgtcagctgagcgcagtttctcagccaaggcagagagcgggcggcagcagctggaacggcagatccaggagctacggggacgcctgggtgaggaggatgctggggcccgtgcccgccacaagatgaccattgctgcccttgagtctaagttggcccaggctgaggagcagctagagcaagagaccagagagcgcatcctctctggaaagctggtgcgcagagctgagaagcggcttaaagaggtggtgctccaggtggaggaggagcggagggtggctgaccagctccgggaccagctggagaagggaaaccttcgagtcaagcagctgaagcggcagctggaggaggccgaggaggaggcatcccgggctcaggccggccgccggaggctgcagcgtgagctggaagatgtcacagagtcggccgagtccatgaaccgtgaagtgaccacactgaggaaccggcttcgacgcggccccctcaccttcaccacccgcacggtgcgccaggtcttccgactagaggagggcgtggcatccgacgaggaggcagaggaagcacagcctgggtctgggccatccccggagcctgaggggtccccaccagcccacccccagtgaccctaccctgtccccagatgcactaacagatggggcccagcccccttcctccctggaccccacgggcccctgtcccaggaaccccgccctctgacttcttgccctttggaaatggtgcagcactctggcatttatcacccccacctgggtcccctgcaacctcccatcaaaggatgacccctaaacacagaggagcggggcaggcagggaggcaaggactggagctaccttgcttgttgggggactgggtacagttggcaactgaaggctcagatgcctctgccggccagggcaaggaggaggcggtgaaacacgtcgcaagatgcaggcccagatgaaggagctatggcgtgaggtggaggagacacgcacctcccgggaggagatcttctcccagaatcggga

SEQ ID NO: 415482 - DNA, 573 bp, Homo sapiens
gggtgagtctagaggatcccgtgtgtggcaggaggcaaggactggagctaccttgcttgttgggggactgggtacagttggcaagctgtgtttccatcagctccctgtcctcctttcttccctcgttattgatctatagacattaggaagggagtgagacggctcctccaccatcctcagccagtgcaacccattccctctgcttctctctctctctctctctctccctccctctccttccctaccctctcaccatctttcttggcctctctgagggtctctctgtgcatctttttaggaatctcgctctcactctctacgtagccactctccttcccccatttctgcgtccacccctgaactcctgagcgacagaagccccaggcctccaccagccttgaacccttgcaaaggggcaggacaaggggacccctctcactcctgctgctgcccatgctctgccctcccttctggttgctctgagggttcggagcttccctctgggactaaaggagtgtcctttaccctcccagcctccaggctctggcagaaataaactccaacccgactgga

SEQ ID NO: 415483 - DNA, 2395 bp, Homo sapiens
caccagggcaaaggtgcatgggagaagacccggctggccctggaggccgaggtgtccgagctgcgggcagaactgagcagcctgcagactgcacgtcaggagggtgagcagcggaggcgccgcctggagttacagctgcaggaggtgcagggccgggctggtgatggggagagggcacgagcggaggctgctgagaagctgcagcgagcccaggctgaactggagaatgtgtctggggcgctgaacgaggctgagtccaaaaccatccgtcttagcaaggagctgagcagcacagaagcccagctgcacgatgcccaggagctgctgcaggaggagaccagggcgaaattggccttggggtcccgggtgcgagccatggaggctgaggcagccgggctgcgtgagcagctggaggaggaggcagctgccagggaacgggcgggccgtgaactgcagactgcccaggcccagctttccgagtggcggcggcgccaggaggaggaggcaggggcactggaggcaggggaggaggcacggcgccgggcagcccgggaggccgaggccctgacccagcgcctggcagaaaagacagagaccgtggatcggctggagcggggccgccgccggctgcagcaggagctggacgacgccaccatggacctggagcagcagcggcagcttgtgagcaccctggagaagaagcagcgcaagtttgaccagcttctggcagaggagaaggcagctgtacttcgggcagtggaggaacgtgagcgggccgaggcagagggccgggagcgtgaggctcgggccctgtcactgacacgggcactggaggaggagcaggaggcacgtgaggagctggagcggcagaaccgggccctgcgggctgagctggaggcactgctgagcagcaaggatgacgtcggcaagagcgtgcatgagctggaacgagcctgccgggtagcagaacaggcagccaatgatctgcgagcacaggtgacagaactggaggatgagctgacagcggccgaggatgccaagctgcgtctggaggtgactgtgcaggctctcaagactcagcatgagcgtgacctgcagggccgtgatgaggctggtgaagagaggcggaggcagctggccaagcagctgagagatgcagaggtggagcgggatgaggagcggaagcagcgcactctggccgtggctgcccgcaagaagctggagggagagctggaggagctgaaggctcagatggcctctgccggccagggcaaggaggaggcggtgaagcagcttcgcaagatgcaggcccagatgaaggagctatggcgggaggtggaggagacacgcacctcccgggaggagatcttctcccagaatcgggaaagtgaaaagcgcctcaagggcctggaggctgaggtgctgcggctgcaggaggaactggccgcctcggaccgtgctcggcggcaggcccagcaggaccgggatgagatggcagatgaggtggccaatggtaaccttagcaaggcagccattctggaggagaagcgtcagctggaggggcgcctggggcagttggaggaagagctggaggaggagcagagcaactcagagctgctcaatgaccgctaccgcaagctgctcctgcaggtagagtcactgaccacagagctgtcagctgagcgcagtttctcagccaaggcagagagcgggcggcagcagctggaacggcagatccaggagctacggggacgcctgggtgaggaggatgctggggcccgtgcccgccacaagatgaccattgctgcccttgagtctaagttggcccaggctgaggagcagctagagcaagagaccagagagcgcatcctctctggaaagctggtgcgcagagctgagaagcggcttaaagaggtggtgctccaggtggaggaggagcggagggtggctgaccagctccgggaccagctggagaagggaaaccttcgagtcaagcagctgaagcggcagctggaggaggccgaggaggaggcatcccgggctcaggccggccgccggaggctgcagcgtgagctggaagatgtcacagagtcggccgagtccatgaaccgtgaagtgaccacactgaggaaccggcttcgacgcggccccctcaccttcaccacccgcacggtgcgccaggtcttccgactagaggagggcgtggcatccgacgaggaggcagaggaagcacagcctgggtctgggccatcccctctcactcctgctgctgcccatgctctgccctcccttctggttgctctgagggttcggagcttccctctgggactaaaggagtgtcctttaccctcccagcctccaggctctggcagaaataaactccaacccgactgga

SEQ ID NO: 415484 - DNA, 133 bp, Homo sapiens
cattcctgccagtgtggtagagagttgaggcagatggggtcactgggtggaagccacgattggagggcttcattcccgtcccttccctgcaggctgaactggagaatgtgtctggggcgctgaacgaggctga

SEQ ID NO: 415485 - DNA, 342 bp, Homo sapiens
agaggttgcagtgagccgagattgtaacactgcactccagcctgagtgacagagtgagaataaacaaacaaacaaacaaactgagaaggggaacccaaagctaaaggtcaaagacagtggcaaggggtctgactccagaaacccggagtcagagctgctctgtcagacgtgctcaggaacccaggtaagggcgtcttggaaacggcaccttccagagcaagccagcgaccacgctaaggtcagctggtccgtgttccatccctgaaatgttctgggtcacacgacagggtcatgtggattgttctgctaggtggttttgtgggtcccctgtatttaacacca

SEQ ID NO: 415486 - DNA, 283 bp, Homo sapiens
agaggttgcagtgagccgagattgtaacactgcactccagcctgagtgacagagtgagaataaacaaacaaacaaacaaactgagaaggggaacccaaagctaaaggtcaaagacagtggcaaggggtctgactccagaaacccggagtcagagctgctctgtcagacgtgctcaggaacccaggtaagggcgtcttggaaacggcaccttccagagcaagccagcgaccacgctaaggtcagctggtccgtgttcggggggagggggggggggggggaattc

SEQ ID NO: 415487 - DNA, 6244 bp, Homo sapiens
  misc_feature (2033)..(2033): n is a, c, g, or t
  misc_feature (4968)..(4968): n is a, c, g, or t
  misc_feature (5127)..(5127): n is a, c, g, or t
tgaggggattcctgcatgtcagaccctggctattatcctggagtgtgcgcctggaggcctaggtggggttaccaagtgcagggacagctaggctgtcccctctgggatggaacaaccaacccccccggagactgtgcctgcaggtgtccatcaccttcaaggacttggccgtgcggttctcggaggaggagtggcggctcctggaggaggggcagagggagttctaccgagacgtgatgcgggagaactacgagacgctggtctctgtggggacagctgagctgctccccctctctgctttcctgtcaccctcagagcctggaagagctgttgggggagggagccacgctgatgaggggcaggagcctgctggttgtggagatccccaggggggacagccccggcacagcctgcacctcacagccctggtgcagctggtgaaggagatcccagagttcttgtttggagaagtcaagggcgctatggacagccccgagagcgagagccggggagccagcctggatggagagagagcgagccccgaggctgcggcaagagagccctgccctctccgaggcctgctcagctgccttccagacggccctaccagccagccccacctggccaccacgcccaccgacagctcgtgttccagtggcccaactggtgacggggtccagggaagtcctctccccatcaaaactgccgacaaaccgtggcctacaaggaaggaaggcccaggagccctgggcggggagcccagccctcccacccatagccccagcaggaggaagagccacagaggacaggagagagggacctcagaggccggaatttctcctgggaacagccccttgcaaggcctcatcaactgtctgaaggaaatccttgtgcctgggccccggcaccccgagacatccccaagcttcttgccacctctccctagcctgggcacgtccaggctaaccagagcagacctggggcctgggagcccgccctgggcagtgaagaccgaggcggtttcaggggattgtcccctccagggtctgctacactgtctgaaggagctccccgaggcccaggacaggcatcccagtccctcaggagtggggaaccgacggctacaggagaatccaggagcctggaaaaggggttctggagggcctggatacctcctgacccctcctccccatcctgatcttggagctggcggtctgctctctgtgaagatggagaacagctgggtccagagccccccaggacctgcatcctgtcagcctggcaggcagcccctcagtccctcagccactggagacaccagaggggtcccccaacccagctggggccctgaggctcaagctgccagtgcctcaagctcaccgctggaagccctggaagcctgtctgaagggcattcccccaaatgggtcgtcaccttcccagctgccacccacttcttgttcccagaacccccagccaggagactctaggtctcagaagcctgaactgcaaccccacagatcacacagtgaagaagcgaccagagagcctgttctgcctctgggtctgcagagctgtgtgagagatggccccagcaggcccctggccgcgcgaggaagccccacgagcttctcctcatccagcagcaccgactgggacctggattttgggagtcctgtggggaaccaggggcagcatcctggaaaaggaagcccaccaggaagctccccactgcagggtctggagaattgtctcaaggagatacctgtgcctgtgctgcggcctgcctggccctgctcctcagcagcagacaggggaccgaggagagcagagcccaggaactggacagcagacaaggaagggtctgcccccaagccctccccgctgcactgcctggagagcgccctgagggggatcttgcctgtaaggcccttgcgcttcgcctgcgtgggaggccccagccccagccccagccccggctccagctcgagcttcagcggctctgaaggagaagacccgaggccagagcctganctctggaagccgctcccccaggagagggaccgccttcccagctgtaagcctcctgtccctctgtccccatgtcctggtgggacccctgctggcagcagtggcggcagccctggtgaagaccccaggagaacagagcccaggtacagctcaggatccctgcccggtttctcagctggagaaaaggcccagggttagtgaagcatccagaggcctggagcttggacatggaagacccagagttgcagccaagacccatgagaggctgctcccccagggcccgcctgagctgcccagtgagtctccccctccggagctgccccctccggaagctgcgcctcctgtgttgccagcctcctccctgcagccgccatgccactgtgggaagcccctgcagcaggagctgcacagcctcggtgctgcccttgcggagaagctggatcggctcgccacagcgctggcaggcctggctcaggaagtggccaccatgaggacccaggtgaatcggctggggaggcgcccccaaggccctgggccaatgggccaagcttcctggatgtggaccctcccacggggacctcgctgggctcatggccctggtcacagacatctgccctactggaggcagaagggacccacgaggcctaaaccaaagatcctgcgtggccagggagagagctgcagggctggtgacctgcaaggactctccagagggaccgctcgccgggcacgtccgctgcctccagacgctcccccggcagaacctcctgggctccactgcagctcttcccagcagctgctgtcctctacacccagctgccatgctgcgccgcctgcacaccccctcctcgcacataccgggggccaccagagcccccttccccctttagtgcctgctgccttacccctgcagggagcctctcctcctgcagccagtgcagatgcagacgtgccgacctcaggagtggcaccagacgggatcccagagcggcccaaggagccgagcagcctgctgggaggagtgcagagggccctccaggaagaactgtggggtggggagcacagggacccgagatggggggcgcattgatggcattcctcttctccacatctgctcgttcttgccgagggtgcagtggtggcgtggaagccctgtcaccccaccccaggccaccctctcccagaggacgccatctcccttactgttgctgggagcctcgccctttgtcccaactgggtagagcccccaggtgctgtttgctcaggaggctgctgtgggggtgccttcctcagcctctggccctcttggctcagattcaatcaaatgttgcttccctctcctgtctttcccactggagccgcccaagcttgtaggtgggtggtgtgcataggccacgtgtgccccacatatgcagggggtgccccacacagctagagcggccaggagagcgcctcctaaccaccagccgttcctgatctcaggagccttgaagggctgggctcttgccttcctggagtaaatattggcacagatttcatttgagagaactcagccccctggtctaagctggacttacctctgtggattctgaaattaaagaagtgagttgctaaggaaggccctgactcctatagaagggaggtccatgtgggcccacgctggggcggggctggttgtgccaccagcacgctgcctcgtctcccagacatcctcgagaacattcaggagtgtgccaggaagggtggggcaattcccacaggactcctggggcacactctgagtcccctggggctgcctcacagaggaaccctgcctgggcagcttcaacagcagcacatattgtctctgtcctggaggccagaagtctacaatccaggtgtcaggttcagttcctgctttgggctgggagggaggatcggtcccggacctctccccttgacctgtagatggctgtcttcctgttcagatggtgttttctacacagctgtctccagatttccccttcatatcagggcagcagttgtatggggttatgacccaccctaatgacttcattttaacctgattacctctctaaacaccccctctccaagtgaggtcacatttggaggtactggaggttaggccttcaccatacacatttggggaggggcacagttcagcctgtaacacaccaaacgggctgggccagtcttcctggttttgtcttgggaaaagacatgaccaggtatcactagcccacttctgtcctggttaccggaatgtgcctgctcccagcccgctcagctggcgcttggcaatgcgttggaaccagcctgcctgtcattcccttgcatcatcttcccaagaggcagaatgcaacctgtgtgcccccaaatcccttatttgacctgaggtggtttcaggacctgtatgtgcacctgttgactggcagggccagcctggtgtggactggcagggccagcctggtgtggactggcacacttggccctgtcctcaggtccctgaggagcctgggacaccagcactgtggcctggggcaatgctggctgcccaccatgactacaggagcagtgccttgtggctgcagcgcccagtgtgtccctcaagtcagggtcactggggacacactcggggcctaagtgccctgcagctgagcttgggagctgaagcccttgctctttgccaccctgtagaagcagcagggcaaggacacctgtcagaggggaatgcccgcaacagactgaacatcacaaagggatgggaagatgctttcaggactagagtgagccccgaggtgactgtctggaaacagatcctaagaccatacaagtaggatgtttgttgaaatacggaggctgttcgctcacagccgtgcttgcacagaatcaggaagggaaagtttctaggttgctcctgcctgaggagctctccttntaataagcagggagcagtgccgggcacgtttcagagccacggcaaggggtgggacacagtttcagaggggggttgagaagcgaaactgcccctgccctgactctggctgtgaggagaggactcttgcccacccctgctgcagctggtgcagtcccatcntgcctgcctgtcctcccattctcctttcccttctaagcaggggtcactgggctgtcgactcaatgggagggggggtcaccttacacttctgtgtggcacattaaggtggttttgctttgctggcttccgaaacagccaccacgcaaaccctagttgacaggcacgactgaacaaatgagcatggtggctgtaagtgactgtcacagttaggcagccttcaaccagcagagctaggaagagagctcgagccctcaccagtgccgccagcactcggcgcatcctcaccctgggcacagatgccccctcccagcctttgcctgctgggacagaccagggtattcaggactgagcctggtctaggtggtccagacccagttggaccatataataagtttaaagttgttttaagaatgtggattctaagtaataagtggtaagaagttccatggtctgcagctgcgttcctcctgcagaagcagttccctaggtctaggtctccaggacctgtccacagtcactgaaacgccttctagaattgatctagtggaaaatctagatgcagtttaggtctttggcactgtgcccatctcctttaagaactgtgcagtgtggcttggaagaggaaatgtggtccctttgatgggagaaactgaaggacctttttgaactcaaaggagctccagggtttggaattgggggcagagaaggctccaggctgctcattccatcctgggtgagccgaacgggtcctggctgatctgagtgcgaccttcccagtctgccagccagagtcccccagcaggcaggaacatgtgaaggttccgcttcaaaatatgaatgaatgggctcctcgtgcccctattattttctggccacccccaggggtcctgatggaagggaggctggcctgcggggtgcaagaaccacgattcactgctccccgctgaaggtgcttggtcaagagcagcaggcatgctgttaacctttgtgcgggtttgtgttttggatgtggctcctatgcacaacctatggattttatctcataaaccatcttgacagattttgctcgtcaactgggagcccttaatccatttaaatgtaattgactgactgattt

SEQ ID NO: 415488 - DNA, 7153 bp, Homo sapiens
  misc_feature (2919)..(2919): n is a, c, g, or t
  misc_feature (5877)..(5877): n is a, c, g, or t
  misc_feature (6036)..(6036): n is a, c, g, or t
tgaggggattcctgcatgtcagaccctggctattatcctggagtgtgcgcctggaggcctaggtggggttaccaagtgcagggacagctaggctgtcccctctgggatggaacaaccaacccccccggagactgtgcctgcaggtgtccatcaccttcaaggacttggccgtgcggttctcggaggaggagtggcggctcctggaggaggggcagagggagttctaccgagacgtgatgcgggagaactacgagacgctggtctctgtggggacagctgagctgctccccctctctgctttcctgtcaccctcagagcctggaagagctgttgggggagggagccacgctgatgaggggcaggagcctgctggttgtggagatccccaggggggacagccccggcacagcctgcacctcacagccctggtgcagctggtgaaggagatcccagagttcttgtttggagaagtcaagggcgctatggacagccccgagagcgagagccggggagccagcctggatggagagagagcgagccccgaggctgcggcaagagagccctgccctctccgaggcctgctcagctgccttccagacggccctaccagccagccccacctggccaccacgcccaccgacagctcgtgttccagtggcccaactggtgacggggtccagggaagtcctctccccatcagtgagtctgacacagcagggacagggagaaccagcatttcaaaagccctgatcgtggcgtcagaggacctggaccctgtgccctcttcatttttttctaggactcagttcccctgttgtgctgttcttttgttaacaaagtacgccagggagcaggacaacatatttagcctctggtgtaaccaccaaagaggaggcatgatgctcagcccctggggagcctgtcatcccgccccgatcactgagcactttgtacacagaaagtctccggcagtttctaacatgcaggcccacggccagcagcattgacctacctgtgtgcactggtctgatccttagaccgtctcatcacagcaaccctaactgcagagcagggcaaggggagctcctaggatttctctggggtctcattttatttttaaaacttctcacaaattttgcatgtctgtttttataaaaaagtacttcaaatttatatggaataaaattggcactcccaaagagcataccccatttagctgtggtttcatctggtgttcaggggtcgtcgggcacacttgctctggggttctgtgtgccctgtgtgtgccctggtttgagaagcgtgagtgtgagattgtggcctacatgtcaaggctgccggcatcacttcctgagccaaattccgaggctgggctcagggggaagggtctgggagtgttcacagtgaaccaacagtcttgctgtttccagttaaaccagaaagaaacggtaaaggccctcagcccacctcgaacagggacttgggtggctggagagggctgtcctctatgggaaccagatctggtgtgattttccagagtctggagctggggctagaaaggccctcttgtcttctcctgcaacagaaactgccgacaaaccgtggcctacaaggaaggaaggcccaggagccctgggcggggagcccagccctcccacccatagccccagcaggaggaagagccacagaggacaggagagagggacctcagaggccggaatttctcctgggaacagccccttgcaaggcctcatcaactgtctgaaggaaatccttgtgcctgggccccggcaccccgagacatccccaagcttcttgccacctctccctagcctgggcacgtccaggctaaccagagcagacctggggcctgggagcccgccctgggcagtgaagaccgaggcggtttcaggggattgtcccctccagggtctgctacactgtctgaaggagctccccgaggcccaggacaggcatcccagtccctcaggagtggggaaccgacggctacaggagaatccaggagcctggaaaaggggttctggagggcctggatacctcctgacccctcctccccatcctgatcttggagctggcggtctgctctctgtgaagatggagaacagctgggtccagagccccccaggacctgcatcctgtcagcctggcaggcagcccctcagtccctcagccactggagacaccagaggggtcccccaacccagctggggccctgaggctcaagctgccagtgcctcaagctcaccgctggaagccctggaagcctgtctgaagggcattcccccaaatgggtcgtcaccttcccagctgccacccacttcttgttcccagaacccccagccaggagactctaggtctcagaagcctgaactgcaaccccacagatcacacagtgaagaagcgaccagagagcctgttctgcctctgggtctgcagagctgtgtgagagatggccccagcaggcccctggccgcgcgaggaagccccacgagcttctcctcatccagcagcaccgactgggacctggattttgggagtcctgtggggaaccaggggcagcatcctggaaaaggaagcccaccaggaagctccccactgcagggtctggagaattgtctcaaggagatacctgtgcctgtgctgcggcctgcctggccctgctcctcagcagcagacaggggaccgaggagagcagagcccaggaactggacagcagacaaggaagggtctgcccccaagccctccccgctgcactgcctggagagcgccctgagggggatcttgcctgtaaggcccttgcgcttcgcctgcgtgggaggccccagccccagccccagccccggctccagctcgagcttcagcggctctgaaggagaagacccgaggccagagcctganctctggaagccgctcccccaggagagggaccgccttcccagctgtaagcctcctgtccctctgtccccatgtcctggtgggacccctgctggcagcagtggcggcagccctggtgaagaccccaggagaacagagcccaggtactgcagcggcctcggtgcaggtacagctcaggatccctgcccggtttctcagctggagaaaaggcccagggttagtgaagcatccagaggcctggagcttggacatggaagacccagagttgcagccaagacccatgagaggctgctcccccagggcccgcctgagctgcccagtgagtctccccctccggagctgccccctccggaagctgcgcctcctgtgttgccagcctcctccctgcagccgccatgccactgtgggaagcccctgcagcaggagctgcacagcctcggtgctgcccttgcggagaagctggatcggctcgccacagcgctggcaggcctggctcaggaagtggccaccatgaggacccaggtgaatcggctggggaggcgcccccaaggccctgggccaatgggccaagcttcctggatgtggaccctcccacggggacctcgctgggctcatggccctggtcacagacatctgccctactggaggcagaagggacccacgaggcctaaaccaaagatcctgcgtggccagggagagagctgcagggctggtgacctgcaaggactctccagagggaccgctcgccgggcacgtccgctgcctccagacgctcccccggcagaacctcctgggctccactgcagctcttcccagcagctgctgtcctctacacccagctgccatgctgcgccgcctgcacaccccctcctcgcacataccgggggccaccagagcccccttccccctttagtgcctgctgccttacccctgcagggagcctctcctcctgcagccagtgcagatgcagacgtgccgacctcaggagtggcaccagacgggatcccagagcggcccaaggagccgagcagcctgctgggaggagtgcagagggccctccaggaagaactgtggggtggggagcacagggacccgagatggggggcgcattgatggcattcctcttctccacatctgctcgttcttgccgagggtgcagtggtggcgtggaagccctgtcaccccaccccaggccaccctctcccagaggacgccatctcccttactgttgctgggagcctcgccctttgtcccaactgggtagagcccccaggtgctgtttgctcaggaggctgctgtgggggtgccttcctcagcctctggccctcttggctcagattcaatcaaatgttgcttccctctcctgtctttcccactggagccgcccaagcttgtaggtgggtggtgtgcataggccacgtgtgccccacatatgcagggggtgccccacacagctagagcggccaggagagcgcctcctaaccaccagccgttcctgatctcaggagccttgaagggctgggctcttgccttcctggagtaaatattggcacagatttcatttgagagaactcagccccctggtctaagctggacttacctctgtggattctgaaattaaagaagtgagttgctaaggaaggccctgactcctatagaagggaggtccatgtgggcccacgctggggcggggctggttgtgccaccagcacgctgcctcgtctcccagacatcctcgagaacattcaggagtgtgccaggaagggtggggcaattcccacaggactcctggggcacactctgagtcccctggggctgcctcacagaggaaccctgcctgggcagcttcaacagcagcacatattgtctctgtcctggaggccagaagtctacaatccaggtgtcaggttcagttcctgctttgggctgggagggaggatcggtcccggacctctccccttgacctgtagatggctgtcttcctgttcagatggtgttttctacacagctgtctccagatttccccttcatatcagggcagcagttgtatggggttatgacccaccctaatgacttcattttaacctgattacctctctaaacaccccctctccaagtgaggtcacatttggaggtactggaggttaggccttcaccatacacatttggggaggggcacagttcagcctgtaacacaccaaacgggctgggccagtcttcctggttttgtcttgggaaaagacatgaccaggtatcactagcccacttctgtcctggttaccggaatgtgcctgctcccagcccgctcagctggcgcttggcaatgcgttggaaccagcctgcctgtcattcccttgcatcatcttcccaagaggcagaatgcaacctgtgtgcccccaaatcccttatttgacctgaggtggtttcaggacctgtatgtgcacctgttgactggcagggccagcctggtgtggactggcagggccagcctggtgtggactggcacacttggccctgtcctcaggtccctgaggagcctgggacaccagcactgtggcctggggcaatgctggctgcccaccatgactacaggagcagtgccttgtggctgcagcgcccagtgtgtccctcaagtcagggtcactggggacacactcggggcctaagtgccctgcagctgagcttgggagctgaagcccttgctctttgccaccctgtagaagcagcagggcaaggacacctgtcagaggggaatgcccgcaacagactgaacatcacaaagggatgggaagatgctttcaggactagagtgagccccgaggtgactgtctggaaacagatcctaagaccatacaagtaggatgtttgttgaaatacggaggctgttcgctcacagccgtgcttgcacagaatcaggaagggaaagtttctaggttgctcctgcctgaggagctctccttntaataagcagggagcagtgccgggcacgtttcagagccacggcaaggggtgggacacagtttcagaggggggttgagaagcgaaactgcccctgccctgactctggctgtgaggagaggactcttgcccacccctgctgcagctggtgcagtcccatcntgcctgcctgtcctcccattctcctttcccttctaagcaggggtcactgggctgtcgactcaatgggagggggggtcaccttacacttctgtgtggcacattaaggtggttttgctttgctggcttccgaaacagccaccacgcaaaccctagttgacaggcacgactgaacaaatgagcatggtggctgtaagtgactgtcacagttaggcagccttcaaccagcagagctaggaagagagctcgagccctcaccagtgccgccagcactcggcgcatcctcaccctgggcacagatgccccctcccagcctttgcctgctgggacagaccagggtattcaggactgagcctggtctaggtggtccagacccagttggaccatataataagtttaaagttgttttaagaatgtggattctaagtaataagtggtaagaagttccatggtctgcagctgcgttcctcctgcagaagcagttccctaggtctaggtctccaggacctgtccacagtcactgaaacgccttctagaattgatctagtggaaaatctagatgcagtttaggtctttggcactgtgcccatctcctttaagaactgtgcagtgtggcttggaagaggaaatgtggtccctttgatgggagaaactgaaggacctttttgaactcaaaggagctccagggtttggaattgggggcagagaaggctccaggctgctcattccatcctgggtgagccgaacgggtcctggctgatctgagtgcgaccttcccagtctgccagccagagtcccccagcaggcaggaacatgtgaaggttccgcttcaaaatatgaatgaatgggctcctcgtgcccctattattttctggccacccccaggggtcctgatggaagggaggctggcctgcggggtgcaagaaccacgattcactgctccccgctgaaggtgcttggtcaagagcagcaggcatgctgttaacctttgtgcgggtttgtgttttggatgtggctcctatgcacaacctatggattttatctcataaaccatcttgacagattttgctcgtcaactgggagcccttaatccatttaaatgtaattgactgactgattt

SEQ ID NO: 415489 - DNA, 1000 bp, Homo sapiens
tcttggaaatcgcccgtcctccgcatcacagcctctcaccagcaaagcagcctctgcccaggccctggcgggagagctgcagagggacccaggtgcctggagggcatttgagggaggtggctggacaggtgtctccctgaagaagaagggagaacacttttcaaagtgattccgaggcagtgcgggaggacacacgtgctgtgcagtggagtggggtcgcccgtggcccccatcagagtccccgtcccccaggacaagtgcagaacccggcgggggggtgtggctgcaccccagcaccgggagggggcacgcacgacaccagaggaagggacagccccacccatgtcaacagcaggcaacctgtgttttcatttcaagtgggatacagtatttttttaataaggagccatacttttttttaagagtttgagatctgaatgtgatttctaattgtatcagacgttaatgttttaaagctataacaaagtttaaaatttctactttttgtttttcatttattttaactgttcttttatctattaaattgttgtatgtggatggggaagttttgtttctcctcttagcatttgtttctataaccagaaataaaattctatattaaagaaatgaccctgcggctccggtgtggtccttctgcgcaggtggctactgaaggtggcggacggacagacggcctggacacacagacaccaggcccctggacacataggctcccgaccccctggatacacaaacacctgaccccctggacacacaggctcctgacccccggacacacagacccctgagcccctagacatacaggcacctggccccctggacacagaggctcccgaccccctagacatacaggctcccggccccctggacacacaggcccctgaccccctggacacacaggcccctgaccccctggacacacagacccctgacccctggacacacagacccctgagcccctggacatacaggctcccgg

SEQ ID NO: 415490 - DNA, 1353 bp, Homo sapiens
tagtgcctataaaccgttgttaaaaagcaggctgtacggtccggaatcccggcacagagggagactctgtctcaaaaataataatcaaatcaagtattttaagtttggctcttctttttttcaagaaaggctttttggatacctagaataccttcatgtatgtggcttgatttctgtttcaggaaaaggggggcgggaggagagacaacagccgtgttccagagtctgtcctgagatgtcgctgagtccagacacttgggctgcacgtgccctgcagatgacaaaggccggcagctcagcacacgtgcaggaggggttaaagccaatattgagtttttgttcttgttgttttaatctgaacgattattctcctgtaaaaataatttgggaggggcgggtgttgttcggtgtgtgtgtgtgtgtgtgtgtgtgtgtgtgtgtgtatttttttttttacagtggcgcctgtctaaagtatttttcacaacatgtttgataatcagtgctttaaaaagcagcagtgtcctatgaagtggaaatgtcagttctagagcattggatgtgaagttctggtcatgtcaccttgcgtgtctcaccctggaggagtgaaggtgggcgcccggcgggggggtgtggctgcaccccagcaccgggagggggcacgcacgacaccagaggaagggacagccccacccatgtcaacagcaggcaacctgtgttttcatttcaagtgggatacagtatttttttaataaggagccatacttttttttaagagtttgagatctgaatgtgatttctaattgtatcagacgttaatgttttaaagctataacaaagtttaaaatttctactttttgtttttcatttattttaactgttcttttatctattaaattgttgtatgtggatggggaagttttgtttctcctcttagcatttgtttctataaccagaaataaaattctatattaaagaaatgaccctgcggctccggtgtggtccttctgcgcaggtggctactgaaggtggcggacggacagacggcctggacacacagacaccaggcccctggacacataggctcccgaccccctggatacacaaacacctgaccccctggacacacaggctcctgacccccggacacacagacccctgagcccctagacatacaggcacctggccccctggacacagaggctcccgaccccctagacatacaggctcccggccccctggacacacaggcccctgaccccctggacacacaggcccctgaccccctggacacacagacccctgacccctggacacacagacccctgagcccctggacatacaggctcccgg

SEQ ID NO: 415491 - DNA, 3983 bp, Homo sapiens
  misc_feature (1432)..(1432): n is a, c, g, or t
  misc_feature (1464)..(1464): n is a, c, g, or t
tcttggaaatcgcccgtcctccgcatcacagcctctcaccagcaaagcagcctctgcccaggccctggcgggagagctgcagagggacccaggtgcctggagggcatttgagggaggtggctggacaggtgtctccctgaagaagaagggagaacacttttcaaagtgattccgaggcagtgcgggaggacacacgtgctgtgcagtggagtggggtcgcccgtggcccccatcagagtccccgtcccccaggacaagtgcagaacctctgtgggccccctccttccacctagatagagaaaaccccttgttcggtttccttcccgtgtcccgttgtttttctaagccccccgaattgagtcgtttctatggcactaacctttccatgggaaataagctctttgtggaagtccgtacctgttgccctgggtgaggtttcagagaaacgggggcaggatgaacacagccggctgtcctgggtgcagttacgtccgtggagggtgagagattgcgccccgttccacacttgtgtcgcctgctgttgtctgtgggccttttctttccgtggtgcctggtgtgtgcgtgcatggcgtgagagaacggggggtgggggttggaggtggctccccgacaccggtgcctgtgtggcctgagccggcgccctcccgggagcgcccgtcacggggggcctctgtgattacctgctgctgctctctcccgcgtggtgactatatgtcctcagggctgcctgtggccaccctgatgggagacctctgtttgcttctgggccactgcaggttggcctcctcaatacaagctgatgtctgcagggagcgccgcgtgctgggattgcaccacgtgttggtcacaaatcgaggtcgccttttggcctggtctgctcaggctggccctgacccacgtggtttcctggcttctgagacgcagcgcattcttcctgttagcggtagcgttctctgatttcaactcctgatgaaaacgtgtttacccacagcctcgcctcgagcctccttgacaataccgctgcttcaaagcaatattatttaatgagaatactttacattgctcacatgtgctgctatgaagacaggattagtctgtagacgggactcagctccagaggttcctgggtaatgtattgtggctcttggaaatgagggtagaatttgaaatataacaaatggtctctcgcccggttctgtcccttatttttagattgttttcctgcatcttacaatttccttttcttttcaaagttcctttctccaggcctgtttttcagtgctcaggacacggttttcatcacatacttactgtttttttggttgggttttgatacgaaaagctgctacgtttggtgaccagagggagggtttggaatctgtgctttgcaggggatctcggtgggtaccgnggcccctcgcagggtggcgagtggggtccgtncctcgagaagggggcccttacccacaccgtgcggcttgaattctgtcggagttgaatctgtggaaaggattgtcccattagagctgctgcgtcctttcctctgtcctccctgtcacccaaaccccgaagtcacagctgcttagaagaatgggattttggggatacaaccacacacatttccctctggactgaaattttaaaaacagacccatttcatgacttctttagggaaaatagtttcagtcttgggttgtcttgtgagcccacgggcatgggaccctgtctctgctgggcttttccggccccgtcccagctcctcctcaggcagaggctgcagccctcagctctgctgctggatggaacatttcaaccccctccgggaaggtgggcagggtggagggcccagggctaggcctgccatgcaccatgagcaggggtgctacctgggtgtgtgaagttgggctggcttttcctggaggtgggtgagaaggctctccgggcaaatcagaaggccacgagagagagaggagcggggagagtggtgaggaggattcgtctctgactgatgaacctcgccgtgcctgtctgtcacatccaagtctgtgccagctgctgggaggtcagactcctgccctgagaaacagcccagtccttggagaatgaaaccctgagggtcagtgagtggaggccttccctcggggccagccattcccgggaggcctgagtgtgacctggaagctctgtgggtcaccaagactggcattttccttgtatttttgtgcagggctgaagtgagcgttcctcctctgaattggtgaggctttggaaattttttgtttcttctactcatcctaatggctggttttggctgcccggagtatcagagaatatcactaagagggcagtcagtttatttttaggcatctttctttctgtccagggagaaacccctcggaagaatcttagtcactctttgcacctgccctgtcattctcgccatggggaaaatgcgttgaaaagaaaaataccggggccagggagaagccgtgaatgtatttatttgctttggtgaagctgctgaacactggctgcggagggccccccgcccccatcccgcttcaggccccagtgacccagttgcgtcttaagttccatcgtccagatttcaggccaccagaggctgccaaaggtgactgaagcggtctccaagtcactctgcacagagggagactctgtctcaaaaataataatcaaatcaagtattttaagtttggctcttctttttttcaagaaaggctttttggatacctagaataccttcatgtatgtggcttgatttctgtttcaggaaaaggggggcgggaggagagacaacagccgtgttccagagtctgtcctgagatgtcgctgagtccagacacttgggctgcacgtgccctgcagatgacaaaggccggcagctcagcacacgtgcaggaggggttaaagccaatattgagtttttgttcttgttgttttaatctgaacgattattctcctgtaaaaataatttgggaggggcgggtgttgttcggtgtgtgtgtgtgtgtgtgtgtgtgtgtgtgtgtgtatttttttttttacagtggcgcctgtctaaagtatttttcacaacatgtttgataatcagtgctttaaaaagcagcagtgtcctatgaagtggaaatgtcagttctagagcattggatgtgaagttctggtcatgtcaccttgcgtgtctcaccctggaggagtgaaggtgggcgcccggcgggggggtgtggctgcaccccagcaccgggagggggcacgcacgacaccagaggaagggacagccccacccatgtcaacagcaggcaacctgtgttttcatttcaagtgggatacagtatttttttaataaggagccatacttttttttaagagtttgagatctgaatgtgatttctaattgtatcagacgttaatgttttaaagctataacaaagtttaaaatttctactttttgtttttcatttattttaactgttcttttatctattaaattgttgtatgtggatggggaagttttgtttctcctcttagcatttgtttctataaccagaaataaaattctatattaaagaaatgaccctgcggctccggtgtggtccttctgcgcaggtggctactgaaggtggcggacggacagacggcctggacacacagacaccaggcccctggacacataggctcccgaccccctggatacacaaacacctgaccccctggacacacaggctcctgacccccggacacacagacccctgagcccctagacatacaggcacctggccccctggacacagaggctcccgaccccctagacatacaggctcccggccccctggacacacaggcccctgaccccctggacacacaggcccctgaccccctggacacacagacccctgacccctggacacacagacccctgagcccctggacatacaggctcccgg

SEQ ID NO: 415492 - DNA, 3283 bp, Homo sapiens
  misc_feature (732)..(732): n is a, c, g, or t
  misc_feature (764)..(764): n is a, c, g, or t
aactgttgacccctctagagaggacaccccaagtccatcctgggctcctcctcacccctctgagaaagcccccctaaaaaaaggcttcagagtcaccggcatgccgcctcacgttgcaggacggaatcgcgcgctcctcacgctggagtaagttacgaaacatgatcgtcaggctctttgcaaacgcagagccccagaacgctggatggaggcctcctcggccctgcgggcggcctggctgcggtaggtctgctgcaaggagccaccacggggactgcgccacactcctgatgaaaacgtgtttacccacagcctcgcctcgagcctccttgacaataccgctgcttcaaagcaatattatttaatgagaatactttacattgctcacatgtgctgctatgaagacaggattagtctgtagacgggactcagctccagaggttcctgggtaatgtattgtggctcttggaaatgagggtagaatttgaaatataacaaatggtctctcgcccggttctgtcccttatttttagattgttttcctgcatcttacaatttccttttcttttcaaagttcctttctccaggcctgtttttcagtgctcaggacacggttttcatcacatacttactgtttttttggttgggttttgatacgaaaagctgctacgtttggtgaccagagggagggtttggaatctgtgctttgcaggggatctcggtgggtaccgnggcccctcgcagggtggcgagtggggtccgtncctcgagaagggggcccttacccacaccgtgcggcttgaattctgtcggagttgaatctgtggaaaggattgtcccattagagctgctgcgtcctttcctctgtcctccctgtcacccaaaccccgaagtcacagctgcttagaagaatgggattttggggatacaaccacacacatttccctctggactgaaattttaaaaacagacccatttcatgacttctttagggaaaatagtttcagtcttgggttgtcttgtgagcccacgggcatgggaccctgtctctgctgggcttttccggccccgtcccagctcctcctcaggcagaggctgcagccctcagctctgctgctggatggaacatttcaaccccctccgggaaggtgggcagggtggagggcccagggctaggcctgccatgcaccatgagcaggggtgctacctgggtgtgtgaagttgggctggcttttcctggaggtgggtgagaaggctctccgggcaaatcagaaggccacgagagagagaggagcggggagagtggtgaggaggattcgtctctgactgatgaacctcgccgtgcctgtctgtcacatccaagtctgtgccagctgctgggaggtcagactcctgccctgagaaacagcccagtccttggagaatgaaaccctgagggtcagtgagtggaggccttccctcggggccagccattcccgggaggcctgagtgtgacctggaagctctgtgggtcaccaagactggcattttccttgtatttttgtgcagggctgaagtgagcgttcctcctctgaattggtgaggctttggaaattttttgtttcttctactcatcctaatggctggttttggctgcccggagtatcagagaatatcactaagagggcagtcagtttatttttaggcatctttctttctgtccagggagaaacccctcggaagaatcttagtcactctttgcacctgccctgtcattctcgccatggggaaaatgcgttgaaaagaaaaataccggggccagggagaagccgtgaatgtatttatttgctttggtgaagctgctgaacactggctgcggagggccccccgcccccatcccgcttcaggccccagtgacccagttgcgtcttaagttccatcgtccagatttcaggccaccagaggctgccaaaggtgactgaagcggtctccaagtcactctgcacagagggagactctgtctcaaaaataataatcaaatcaagtattttaagtttggctcttctttttttcaagaaaggctttttggatacctagaataccttcatgtatgtggcttgatttctgtttcaggaaaaggggggcgggaggagagacaacagccgtgttccagagtctgtcctgagatgtcgctgagtccagacacttgggctgcacgtgccctgcagatgacaaaggccggcagctcagcacacgtgcaggaggggttaaagccaatattgagtttttgttcttgttgttttaatctgaacgattattctcctgtaaaaataatttgggaggggcgggtgttgttcggtgtgtgtgtgtgtgtgtgtgtgtgtgtgtgtgtgtatttttttttttacagtggcgcctgtctaaagtatttttcacaacatgtttgataatcagtgctttaaaaagcagcagtgtcctatgaagtggaaatgtcagttctagagcattggatgtgaagttctggtcatgtcaccttgcgtgtctcaccctggaggagtgaaggtgggcgcccggcgggggggtgtggctgcaccccagcaccgggagggggcacgcacgacaccagaggaagggacagccccacccatgtcaacagcaggcaacctgtgttttcatttcaagtgggatacagtatttttttaataaggagccatacttttttttaagagtttgagatctgaatgtgatttctaattgtatcagacgttaatgttttaaagctataacaaagtttaaaatttctactttttgtttttcatttattttaactgttcttttatctattaaattgttgtatgtggatggggaagttttgtttctcctcttagcatttgtttctataaccagaaataaaattctatattaaagaaatgaccctgcggctccggtgtggtccttctgcgcaggtggctactgaaggtggcggacggacagacggcctggacacacagacaccaggcccctggacacataggctcccgaccccctggatacacaaacacctgaccccctggacacacaggctcctgacccccggacacacagacccctgagcccctagacatacaggcacctggccccctggacacagaggctcccgaccccctagacatacaggctcccggccccctggacacacaggcccctgaccccctggacacacaggcccctgaccccctggacacacagacccctgacccctggacacacagacccctgagcccctggacatacaggctcccgg

SEQ ID NO: 415493 - DNA, 4021 bp, Homo sapiens
  misc_feature (1432)..(1432): n is a, c, g, or t
  misc_feature (1464)..(1464): n is a, c, g, or t
tcttggaaatcgcccgtcctccgcatcacagcctctcaccagcaaagcagcctctgcccaggccctggcgggagagctgcagagggacccaggtgcctggagggcatttgagggaggtggctggacaggtgtctccctgaagaagaagggagaacacttttcaaagtgattccgaggcagtgcgggaggacacacgtgctgtgcagtggagtggggtcgcccgtggcccccatcagagtccccgtcccccaggacaagtgcagaacctctgtgggccccctccttccacctagatagagaaaaccccttgttcggtttccttcccgtgtcccgttgtttttctaagccccccgaattgagtcgtttctatggcactaacctttccatgggaaataagctctttgtggaagtccgtacctgttgccctgggtgaggtttcagagaaacgggggcaggatgaacacagccggctgtcctgggtgcagttacgtccgtggagggtgagagattgcgccccgttccacacttgtgtcgcctgctgttgtctgtgggccttttctttccgtggtgcctggtgtgtgcgtgcatggcgtgagagaacggggggtgggggttggaggtggctccccgacaccggtgcctgtgtggcctgagccggcgccctcccgggagcgcccgtcacggggggcctctgtgattacctgctgctgctctctcccgcgtggtgactatatgtcctcagggctgcctgtggccaccctgatgggagacctctgtttgcttctgggccactgcaggttggcctcctcaatacaagctgatgtctgcagggagcgccgcgtgctgggattgcaccacgtgttggtcacaaatcgaggtcgccttttggcctggtctgctcaggctggccctgacccacgtggtttcctggcttctgagacgcagcgcattcttcctgttagcggtagcgttctctgatttcaactcctgatgaaaacgtgtttacccacagcctcgcctcgagcctccttgacaataccgctgcttcaaagcaatattatttaatgagaatactttacattgctcacatgtgctgctatgaagacaggattagtctgtagacgggactcagctccagaggttcctgggtaatgtattgtggctcttggaaatgagggtagaatttgaaatataacaaatggtctctcgcccggttctgtcccttatttttagattgttttcctgcatcttacaatttccttttcttttcaaagttcctttctccaggcctgtttttcagtgctcaggacacggttttcatcacatacttactgtttttttggttgggttttgatacgaaaagctgctacgtttggtgaccagagggagggtttggaatctgtgctttgcaggggatctcggtgggtaccgnggcccctcgcagggtggcgagtggggtccgtncctcgagaagggggcccttacccacaccgtgcggcttgaattctgtcggagttgaatctgtggaaaggattgtcccattagagctgctgcgtcctttcctctgtcctccctgtcacccaaaccccgaagtcacagctgcttagaagaatgggattttggggatacaaccacacacatttccctctggactgaaattttaaaaacagacccatttcatgacttctttagggaaaatagtttcagtcttgggttgtcttgtgagcccacgggcatgggaccctgtctctgctgggcttttccggccccgtcccagctcctcctcaggcagaggctgcagccctcagctctgctgctggatggaacatttcaaccccctccgggaaggtgggcagggtggagggcccagggctaggcctgccatgcaccatgagcaggggtgctacctgggtgtgtgaagttgggctggcttttcctggaggtgggtgagaaggctctccgggcaaatcagaaggccacgagagagagaggagcggggagagtggtgaggaggattcgtctctgactgatgaacctcgccgtgcctgtctgtcacatccaagtctgtgccagctgctgggaggtcagactcctgccctgagaaacagcccagtccttggagaatgaaaccctgagggtcagtgagtggaggccttccctcggggccagccattcccgggaggcctgagtgtgacctggaagctctgtgggtcaccaagactggcattttccttgtatttttgtgcagggctgaagtgagcgttcctcctctgaattggtgaggctttggaaattttttgtttcttctactcatcctaatggctggttttggctgcccggagtatcagagaatatcactaagagggcagtcagtttatttttaggcatctttctttctgtccagggagaaacccctcggaagaatcttagtcactctttgcacctgccctgtcattctcgccatggggaaaatgcgttgaaaagaaaaataccggggccagggagaagccgtgaatgtatttatttgctttggtgaagctgctgaacactggctgcggagggccccccgcccccatcccgcttcaggccccagtgacccagttgcgtcttaagttccatcgtccagatttcaggccaccagaggctgccaaaggtgactgaagcggtctccaagtcactctcgcgcctggcctctgtcactttttttgctccttacccagcacagagggagactctgtctcaaaaataataatcaaatcaagtattttaagtttggctcttctttttttcaagaaaggctttttggatacctagaataccttcatgtatgtggcttgatttctgtttcaggaaaaggggggcgggaggagagacaacagccgtgttccagagtctgtcctgagatgtcgctgagtccagacacttgggctgcacgtgccctgcagatgacaaaggccggcagctcagcacacgtgcaggaggggttaaagccaatattgagtttttgttcttgttgttttaatctgaacgattattctcctgtaaaaataatttgggaggggcgggtgttgttcggtgtgtgtgtgtgtgtgtgtgtgtgtgtgtgtgtgtatttttttttttacagtggcgcctgtctaaagtatttttcacaacatgtttgataatcagtgctttaaaaagcagcagtgtcctatgaagtggaaatgtcagttctagagcattggatgtgaagttctggtcatgtcaccttgcgtgtctcaccctggaggagtgaaggtgggcgcccggcgggggggtgtggctgcaccccagcaccgggagggggcacgcacgacaccagaggaagggacagccccacccatgtcaacagcaggcaacctgtgttttcatttcaagtgggatacagtatttttttaataaggagccatacttttttttaagagtttgagatctgaatgtgatttctaattgtatcagacgttaatgttttaaagctataacaaagtttaaaatttctactttttgtttttcatttattttaactgttcttttatctattaaattgttgtatgtggatggggaagttttgtttctcctcttagcatttgtttctataaccagaaataaaattctatattaaagaaatgaccctgcggctccggtgtggtccttctgcgcaggtggctactgaaggtggcggacggacagacggcctggacacacagacaccaggcccctggacacataggctcccgaccccctggatacacaaacacctgaccccctggacacacaggctcctgacccccggacacacagacccctgagcccctagacatacaggcacctggccccctggacacagaggctcccgaccccctagacatacaggctcccggccccctggacacacaggcccctgaccccctggacacacaggcccctgaccccctggacacacagacccctgacccctggacacacagacccctgagcccctggacatacaggctcccgg

SEQ ID NO: 415494 - DNA, 2636 bp, Homo sapiens
tttttttttttgagacggagtctcgctctgtcgcccaggctggagtgcagtggcgtgatctcggctcactgcaagctccgcctcccgggttcacgccattctcctgcctcagcctcccgagtagctgggactacaggcgcccgctaccacgcccggctaattttttgtatttttagtagagacggggtttcaccgtgttagccaggatggtctcgatctcctgacctcgtgatccgcccgcctcggcctcccaaagtgctgggattacaggcgtgagccaccgcgcccggcccactgacttctttagggaaaatagtttcagtcttgggttgtcttgtgagcccacgggcatgggaccctgtctctgctgggcttttccggccccgtcccagctcctcctcaggcagaggctgcagccctcagctctgctgctggatggaacatttcaaccccctccgggaaggtgggcagggtggagggcccagggctaggcctgccatgcaccatgagcaggggtgctacctgggtgtgtgaagttgggctggcttttcctggaggtgggtgagaaggctctccgggcaaatcagaaggccacgagagagagaggagcggggagagtggtgaggaggattcgtctctgactgatgaacctcgccgtgcctgtctgtcacatccaagtctgtgccagctgctgggaggtcagactcctgccctgagaaacagcccagtccttggagaatgaaaccctgagggtcagtgagtggaggccttccctcggggccagccattcccgggaggcctgagtgtgacctggaagctctgtgggtcaccaagactggcattttccttgtatttttgtgcagggctgaagtgagcgttcctcctctgaattggtgaggctttggaaattttttgtttcttctactcatcctaatggctggttttggctgcccggagtatcagagaatatcactaagagggcagtcagtttatttttaggcatctttctttctgtccagggagaaacccctcggaagaatcttagtcactctttgcacctgccctgtcattctcgccatggggaaaatgcgttgaaaagaaaaataccggggccagggagaagccgtgaatgtatttatttgctttggtgaagctgctgaacactggctgcggagggccccccgcccccatcccgcttcaggccccagtgacccagttgcgtcttaagttccatcgtccagatttcaggccaccagaggctgccaaaggtgactgaagcggtctccaagtcactctcgcgcctggcctctgtcactttttttgctccttacccagcacagagggagactctgtctcaaaaataataatcaaatcaagtattttaagtttggctcttctttttttcaagaaaggctttttggatacctagaataccttcatgtatgtggcttgatttctgtttcaggaaaaggggggcgggaggagagacaacagccgtgttccagagtctgtcctgagatgtcgctgagtccagacacttgggctgcacgtgccctgcagatgacaaaggccggcagctcagcacacgtgcaggaggggttaaagccaatattgagtttttgttcttgttgttttaatctgaacgattattctcctgtaaaaataatttgggaggggcgggtgttgttcggtgtgtgtgtgtgtgtgtgtgtgtgtgtgtgtgtgtatttttttttttacagtggcgcctgtctaaagtatttttcacaacatgtttgataatcagtgctttaaaaagcagcagtgtcctatgaagtggaaatgtcagttctagagcattggatgtgaagttctggtcatgtcaccttgcgtgtctcaccctggaggagtgaaggtgggcgcccggcgggggggtgtggctgcaccccagcaccgggagggggcacgcacgacaccagaggaagggacagccccacccatgtcaacagcaggcaacctgtgttttcatttcaagtgggatacagtatttttttaataaggagccatacttttttttaagagtttgagatctgaatgtgatttctaattgtatcagacgttaatgttttaaagctataacaaagtttaaaatttctactttttgtttttcatttattttaactgttcttttatctattaaattgttgtatgtggatggggaagttttgtttctcctcttagcatttgtttctataaccagaaataaaattctatattaaagaaatgaccctgcggctccggtgtggtccttctgcgcaggtggctactgaaggtggcggacggacagacggcctggacacacagacaccaggcccctggacacataggctcccgaccccctggatacacaaacacctgaccccctggacacacaggctcctgacccccggacacacagacccctgagcccctagacatacaggcacctggccccctggacacagaggctcccgaccccctagacatacaggctcccggccccctggacacacaggcccctgaccccctggacacacaggcccctgaccccctggacacacagacccctgacccctggacacacagacccctgagcccctggacatacaggctcccgg

SEQ ID NO: 415495 - DNA, 2982 bp, Homo sapiens
  misc_feature (1432)..(1432): n is a, c, g, or t
  misc_feature (1464)..(1464): n is a, c, g, or t
tcttggaaatcgcccgtcctccgcatcacagcctctcaccagcaaagcagcctctgcccaggccctggcgggagagctgcagagggacccaggtgcctggagggcatttgagggaggtggctggacaggtgtctccctgaagaagaagggagaacacttttcaaagtgattccgaggcagtgcgggaggacacacgtgctgtgcagtggagtggggtcgcccgtggcccccatcagagtccccgtcccccaggacaagtgcagaacctctgtgggccccctccttccacctagatagagaaaaccccttgttcggtttccttcccgtgtcccgttgtttttctaagccccccgaattgagtcgtttctatggcactaacctttccatgggaaataagctctttgtggaagtccgtacctgttgccctgggtgaggtttcagagaaacgggggcaggatgaacacagccggctgtcctgggtgcagttacgtccgtggagggtgagagattgcgccccgttccacacttgtgtcgcctgctgttgtctgtgggccttttctttccgtggtgcctggtgtgtgcgtgcatggcgtgagagaacggggggtgggggttggaggtggctccccgacaccggtgcctgtgtggcctgagccggcgccctcccgggagcgcccgtcacggggggcctctgtgattacctgctgctgctctctcccgcgtggtgactatatgtcctcagggctgcctgtggccaccctgatgggagacctctgtttgcttctgggccactgcaggttggcctcctcaatacaagctgatgtctgcagggagcgccgcgtgctgggattgcaccacgtgttggtcacaaatcgaggtcgccttttggcctggtctgctcaggctggccctgacccacgtggtttcctggcttctgagacgcagcgcattcttcctgttagcggtagcgttctctgatttcaactcctgatgaaaacgtgtttacccacagcctcgcctcgagcctccttgacaataccgctgcttcaaagcaatattatttaatgagaatactttacattgctcacatgtgctgctatgaagacaggattagtctgtagacgggactcagctccagaggttcctgggtaatgtattgtggctcttggaaatgagggtagaatttgaaatataacaaatggtctctcgcccggttctgtcccttatttttagattgttttcctgcatcttacaatttccttttcttttcaaagttcctttctccaggcctgtttttcagtgctcaggacacggttttcatcacatacttactgtttttttggttgggttttgatacgaaaagctgctacgtttggtgaccagagggagggtttggaatctgtgctttgcaggggatctcggtgggtaccgnggcccctcgcagggtggcgagtggggtccgtncctcgagaagggggcccttacccacaccgtgcggcttgaattctgtcggagttgaatctgtggaaaggattgtcccattagagctgctgcgtcctttcctctgtcctccctgtcacccaaaccccgaagtcacagctgcttagaagaatgggattttggggatacaaccacacacatttccctctggactgaaattttaaaaacagacccatttcagcacagagggagactctgtctcaaaaataataatcaaatcaagtattttaagtttggctcttctttttttcaagaaaggctttttggatacctagaataccttcatgtatgtggcttgatttctgtttcaggaaaaggggggcgggaggagagacaacagccgtgttccagagtctgtcctgagatgtcgctgagtccagacacttgggctgcacgtgccctgcagatgacaaaggccggcagctcagcacacgtgcaggaggggttaaagccaatattgagtttttgttcttgttgttttaatctgaacgattattctcctgtaaaaataatttgggaggggcgggtgttgttcggtgtgtgtgtgtgtgtgtgtgtgtgtgtgtgtgtgtatttttttttttacagtggcgcctgtctaaagtatttttcacaacatgtttgataatcagtgctttaaaaagcagcagtgtcctatgaagtggaaatgtcagttctagagcattggatgtgaagttctggtcatgtcaccttgcgtgtctcaccctggaggagtgaaggtgggcgcccggcgggggggtgtggctgcaccccagcaccgggagggggcacgcacgacaccagaggaagggacagccccacccatgtcaacagcaggcaacctgtgttttcatttcaagtgggatacagtatttttttaataaggagccatacttttttttaagagtttgagatctgaatgtgatttctaattgtatcagacgttaatgttttaaagctataacaaagtttaaaatttctactttttgtttttcatttattttaactgttcttttatctattaaattgttgtatgtggatggggaagttttgtttctcctcttagcatttgtttctataaccagaaataaaattctatattaaagaaatgaccctgcggctccggtgtggtccttctgcgcaggtggctactgaaggtggcggacggacagacggcctggacacacagacaccaggcccctggacacataggctcccgaccccctggatacacaaacacctgaccccctggacacacaggctcctgacccccggacacacagacccctgagcccctagacatacaggcacctggccccctggacacagaggctcccgaccccctagacatacaggctcccggccccctggacacacaggcccctgaccccctggacacacaggcccctgaccccctggacacacagacccctgacccctggacacacagacccctgagcccctggacatacaggctcccgg

SEQ ID NO: 415496 - DNA, 2129 bp, Homo sapiens
atggtgtaaagacggagagtataccctgtcatcggggttcgtaggcaggatgggtgattagtgctctccgggcaaatcagaaggccacgagagagagaggagcggggagagtggtgaggaggattcgtctctgactgatgaacctcgccgtgcctgtctgtcacatccaagtctgtgccagctgctgggaggtcagactcctgccctgagaaacagcccagtccttggagaatgaaaccctgagggtcagtgagtggaggccttccctcggggccagccattcccgggaggcctgagtgtgacctggaagctctgtgggtcaccaagactggcattttccttgtatttttgtgcagggctgaagtgagcgttcctcctctgaattggtgaggctttggaaattttttgtttcttctactcatcctaatggctggttttggctgcccggagtatcagagaatatcactaagagggcagtcagtttatttttaggcatctttctttctgtccagggagaaacccctcggaagaatcttagtcactctttgcacctgccctgtcattctcgccatggggaaaatgcgttgaaaagaaaaataccggggccagggagaagccgtgaatgtatttatttgctttggtgaagctgctgaacactggctgcggagggccccccgcccccatcccgcttcaggccccagtgacccagttgcgtcttaagttccatcgtccagatttcaggccaccagaggctgccaaaggtgactgaagcggtctccaagtcactctcgcgcctggcctctgtcactttttttgctccttacccagcacagagggagactctgtctcaaaaataataatcaaatcaagtattttaagtttggctcttctttttttcaagaaaggctttttggatacctagaataccttcatgtatgtggcttgatttctgtttcaggaaaaggggggcgggaggagagacaacagccgtgttccagagtctgtcctgagatgtcgctgagtccagacacttgggctgcacgtgccctgcagatgacaaaggccggcagctcagcacacgtgcaggaggggttaaagccaatattgagtttttgttcttgttgttttaatctgaacgattattctcctgtaaaaataatttgggaggggcgggtgttgttcggtgtgtgtgtgtgtgtgtgtgtgtgtgtgtgtgtgtatttttttttttacagtggcgcctgtctaaagtatttttcacaacatgtttgataatcagtgctttaaaaagcagcagtgtcctatgaagtggaaatgtcagttctagagcattggatgtgaagttctggtcatgtcaccttgcgtgtctcaccctggaggagtgaaggtgggcgcccggcgggggggtgtggctgcaccccagcaccgggagggggcacgcacgacaccagaggaagggacagccccacccatgtcaacagcaggcaacctgtgttttcatttcaagtgggatacagtatttttttaataaggagccatacttttttttaagagtttgagatctgaatgtgatttctaattgtatcagacgttaatgttttaaagctataacaaagtttaaaatttctactttttgtttttcatttattttaactgttcttttatctattaaattgttgtatgtggatggggaagttttgtttctcctcttagcatttgtttctataaccagaaataaaattctatattaaagaaatgaccctgcggctccggtgtggtccttctgcgcaggtggctactgaaggtggcggacggacagacggcctggacacacagacaccaggcccctggacacataggctcccgaccccctggatacacaaacacctgaccccctggacacacaggctcctgacccccggacacacagacccctgagcccctagacatacaggcacctggccccctggacacagaggctcccgaccccctagacatacaggctcccggccccctggacacacaggcccctgaccccctggacacacaggcccctgaccccctggacacacagacccctgacccctggacacacagacccctgagcccctggacatacaggctcccgg

SEQ ID NO: 415497 - DNA, 2002 bp, Homo sapiens
ctacaatggaaagactcctagttggttattctttatctcggattcttttttctggaattgtttgctcatttgagtggttggtggtttgccctgtgtcagacacggtgaaaagagtgcaggaaagctggggccaggggaagcgaagtggcttcaatccgggctgacagccaagaagagttttcctcccttcggtgacagggcctgcccctccgagtctagaggtaaaagcagcttctagaactggcccctaagtctccaaatgtgttggctaagctgaaatgagagactctgaattagagtttttgtttgttgtttgttctctgcatgaagttcacaggcctgtatggatgttaaattgtgtctatagcctctaaatctccaggttaactggtccagattttttttttttaatcagtaacaatgggaatttaaaatcaaatatttggccaggtgcggtggctcatgcccgtaatcccagcactttgggaggccgaggcaggcgcatcaccctgaggagttggagaccagcctgaccaacatggtgaaatcctgtctctactaaaaatacaaaaaattagccaggcgtggtggcgtgtgcctgtaatcccagctaccagggaggctgaggcatgagaatcgcttgaacctgggagatggaggttgcagtgagccgagatcatgccactgcactccagcctgggcacagagggagactctgtctcaaaaataataatcaaatcaagtattttaagtttggctcttctttttttcaagaaaggctttttggatacctagaataccttcatgtatgtggcttgatttctgtttcaggaaaaggggggcgggaggagagacaacagccgtgttccagagtctgtcctgagatgtcgctgagtccagacacttgggctgcacgtgccctgcagatgacaaaggccggcagctcagcacacgtgcaggaggggttaaagccaatattgagtttttgttcttgttgttttaatctgaacgattattctcctgtaaaaataatttgggaggggcgggtgttgttcggtgtgtgtgtgtgtgtgtgtgtgtgtgtgtgtgtgtatttttttttttacagtggcgcctgtctaaagtatttttcacaacatgtttgataatcagtgctttaaaaagcagcagtgtcctatgaagtggaaatgtcagttctagagcattggatgtgaagttctggtcatgtcaccttgcgtgtctcaccctggaggagtgaaggtgggcgcccggcgggggggtgtggctgcaccccagcaccgggagggggcacgcacgacaccagaggaagggacagccccacccatgtcaacagcaggcaacctgtgttttcatttcaagtgggatacagtatttttttaataaggagccatacttttttttaagagtttgagatctgaatgtgatttctaattgtatcagacgttaatgttttaaagctataacaaagtttaaaatttctactttttgtttttcatttattttaactgttcttttatctattaaattgttgtatgtggatggggaagttttgtttctcctcttagcatttgtttctataaccagaaataaaattctatattaaagaaatgaccctgcggctccggtgtggtccttctgcgcaggtggctactgaaggtggcggacggacagacggcctggacacacagacaccaggcccctggacacataggctcccgaccccctggatacacaaacacctgaccccctggacacacaggctcctgacccccggacacacagacccctgagcccctagacatacaggcacctggccccctggacacagaggctcccgaccccctagacatacaggctcccggccccctggacacacaggcccctgaccccctggacacacaggcccctgaccccctggacacacagacccctgacccctggacacacagacccctgagcccctggacatacaggctcccgg

SEQ ID NO: 415498 - DNA, 1498 bp, Homo sapiens
tcttggaaatcgcccgtcctccgcatcacagcctctcaccagcaaagcagcctctgcccaggccctggcgggagagctgcagagggacccaggtgcctggagggcatttgagggaggtggctggacaggtgtctccctgaagaagaagggagaacacttttcaaagtgattccgaggcagtgcgggaggacacacgtgctgtgcagtggagtggggtcgcccgtggcccccatcagagtccccgtcccccaggacaagtgcagaacctctgtgggccccctccttccacctagatagagaaaaccccttgttcggtttccttcccgtgtcccgttgtttttctaagccccccgaattgagtcgtttctatggcactaacctttccatgggaaataagctctttgtggaagtccgtacctgttgccctgggtgaggtttcagagaaacgggggcaggatgaacacagccggctgtcctgggtgcagttacgtccgtggagggtgagagattgcgccccgttccacacttgtgtcgcctgctgttgtctgtgggccttttctttccgtggtgcctggtgtgtgcgtgcatggcgtgagagaacggggggtgggggttggaggtggctccccgacaccggtgcctgtgtggcctgagccggcgccctcccgggagcgcccgtcacggggggcctctgtgattacctgctgctgctctctcccgcgtggtgactatatgtcctcagggctgcctgtggccaccctgatgggagacctctgtttgcttctgggccactgcaggttggcctcctcaatacaagctgatgtctgcagggagcgccgcgtgctgggattgcaccacgtgttggtcacaaatcgaggtcgccttttggcctggtctgctcaggctggccctgacccacgtggtttcctggcttctgagacgcagcgcattcttcctgttagcggtagcgttctctgatttcactgcttcattgccaagggcgtggaaagggggtggtggatggagccgggaggtggcgagcacaggaccccggggctgcattctgccgtgtggggttctgcactgtctagcttctgcggggactgcaaagagggatgaagggacgtggtcctaggggtcggctcagactcggagcagggcagggagaggagggcaaggagaggaggcctgggtcctggatccactgctctgggctcataaccatgagattttgaaagagtttttggtcatctgagcaggtaccatgcctggctcatgccggaacttgtcttggaaccggtagccagaggcccaggaagggacagggcccaaaagggttgcatgtcccggccacaaagccctccctgtgtgccctgagccagcccagcaagcgcctcccagccaggcgctttcgcagaagcaagagcacaggccagggggaccgggagagcctcagcccccagcctgggcggcctgtgaccctgagccgtgtggagcc

SEQ ID NO: 415499 - DNA, 284 bp, Homo sapiens
gcggccgcctactactactgctcgaattcaagcttctaacgatgtacggggccatgctctctgcgggtcagtgcctgagtctcgcctccctgctggtccctgaagccccctcagaagccctgcctgtcacgtcggcatttgtgagacctaccctgtaacgcctgcccctctcagcccaacatcagcttcctctttctcccttgctgtagacaggctggattccagtgttgggacagccatctccagaaacctgacttaagagagtaagatgcaaatcgtacatg

SEQ ID NO: 415500 - DNA, 1409 bp, Homo sapiens
gctgcgggagcgcagttagagccgatctcccgcgccccgaggttgctcctctccgaggtctcccgcggcccaagttctccgcgccccgaggtctccgcgccccgaggtctccgcggcccgaggtctccgcccgcaccatgcggctgggcagtcctggactgctcttcctgctcttcagcagccttcgagctgatactcaggagaaggaagtcagagcgatggtaggcagcgacgtggagctcagctgcgcttgccctgaaggaagccgttttgatttaaatgatgtttacgtatattggcaaaccagtgagtcgaaaaccgtggtgacctaccacatcccacagaacagctccttggaaaacgtggacagccgctaccggaaccgagccctgatgtcaccggccggcatgctgcggggcgacttctccctgcgcttgttcaacgtcaccccccaggacgagcagaagtttcactgcctggtgttgagccaatccctgggattccaggaggttttgagcgttgaggttacactgcatgtggcagcaaacttcagcgtgcccgtcgtcagcgccccccacagcccctcccaggatgagctcaccttcacgtgtacatccataaacggctaccccaggcccaacgtgtactggatcaataagacggacaacagcctgctggaccaggctctgcagaatgacaccgtcttcttgaacatgcggggcttgtatgacgtggtcagcgtgctgaggatcgcacggacccccagcgtgaacattggctgctgcatagagaacgtgcttctgcagcagaacctgactgtcggcagccagacaggaaatgacatcggagagagagacaagatcacagagaatccagtcagtaccggcgagaaaaacgcggccacgtggagcatcctggctgtcctgtgcctgcttgtggtcgtggcggtggccataggctgggtgtgcagggaccgatgcctccaacacagctatgcaggtgcctgggctgtgagtccggagacagagctcactgaatcctggaacctgctccttctgctctcgtgactgactgtgttctctatgcaacttccaataaaacctcttcatttgaaaggaaaaaagtctgcattatctgtttaggaagggagagagttcatattgcaatctttttttttttaataaaaataatctcagcctgggcaacatggtgagaccccatctctgtaaaacatttttaaaaaattagccgggtatggtggcgcacacttgtagtcccagctactcaggaggctgaagcgggaggatccattgaacctgagaagtcgaagctgcagtgagctgtgattgtgccactgtactccagcctggacaacagagtgagacgccgtctcaaataaataaatacat

SEQ ID NO: 415501 - DNA, 650 bp, Homo sapiens
cagaggcttctgtaacctgcctgctcccagcattctatttagggtctggtatgtccagaatttgcagacacagcaattcctgcagcagcagtgcaccatgtggaaggggccccatgaccagcccactgtgagctcacacgtgatgactgaggcttcttcacacagcagggctctgggtgtgatacccagggcacacgcgtttgcacaggcacaggccacacaagttctcacatgctcagccccataagccgtgctggacaggcatggccatttacacccaggatcctgctgagaacagcaaccaactcaccaccctcgcatcatgatccttgccacacaggggctctggtggctttggtggcctgggctgtggctctgctgccagccaccttgagtgaagatccgggttctctgggtgctactcagctgctatgtggggagctggcccctggggtgatgagggcccttcccaacccgccctcagcccttggacagccaggatcacccggggctgtctgcatacagacttctcaggggagttctcagcttggacccttatctccccagaatcctggaacctgctccttctgctctcgtgactgactgtgttctctatgcaacttccaataaaacctcttcatttgaaagga

SEQ ID NO: 415502 - DNA, 941 bp, Homo sapiens
cagaggcttctgtaacctgcctgctcccagcattctatttagggtctggtatgtccagaatttgcagacacagcaattcctgcagcagcagtgcaccatgtggaaggggccccatgaccagcccactgtgagctcacacgtgatgactgaggcttcttcacacagcagggctctgggtgtgatacccagggcacacgcgtttgcacaggcacaggccacacaagttctcacatgctcagccccataagccgtgctggacaggcatggccatttacacccaggatcctgctgagaacagcaaccaactcaccaccctcgcatcatgatccttgccacacaggggctctggtggctttggtggcctgggctgtggctctgctgccagccaccttgagtgaagatccgggttctctgggtgctactcagctgctatgtggggagctggcccctggggtgatgagggcccttcccaacccgccctcagcccttggacagccaggatcacccggggctgtctgcatacagacttctcaggggagttctcagcttggacccttatctccccagaatcctggaacctgctccttctgctctcgtgactgactgtgttctctatgcaacttccaataaaacctcttcatttgaaaggaaaaaagtctgcattatctgtttaggaagggagagagttcatattgcaatctttttttttttaataaaaataatctcagcctgggcaacatggtgagaccccatctctgtaaaacatttttaaaaaattagccgggtatggtggcgcacacttgtagtcccagctactcaggaggctgaagcgggaggatccattgaacctgagaagtcgaagctgcagtgagctgtgattgtgccactgtactccagcctggacaacagagtgagacgccgtctcaaataaataaatacat

SEQ ID NO: 415503 - DNA, 3234 bp, Homo sapiens
gctgcgggagcgcagttagagccgatctcccgcgccccgaggttgctcctctccgaggtctcccgcggcccaagttctccgcgccccgaggtctccgcgccccgaggtctccgcggcccgaggtctccgcccgcaccatgcggctgggcagtcctggactgctcttcctgctcttcagcagccttcgagctgatactcaggagaaggaagtcagagcgatggtaggcagcgacgtggagctcagctgcgcttgccctgaaggaagccgttttgatttaaatgatgtttacgtatattggcaaaccagtgagtcgaaaaccgtggtgacctaccacatcccacagaacagctccttggaaaacgtggacagccgctaccggaaccgagccctgatgtcaccggccggcatgctgcggggcgacttctccctgcgcttgttcaacgtcaccccccaggacgagcagaagtttcactgcctggtgttgagccaatccctgggattccaggaggttttgagcgttgaggttacactgcatgtggcagcaaacttcagcgtgcccgtcgtcagcgccccccacagcccctcccaggatgagctcaccttcacgtgtacatccataaacggctaccccaggcccaacgtgtactggatcaataagacggacaacagcctgctggaccaggctctgcagaatgacaccgtcttcttgaacatgcggggcttgtatgacgtggtcagcgtgctgaggatcgcacggacccccagcgtgaacattggctgctgcatagagaacgtgcttctgcagcagaacctgactgtcggcagccagacaggaaatgacatcggagagagagacaagatcacagagaatccagtcagtaccggcgagaaaaacgcggccacgtggagcatcctggctgtcctgtgcctgcttgtggtcgtggcggtggccataggctgggtgtgcagggaccgatgcctccaacacagctatgcaggtgcctgggctgtgagtccggagacagagctcactggccacgtttgaccggagctcaccgcccagagcgtggacagggcttccgtgagacgccaccgtgagaggccaggtggcagcttgagcatggactcccagactgcaggggagcacttggggcagcccccagaaggaccactgctggatcccagggagaacctgctggcgttggctgtgatcctggaatgaggccctttcaaaagcgtcatccacaccaaaggcaaatgtccccaagtgagtgggctccccgctgtcactgccagtcacccacaggaagggactggtgatgggctgtctctacccggagcgtgcgggattcagcaccaggctcttcccagtaccccagacccactgtgggtcttcccgtgggatgcgggatcctgagaccgaagggtgtttggtttaaaaagaagactgggcgtccgctcttccaggacggcctctgtgctgctggggtcacgcgaggctgtttgcaggggacacggtcacaggagctcttctgccctgaacgctcccaacctgcctcccgcccggaagccacaggacccactcatgtgtgtgcccacaagtgtagttagccgtccacaccgaggagcccccggaagtccccactgggcttcagtgtcctctgccacattccctgggaggaacaatgtccctcggctgttccggtgaaaagttgagccacctttggaagacgcacgggtggagtttgccagaagaaaggctgtgccagggccgtgtttggctacaggggctgccggggctcttggctctgcagcgagaaagacacagcccagcagggctggagacgcccatgtccagcaggcgcaggcctggcaacacggtccccagagtcctgagcagcagttaggtgcatggagagggtatcacctggtggccacagtcccccttctcacctcagcaatgatccccaaagtgagaggtggctcccccggcccccaccaccctcagcagccccaccccactcaaccctgagggtccccagggtcctgatgaagacctccgaccccagcgccaggctcctcggagcccaacagtcccaagggggcagtgttgaggggtacagccctgggccctgaccagccccggcacctgccatgctggttcccggaatgaatcagctgctgactgtctccagaagggctggaaaggatgctgccaggtgacccgaggtgcactcgccccagggagatggagtagacagcctggcctggccctcgggacacattgtctgccccggggctatgggcaaatgcccctccttcttacttcccagaatcccctgacattcccagggtcagccaggacctgttacagccctggtcacttggaactgacagctgtgtgaggcctgcacttctcagacccagacttagaacaaaaggaggagtgaggactcaaggctacaatgaggttccagtacttgttacaagaaattggttttctgcaaaaaaagtccctacctgggcctttaggtgaatgtgggatccactcccgcttttaacatgaaagcattagaagatgtgtggtgtttataaaagaacagttgtcatcaccgggcattgattggcagggacaaggagctgcttgggtgtggaaagttggggcgttggaaagtgggctgtggtgcccatttgcagtgactgtgaagtgactccaggacggacctgcgggggcacccagaggtcctaagccccaggactgagggtcgtgcatcaccactcgggtgtcccgggaggtgccctgggcccggggacctcacaggcaggacggcgacactaatgcagggagagggagtctggccccagcttttcctatcagaggcgattttccttcaccaggggatgggcaggaaagaggcaggggccccagaagcttctgtccctcatgcctgagggcacgggggacacttggaggctgctgtcaccactgtgcgtccaaggccatgctctctgcgggtcagtgcctgagtctcgcctccctgctggtccctgaagccccctcagaagccctgcctgtcacgtcggcatttgtgagacctaccctgtaacgcctgcccctctcagcccaacatcagcttcctctttctcccttgctgtagacaggctggattccagtgttgggacagccatctccagaaacctgacttaagagagtaagatgcaaatcgtacatg

SEQ ID NO: 415504 - DNA, 1257 bp, Homo sapiens
caggtcctgatgaagaccctggggaccctcagggttgagtggggtggggctcctgagggtccccagggtcctgatgaagacctccgaccccagcgccaggctcctcggagcccaacagtcccaagggggcagtgttgaggggtacagccctgggccctgaccagccccggcacctgccatgctggttcccggaatgaatcagctgctgactgtctccagaagggctggaaaggatgctgccaggtgacccgaggtgcactcgccccagggagatggagtagacagcctggcctggccctcgggacacattgtctgccccggggctatgggcaaatgcccctccttcttacttcccagaatcccctgacattcccagggtcagccaggacctgttacagccctggtcacttggaactgacagctgtgtgaggcctgcacttctcagacccagacttagaacaaaaggaggagtgaggactcaaggctacaatgaggttccagtacttgttacaagaaattggttttctgcaaaaaaagtccctacctgggcctttaggtgaatgtgggatccactcccgcttttaacatgaaagcattagaagatgtgtggtgtttataaaagaacagttgtcatcaccgggcattgattggcagggacaaggagctgcttgggtgtggaaagttggggcgttggaaagtgggctgtggtgcccatttgcagtgactgtgaagtgactccaggacggacctgcgggggcacccagaggtcctaagccccaggactgagggtcgtgcatcaccactcgggtgtcccgggaggtgccctgggcccggggacctcacaggcaggacggcgacactaatgcagggagagggagtctggccccagcttttcctatcagaggcgattttccttcaccaggggatgggcaggaaagaggcaggggccccagaagcttctgtccctcatgcctgagggcacgggggacacttggaggctgctgtcaccactgtgcgtccaaggccatgctctctgcgggtcagtgcctgagtctcgcctccctgctggtccctgaagccccctcagaagccctgcctgtcacgtcggcatttgtgagacctaccctgtaacgcctgcccctctcagcccaacatcagcttcctctttctcccttgctgtagacaggctggattccagtgttgggacagccatctccagaaacctgacttaagagagtaagatgcaaatcgtacatg

SEQ ID NO: 415505 - DNA, 766 bp, Homo sapiens
ctgcttgtcctgcctctgctgtagagatttgtggaattttgaacttgagagatttagggtatctgatagggtacttgaacttgagatttagggtatctgatagaagaaatttctaagcagcaaagcattcaagagatgacttgggtgctgttaaaggccttcagttttataagggaagcagagcatgaaagttggggcgttggaaagtgggctgtggtgcccatttgcagtgactgtgaagtgactccaggacggacctgcgggggcacccagaggtcctaagccccaggactgagggtcgtgcatcaccactcgggtgtcccgggaggtgccctgggcccggggacctcacaggcaggacggcgacactaatgcagggagagggagtctggccccagcttttcctatcagaggcgattttccttcaccaggggatgggcaggaaagaggcaggggccccagaagcttctgtccctcatgcctgagggcacgggggacacttggaggctgctgtcaccactgtgcgtccaaggccatgctctctgcgggtcagtgcctgagtctcgcctccctgctggtccctgaagccccctcagaagccctgcctgtcacgtcggcatttgtgagacctaccctgtaacgcctgcccctctcagcccaacatcagcttcctctttctcccttgctgtagacaggctggattccagtgttgggacagccatctccagaaacctgacttaagagagtaagatgcaaatcgtacatg

SEQ ID NO: 415506 - DNA, 820 bp, Homo sapiens
gtccaggtctgctccattttccaggctctttccttagtctcaggacgctcctcacccgggaggggaagcagcctgggaaaatgagaagccttgcccacgaatctccagcgcaaaaggcagcagctttttcctccccagctcctttctgcgtcggcggcgaagagagagctctgctccctgcttttttagaaaatggatttgacgtggccgaacctgcggctagccgtgcgacccgcacaagggagggactgttctcagtaggaggctggactcagagcggcgcggcgcccggggctgtttcgtgagctggagccagcggctgcccgggcggcggtgcgcgcactctccaggctgagacacgactggctggcacgagttgctcggcaccagctgagctgtcaaccgcgagcggaggcggggctcccgacaaccagtgtgctggggcagaatcggcccaggttacacgccccctgaaccaccctcgcgtctccccgacccctctctcgctggctcagatgaatgatgacggcagagggcagagagcttagaggacgcggtaccaagccccgtccctcgcccatcccaacgaaggtcttagaatacaatcaaccaactacaggaagaatttgtagaggaggttttcttgtgtgtctgcatcgccccacccacagccatgtgaggacacagcatctgtggcaacaaggagccatcttgggagcagagagcaagctcttccagacactgaatctgccagcaccttgatcttggtccagccttcagaactgtgagaaataaatttctattatttacaaattaacca

SEQ ID NO: 415507 - DNA, 392 bp, Homo sapiens
cctcctctcacccaggatcacttccgaaaccacttggccttcagcccctgcctcggccagaggtttcatttttaactgaatatttaccaaagctgaaagcgtgcgaggggggtggggtggaaatagcggctgcttcttttccaaggatttatttaatggggatgtgttcaaggcaagaccgaattcagaaggatatcgacgtcgtgatccagaagtccagagctgaggactgcctgtttgcagccatgtgaggacacagcatctgtggcaacaaggagccatcttgggagcagagagcaagctcttccagacactgaatctgccagcaccttgatcttggtccagccttcagaactgtgagaaataaatttctattatttacaaattaacca

SEQ ID NO: 415508 - DNA, 443 bp, Homo sapiens
ggaagggctcatcagccttagcgccatttttttttggaaacctctgcgccatgagagccaagtggaggaagaagcgaatgcgcaggctgaagcgcaaaagaagaaagatgaggcagaggtccaagtaaaccgctagcttgttgcaccgtggaggccacaggagcagaaacatggaatgccagacgctggggatgctggtacaagttgtgggactgcatgctactgtctagagcttgtctcaatggatctagaacttcatcgccctctgatcgccgatcacctctgagacccaccttgctcataaacaaaatgcccatgttggtcctctgccctggacctgtgacattctggactatttctgtgtttatttgtggccgagtgtaacaaccatataataaatcacctcttccgctgttttagctgaaaaaataagaaaaaaaaag

SEQ ID NO: 415509 - DNA, 464 bp, Homo sapiens
cggacgctgtgggcggacgcgtgggtcgacccacgcgtcgcggacgcgtgggttttggaaacctctgcgccatgagagccaagtggaggaagaagcgaatgcgcaggctgaagcgcaaaagaagaaagatgaggcagaggtccaagtaaaccgctagcttgttgcaccgtggaggccacaggagcagaaacatggaatgccagacgctggggatgctggtacaagttgtgggactgcatgctactgtctagagcttgtctcaatggatctagaacttcatcgccctctgatcgccgatcacctctgagacccaccttgctcataaacaaaatgcccatgttggtcctctgccctggacctgtgacattctggactatttctgtgtttatttgtggccgagtgtaacaaccatataataaatcacctcttccgctgttttagctgaaaaaataagaaaaaaaaag

SEQ ID NO: 415510 - DNA, 499 bp, Homo sapiens
gcgccttttttttgggtgagtgttttttggttcctgcgttgggattccgtgtacaatccatagacatctgacctcggcacttagcatcatcacagcaaactaactgtagcctttctctctttccctgtattttggaaacctctgcgccatgagagccaagtggaggaagaagcgaatgcgcaggctgaagcgcaaaagaagaaatggaggccacaggagcagaaacatggaatgccagacgctggggatgctggtacaagttgtgggactgcatgctactgtctagagcttgtctcaatggatctagaacttcatcgccctctgatcgccgatcacctctgagacccaccttgctcataaacaaaatgcccatgttggtcctctgccctggacctgtgacattctggactatttctgtgtttatttgtggccgagtgtaacaaccatataataaatcacctcttccgctgttttagctgaaaaaataagaaaaaaaaag

SEQ ID NO: 415511 - DNA, 317 bp, Homo sapiens
ggaagggctcatcagccttagcgccatttttttttggaaacctctgcgccatgagagccaagtggaggaagaagcgaatgcgcaggctgaagcgcaaaagaagaaagatgaggcagaggtccaagtaaaccgctagcttgttgcaccgtggaggccacaggagcagaaacatggaatgccagacgctggggatgctggtacaagttgtagctgaggttggaggattgcttgagcatgggaggcagaggttgcagtgtgccgagatcatgcctctgtactccagtctaggtgacagagtgtgaccctgtctcaaaaaa

SEQ ID NO: 415512 - DNA, 345 bp, Homo sapiens
ttaacccgtggaggaggaccaaggtttgtatctccccgtcacacccgaggccttggttcagagagggagcggagcagccattctccaggccccggggttgccccttggacgggactgcatgctactgtctagagcttgtctcaatggatctagaacttcatcgccctctgatcgccgatcacctctgagacccaccttgctcataaacaaaatgcccatgttggtcctctgccctggacctgtgacattctggactatttctgtgtttatttgtggccgagtgtaacaaccatataataaatcacctcttccgctgttttagctgaaaaaataagaaaaaaaaag

SEQ ID NO: 415513 - DNA, 541 bp, Homo sapiens
gcgccttttttttgggtgagtgttttttggttcctgcgttgggattccgtgtacaatccatagacatctgacctcggcacttagcatcatcacagcaaactaactgtagcctttctctctttccctgtattttggaaacctctgcgccatgagagccaagtggaggaagaagcgaatgcgcaggctgaagcgcaaaagaagaaagatgaggcagaggtccaagtaaaccgctagcttgttgcaccgtggaggccacaggagcagaaacatggaatgccagacgctggggatgctggtacaagttgtgggactgcatgctactgtctagagcttgtctcaatggatctagaacttcatcgccctctgatcgccgatcacctctgagacccaccttgctcataaacaaaatgcccatgttggtcctctgccctggacctgtgacattctggactatttctgtgtttatttgtggccgagtgtaacaaccatataataaatcacctcttccgctgttttagctgaaaaaataagaaaaaaaaag

SEQ ID NO: 415514 - DNA, 481 bp, Homo sapiens
gcgccttttttttgggtgagtgttttttggttcctgcgttgggattccgtgtacaatccatagacatctgacctcggcacttagcatcatcacagcaaactaactgtagcctttctctctttccctgtattttggaaacctctgcgccatgagagccaagtggaggaagaagcgaatgcgcaggctgaagcgcaaaagaagaaagatgaggcagaggtccaagtaaaccgctagcttgttgcaccgtggaggccacaggagcagaaacatggaatgccagacgctggggatgctggtacaagttgtgggactgcatgctactgtctagagcttgtctcaatggatctagaacttcatcgccctctgatcgccgatcacctctgagacccacaggagcagaaacatggaatgccagacgctggggatgctggtacaagttgtgggactgcatgctactgtctagcttaagcggatcagcgat

SEQ ID NO: 415515 - DNA, 2157 bp, Homo sapiens
gaaaccaccgttcctttttggcgtttcttcgtactcgaaacatggcaggttttaaaccagcagaatattccacagatttctatagtagttgatggtggaaagaaggtggtggaatttatgtttcaagccacagagggagatgtgttgaactacatttttagaaatcgagaactccgtcctttgtttgatcgtcagtggcacaaacttggcattagtatacaatcccaggtcatttcactttatatggattgtaatttaattgcgaggaggcagactgatgaaaaggacactgtggatttccatggacggacagttattgctacgcgagcttcagatggcaagcctgtggatattgaacttcaccaacttaaaatctactgcagtgcaaacctcatagctcaagaaacatgttgtgaaatatcagatactaagtgcccagagcaggatggctttggaaatattgcatcatcatgggtaactgctcatgccagtaaaatgtcttcatatctgccagcaaagcaggaacttaaagaccagtgccagtgcattccaaacaagggagaagcaggattaccaggagctccgggttcacctgggcagaaagggcataaaggagagccgggtgaaaatggtttacatggtgctccaggattccctggtcaaaagggagagcaaggttttgaaggcagcaaaggagaaactggtgaaaagggtgaacaaggagaaaaaggagatccagctctggctggccttaatggagaaaatggtttgaaaggtgacttgggtcctcatggtccacctggcccaaaaggagaaaagggagatacaggacccccaggaccaccagccttacctggttccctggggatacaaggcccccaaggtccacctggaaaagagggtcagaggggaagacgagggaaaacaggacctcccggaaaaccaggacccccaggaccacctggacctcctggaatacaaggaatacaccaaactcttggtggatattataacaaggataacaagggaaatgatgaacatgaagctggaggcctgaaaggagacaagggtgaaactggactaccaggatttccagggtctgttggccctaaaggacaaaaaggagaacctggagagccttttacaaaaggagaaaaaggagatagaggagaacctggggtaataggatcacagggagtaaagggtgaacctggagatcccggaccccctggtttaataggaagcccaggactaaagggtcagcaaggatctgcaggctccatgggacccagaggaccgccaggagatgttggattgccaggagaacatggtatcccaggaaaacaaggcattaaaggagaaaagggagatccaggtgggatcataggccctcccgggcttccaggtccaaaaggtgaggctggtcctccagggaaaagcctgccaggggaaccaggattagatggaaatcctggagcacctggtccacgtgggccaaagggtgaaagaggacttccaggtgttcacggttccccaggggacataggcccacaagggataggaattcctggcagaacaggcgcccaaggaccagctggagagccaggtattcagggtcctcgaggtctccctgggttgccaggaactccagggactccagggaatgatggagttccagggagagatggaaagccaggcctgccaggccccccaggtgacccgattgcacttcctctcttgggagacatcggtgctttgctcaagaatttctgtggcaactgccaagccagtgtcccagggctgaaaagcaacaaaggagaagaaggaggtgctggtgagcctggaaagtatgattccatggcccggaagggtgatatagggccacggggtcctccaggaatcccaggaagagagggaccaaagggaagcaaaggagagcggggctaccctgggatacctggggagaaaggtgatgagggtcttcaaggaattccaggcattccaggtgctccaggcccgactggaccccctggcttaatgggaagaactggacatcctggtcccacaggagcaaaaggtgaaaagggcagcgacggaccccctgggaaacccggaccacctggaccacctgtgagttgttctaggcttaaaatttaa

SEQ ID NO: 415516 - DNA, 773 bp, Homo sapiens
actcgcagggagctcactcctcggcggtgccgcagccctgtccggactccactgcgcctctgaggggctcaaatacgaattcaagatccgtggccgttcacatggtttcaaggcacaatgagactcactggcccttggaaactttggctttggatgtcaatatttctgcttcctgcttccacttccgtgaccgttagggacaagacagtaaatctcgctgctgctcactctttgggtccacaccacctttaagagctgtaacacttgccgcgaaggtccacggcttcattcttgaagtcaacgagaccacaaacccaccagaaggaagaaaccctggacacatcggaaggaacaaactccagacacaccatctttaagagctgtaacactcactgtgaaggtctgcagcttcattcttgaagtcagcgagaccaagaacccactggaaggaaccaactccggacacagttttacataggatttatatgtcagtcactcccaaatgtacttcacagccctcacctctcttttgaattccattcctaactgtctatttgataactccattgtttcaatttcttaatggcatgtcagatttaacacttctaatttctcctctttcccactacagattaacttacgccttgccaagttttcttttatttttctagtgggatttatttcagtcaactaatctccctcctccctacattcaatcccttatcatctcctgttggttcttgtatctctcaattccttcccatgaaattgaa

SEQ ID NO: 415517 - DNA, 1069 bp, Homo sapiens
gaaaccaccgttcctttttggcgtttcttcgtactcgaaacatggcaggttttaaaccagcagaatattccacagatttctatagtagttgatggtggaaagaaggtggtggaatttatgtttcaagccacagagggagatgtgttgaactacatttttagaaatcgagaactccgtcctttgtttgatcgtcagtggcacaaacttggcattagtatacaatcccaggtcatttcactttatatggattgtaatttaattgcgaggaggcagactgatgaaaaggacactgtggatttccatggacggacagttattgctacgcgagcttcagatggcaagcctgtggatattgaacttcaccaacttaaaatctactgcagtgcaaacctcatagctcaagaaacatgttgtgaaatatcagatactaagtgcccagagcaggatggctttggaaatattgcatcatcatgggtaactgctcatgccagtaaaatgtcttcatatctgccagcaaagcaggaacttaaagaccagtgccagtgcattccaaacaagggagaagcaggattaccaggagctccgggttcacctgggcagaaagggcataaaggagagccgggtgaaaatggtttacatggtgctccaggattccctggtcaaaagggagagcaaggttttgaaggcagcaaaggagaaactggtgaaaaggagctaccggcatgtgaacttctttcacaatcaatgtaaaagcaattcactgtataggaattgctgaacaagtgtgtcctaccagaccgaaatagcagaattccactgcacagaaaacagaggtgttagtgcagctgctgttccaagtggatgttgtacagtgactagctgttttgtaagttattgtctaggcttatggtggtctattgcttcttagtctaatatcttaaaaaaaatcattggtttttattttccttgatatccttgatatttccttacaatctcctttaagaacctccccatcaatgatctgttctaatatcagtaaaggatcaatgaaacaagacagaaatcaaat

SEQ ID NO: 415518 - DNA, 1218 bp, Homo sapiens
gaaaccaccgttcctttttggcgtttcttcgtactcgaaacatggcaggttttaaaccagcagaatattccacagatttctatagtagttgatggtggaaagaaggtggtggaatttatgtttcaagccacagagggagatgtgttgaactacatttttagaaatcgagaactccgtcctttgtttgatcgtcagtggcacaaacttggcattagtatacaatcccaggtcatttcactttatatggattgtaatttaattgcgaggaggcagactgatgaaaaggacactgtggatttccatggacggacagttattgctacgcgagcttcagatggcaagcctgtggatattgaacttcaccaacttaaaatctactgcagtgcaaacctcatagctcaagaaacatgttgtgaaatatcagatactaagtgcccagagcaggatggctttggaaatattgcatcatcatgggtaactgctcatgccagtaaaatgtcttcatatctgccagcaaagcaggaacttaaagaccagtgccagtgcattccaaacaagggagaagcaggattaccaggagctccgggttcacctgggcagaaagggcataaaggagagccgggtgaaaatggtttacatggtgctccaggattccctggtcaaaagggagagcaaggttttgaaggcagcaaaggagaaactggtgaaaagggtgaacaaggagaaaaaggagatccagctctggctggccttaatggagaaaatggtttgaaaggtgacttgggtcctcatggtccacctggcccaaaaggagaaaagggagatacaggacccccaggaccaccagccttacctggttccctggggatacaaggcccccaaggtccacctggaaaagagggtcagaggggaagacgagggaaaacaggacctcccggaaaaccaggacccccaggaccacctggacctcctggaatacaaggaatacaccaaactcttggtggatattataacaaggataacaagggaaatgatgaacatgaagctggaggcctgaaaggagacaaggtttaattatcatagctgtaaagatgacagattcacttccccattcaataagatgtttcactcctgtttgattctgaaattgtaatgaccttggattccatgtgaatgtgccattgtcagaaaaaaaatgcacattaaatctacaggcag

SEQ ID NO: 415519 - DNA, 4134 bp, Homo sapiens
actcgcagggagctcactcctcggcggtgccgcagccctgtccggactccactgcgcctctgaggggctcaaatacgaattcaagatccgtggccgttcacatggtttcaaggcacaatgagactcactggcccttggaaactttggctttggatgtcaatatttctgcttcctgcttccacttccgtgaccgttagggacaagacagaagagtcatgccctatcctgagaatagagggacatcagctgacatatgacaacataaacaaacttgaagtttcaggttttgatctaggagacagcttttctctaagacgtgcattttgtgaaagtgataaaacctgtttcaaattgggaagtgcacttcttattagagacactattaagatatttcccaaaggccttcctgaggagtactcagtagctgccatgtttcgagtacgaagaaacgccaaaaaggaacggtggtttctgtggcaggttttaaaccagcagaatattccacagatttctatagtagttgatggtggaaagaaggtggtggaatttatgtttcaagccacagagggagatgtgttgaactacatttttagaaatcgagaactccgtcctttgtttgatcgtcagtggcacaaacttggcattagtatacaatcccaggtcatttcactttatatggattgtaatttaattgcgaggaggcagactgatgaaaaggacactgtggatttccatggacggacagttattgctacgcgagcttcagatggcaagcctgtggatattgaacttcaccaacttaaaatctactgcagtgcaaacctcatagctcaagaaacatgttgtgaaatatcagatactaagtgcccagagcaggatggctttggaaatattgcatcatcatgggtaactgctcatgccagtaaaatgtcttcatatctgccagcaaagcaggaacttaaagaccagtgccagtgcattccaaacaagggagaagcaggattaccaggagctccgggttcacctgggcagaaagggcataaaggagagccgggtgaaaatggtttacatggtgctccaggattccctggtcaaaagggagagcaaggttttgaaggcagcaaaggagaaactggtgaaaagggtgaacaaggagaaaaaggagatccagctctggctggccttaatggagaaaatggtttgaaaggtgacttgggtcctcatggtccacctggcccaaaaggagaaaagggagatacaggacccccaggaccaccagccttacctggttccctggggatacaaggcccccaaggtccacctggaaaagagggtcagaggggaagacgagggaaaacaggacctcccggaaaaccaggacccccaggaccacctggacctcctggaatacaaggaatacaccaaactcttggtggatattataacaaggataacaagggaaatgatgaacatgaagctggaggcctgaaaggagacaagggtgaaactggactaccaggatttccagggtctgttggccctaaaggacaaaaaggagaacctggagagccttttacaaaaggagaaaaaggagatagaggagaacctggggtaataggatcacagggagtaaagggtgaacctggagatcccggaccccctggtttaataggaagcccaggactaaagggtcagcaaggatctgcaggctccatgggacccagaggaccgccaggagatgttggattgccaggagaacatggtatcccaggaaaacaaggcattaaaggagaaaagggagatccaggtgggatcataggccctcccgggcttccaggtccaaaaggtgaggctggtcctccagggaaaagcctgccaggggaaccaggattagatggaaatcctggagcacctggtccacgtgggccaaagggtgaaagaggacttccaggtgttcacggttccccaggggacataggcccacaagggataggaattcctggcagaacaggcgcccaaggaccagctggagagccaggtattcagggtcctcgaggtctccctgggttgccaggaactccagggactccagggaatgatggagttccagggagagatggaaagccaggcctgccaggccccccaggtgacccgattgcacttcctctcttgggagacatcggtgctttgctcaagaatttctgtggcaactgccaagccagtgtcccagggctgaaaagcaacaaaggagaagaaggaggtgctggtgagcctggaaagtatgattccatggcccggaagggtgatatagggccacggggtcctccaggaatcccaggaagagagggaccaaagggaagcaaaggagagcggggctaccctgggatacctggggagaaaggtgatgagggtcttcaaggaattccaggcattccaggtgctccaggcccgactggaccccctggcttaatgggaagaactggacatcctggtcccacaggagcaaaaggtgaaaagggcagcgacggaccccctgggaaacccggaccacctggaccacctggtattccatttaatgaacgaaacggcatgagcagtttatataaaattaagggaggtgtgaatgttcccagttacccagggccacccggtcctcctggcccaaaaggcgatcctggcccagtgggagagcctggtgcaatggggttgccaggattagaaggatttccaggtgtaaagggagatcgaggcccagcaggtcccccaggaatagcagggatgtcgggaaaacctggtgccccagggcctccaggagttccaggggaaccgggtgagagaggacctgttggagatataggtttccctggaccagaaggaccctcaggaaagccaggaataaatggaaaagatggaataccaggtgctcagggcatcatgggtaagcctggagacagaggccccaaaggagaacgtggtgatcaggggattccaggagacagaggctcacaaggtgaacggggaaaaccaggccttacaggcatgaagggggccatcggtcctatgggtccaccaggaaacaagggctccatgggatcccctggccaccaaggccctccaggctctccaggcatccctggcattccggctgatgcagtttcatttgaagaaataaagaagtatattaatcaagaggtcctaaggatttttgaagagaggatggctgtattcctatcccagctcaagctgccagcagcaatgttggctgcccaagcttatgggagacctgggccaccagggaaggatgggttgcctgggccaccaggagaccctggaccccaaggctacagaggacagaagggagaaagaggtgaacctggaattgggctgccagggagtccaggtcttcctgggacttcagctctgggtttgccaggctcaccaggtgccccaggcccccagggccccccaggacccagtggaagatgtaacccagaagattgcctctatcctgtgtctcatgcccatcagcgcacaggtgggaattgaacacacctgaagaagacttagttcctggtaacatttccttgccactggagctctcttaataccgtcaaaccctcatcatctgtgggttgctttttttttttttttttttttttgggagtaagccaggcattaaaagcaaccgtttgaatcctattcctatagcaattgcaaatcagcattttttgatttttcccaaattcattccatatgttttgctttacaattgctatgatttttactcagagttttatatgaaatatgcaagtaaatcttatcgttagttcttcttcaaaaggaaattgcatcttgtgacttagtagactgatgatgatatccattttgtagactcatcaacatgtggttggcctttgatttctgaattttaaagtttcagacttatcttttccttggtgtttaaatttactatcattgctaaacatctcgtcaacttttttgatatagtgcattgctcctgttgaatgttttttgactactttttataacttaagaatttttataccatctacatctatcctacttatgcagaaaaataggcaataagaacttcattttacaatttagttttca

SEQ ID NO: 415520 - DNA, 369 bp, Homo sapiens
cggcgccgggcggcccagctagggcgctgcagggtcgcgaggaagtttgttggcccggaaccaagcacgccgtcgggcacgctagctccccgagagcaggcgggcgcatccgtggccgttcacatggtttcaaggcacaatgagactcactggcccttggaaactttggctttggatgtcaatatttctgcttcctgcttccacttccgtgaccgttagggacaagacaggtatccaggccaactctttgcctaatcaccaaatgttatttatagcctttaagtcattaaaacaaatcttgttaagattgaaaaggccatagattaatgtactataacagaataaattacaattcattgctttcttcca

SEQ ID NO: 415521 - DNA, 1245 bp, Homo sapiens
catacctggaccttctttatttcttcaaatgaaactgcatcagccggaatgccagggatgcctggaggccccaaaggagaacgtggtgatcaggggattccaggagacagaggctcacaaggtgaacggggaaaaccaggccttacaggcatgaagggggccatcggtcctatgggtccaccaggaaacaagggctccatgggatcccctggccaccaaggccctccaggctctccaggcatccctggcattccggctgatgcagtttcatttgaagaaataaagaagtatattaatcaagaggtcctaaggatttttgaagagaggatggctgtattcctatcccagctcaagctgccagcagcaatgttggctgcccaagcttatgggagacctgggccaccagggaaggatgggttgcctgggccaccaggagaccctggaccccaaggctacagaggacagaagggagaaagaggtgaacctggaattgggctgccagggagtccaggtcttcctgggacttcagctctgggtttgccaggctcaccaggtgccccaggcccccagggccccccaggacccagtggaagatgtaacccagaagattgcctctatcctgtgtctcatgcccatcagcgcacaggtgggaattgaacacacctgaagaagacttagttcctggtaacatttccttgccactggagctctcttaataccgtcaaaccctcatcatctgtgggttgctttttttttttttttttttttttgggagtaagccaggcattaaaagcaaccgtttgaatcctattcctatagcaattgcaaatcagcattttttgatttttcccaaattcattccatatgttttgctttacaattgctatgatttttactcagagttttatatgaaatatgcaagtaaatcttatcgttagttcttcttcaaaaggaaattgcatcttgtgacttagtagactgatgatgatatccattttgtagactcatcaacatgtggttggcctttgatttctgaattttaaagtttcagacttatcttttccttggtgtttaaatttactatcattgctaaacatctcgtcaacttttttgatatagtgcattgctcctgttgaatgttttttgactactttttataacttaagaatttttataccatctacatctatcctacttatgcagaaaaataggcaataagaacttcattttacaatttagttttca

SEQ ID NO: 415522 - DNA, 1239 bp, Homo sapiens
agcggatagttcactcactttcaaagccagctgaaggaaagaggaagtgctagagagagcccccttcagtgtgcttctgacttttacggacttggcttgttagaaggctgaaagatgatggcaggaatgaaaatccagcttgtatgcatgctactcctggctttcagctcctggagtctgtgctcagattcagaagaggaaatgaaagcattagaagcagatttcttgaccaatatgcatacatcaaagattagtaaagcacatgttccctcttggaagatgactctgctaaatgtttgcagtcttgtaaataatttgaacagcccagctgaggaaacaggagaagttcatgaagaggagcttgttgcaagaaggaaacttcctactgctttagatggctttagcttggaagcaatgttgacaatataccagctccacaaaatctgtcacagcagggcttttcaacactgggagttaatcccaggaagatattctttgatactggaaatgacaaaaatggaaaggaagaagtcataaagagaaaaattccttatattctgaaacggcagctgtatgagaataaacccagaagaccctacatactcaaaagagattcttactattactgagagaataaatcatttatttacatgtgattgtgattcatcatcccttaattaaatatcaaattatatttgtgtgaaaatgtgacaaacacacttatctgtctcttctacaattgtggtttattgaatgtgatttttctgcactaatataaattagactaagtgttttcaaataaatctaaatcttcagcatgatgtgttgtgtataattggagtagatattaattaagtcacctgtataatgttttgtaattttgcaaaacatatcttgagttgtttaaacagtcaaaatgtttgatattttataccagcttatgagctcaaagtactacagcaaagcctagcctgcatatcattcacccaaaacaaagtaatagcgcctcttttattattttgactgaatgttttatggaattgaaagaaacatacgttcttttcaagacttcctcatgaatctctcaattataggaaaagttattgtgataaaataggaacagctgaaagattgattaatgaactattgttaattcttcctattttaatgaatgacattgaactgaattttttgtctgttaaatgaacttgatagctaataaaaagacaactagccaaa

SEQ ID NO: 415523 - DNA, 820 bp, Homo sapiens
  misc_feature (42)..(42): n is a, c, g, or t
tgagatcaatatacatctgaacagagtattattttataagtntgcccctctcaagttaatcccaggaagatattctttgatactggaaatgacaaaaatggaaaggaagaagtcataaagagaaaaattccttatattctgaaacggcagctgtatgagaataaacccagaagaccctacatactcaaaagagattcttactattactgagagaataaatcatttatttacatgtgattgtgattcatcatcccttaattaaatatcaaattatatttgtgtgaaaatgtgacaaacacacttatctgtctcttctacaattgtggtttattgaatgtgatttttctgcactaatataaattagactaagtgttttcaaataaatctaaatcttcagcatgatgtgttgtgtataattggagtagatattaattaagtcacctgtataatgttttgtaattttgcaaaacatatcttgagttgtttaaacagtcaaaatgtttgatattttataccagcttatgagctcaaagtactacagcaaagcctagcctgcatatcattcacccaaaacaaagtaatagcgcctcttttattattttgactgaatgttttatggaattgaaagaaacatacgttcttttcaagacttcctcatgaatctctcaattataggaaaagttattgtgataaaataggaacagctgaaagattgattaatgaactattgttaattcttcctattttaatgaatgacattgaactgaattttttgtctgttaaatgaacttgatagctaataaaaagacaactagccaaa

SEQ ID NO: 415524 - DNA, 818 bp, Homo sapiens
agcggatagttcactcactttcaaagccagctgaaggaaagaggaagtgctagagagagcccccttcagtgtgcttctgacttttacggacttggcttgttagaaggctgaaagatgatggcaggaatgaaaatccagcttgtatgcatgctactcctggctttcagctcctggagtctgtgctcagattcagaagaggaaatgaaagcattagaagcagatttcttgaccaatatgcatacatcaaagattagtaaagcacatgttccctcttggaagatgactctgctaaatgtttgcagtcttgtaaataatttgaacagcccagctgaggaaacaggagaagttcatgaagaggagcttgttgcaagaaggaaacttcctactgctttagatggctttagcttggaagcaatgttgacaatataccagctccacaaaatctgtcacagcagggcttttcaacactgggagttaatcccaggaagatattctttgatactggaaatgacaaaaatggaaaggaagaagtcataaagagaaaaattccttatattctgaaacggcagctgtatgagaataaacccagaagaccctacatactcaaaagagattcttactattactgagagaataaatcatttatttacatgtgattgtgattcatcatcccttaattaaatatcaaattatatttgtgtgaaaatgtgacaaacacacttatctgtctcttctacaattgtggtttattgaatgtgatttttctgcactaatataaattagactaagtgttttcaaataaatctaaatcttcagca

SEQ ID NO: 415525 - DNA, 963 bp, Homo sapiens
  misc_feature (42)..(42): n is a, c, g, or t
tgagatcaatatacatctgaacagagtattattttataagtntgcccctctcaagttaatcccaggaagatattctttgatactggaaatgacaaaaatggaaaggaagaagtcataaagagaaaaattccttatattctgaaacggcagctgtatgagaataaacccagaagaccctacatactcaaaagagattcttactattactgagagaataaatcatttatttacatgtgattgtgattcatcatcccttaattaaatatcaaattatatttgtgtgaaaatgtgacaaacacacttatctgtctcttctacaattgtggtttattgaatgtgatttttctgcactaatataaattagactaagtgttttcaaataaatctaaatcttcagcatgatgtgttgtgtataattggagtagatattaattaagtcacctgtataatgttttgtaattttgcaaaacatatcttgagttgtttaaacagtcaaaatgtttgatattttataccagcttatgagctcaaagtactacagcaaagcctagcctgcatatcattcacccaaaacaaagtaatagcgcctcttttattattttgactgaatgttttatggaattgaaagaaacatacgttcttttcaagacttcctcatgaatctctcaattataggaaaagttattgtgataaaataggaacagctgaaagattgattaatgaactattgttaattcttcctattttaatgaatgacattgaactgaattttttgtctgttaaatgaacttgatagctaataaaaagacaactagccaaatctaaaaaaacacaaccgcaccgacaccaatacatgattaaaatgtctattggctcccgggggctctcgcgcgtcctttagggggggatttatggcccgtcctactccctccaggccctaggtgaggaaggtaatttataagg

SEQ ID NO: 415526 - DNA, 399 bp, Homo sapiens
  misc_feature (42)..(42): n is a, c, g, or t
tgagatcaatatacatctgaacagagtattattttataagtntgcccctctcaagttaatcccaggaagatattctttgatactggaaatgacaaaaatggaaaggaagaagtcataaagagaaaaattccttatattctgaaacggcagctgtatgagaataaacccagaagaccctacatactcaaaagagattcttactattactgagagaataaatcatttatttacatgtgattgtgattcatcatcccttaattaaatatcaaattatatttgtgtgaaaatgtgacaaacacacttatctgtctcttctacaattgtggtttattgaatgtgatttttctgcactaatataaattagactaagtgttttcaaataaatctaaatcttcagca

SEQ ID NO: 415527 - DNA, 816 bp, Homo sapiens
tattaatattacaccacactcacaaactcaaaacgttctagttgataacagttaatcccaggaagatattctttgatactggaaatgacaaaaatggaaaggaagaagtcataaagagaaaaattccttatattctgaaacggcagctgtatgagaataaacccagaagaccctacatactcaaaagagattcttactattactgagagaataaatcatttatttacatgtgattgtgattcatcatcccttaattaaatatcaaattatatttgtgtgaaaatgtgacaaacacacttatctgtctcttctacaattgtggtttattgaatgtgatttttctgcactaatataaattagactaagtgttttcaaataaatctaaatcttcagcatgatgtgttgtgtataattggagtagatattaattaagtcacctgtataatgttttgtaattttgcaaaacatatcttgagttgtttaaacagtcaaaatgtttgatattttataccagcttatgagctcaaagtactacagcaaagcctagcctgcatatcattcacccaaaacaaagtaatagcgcctcttttattattttgactgaatgttttatggaattgaaagaaacatacgttcttttcaagacttcctcatgaatctctcaattataggaaaagttattgtgataaaataggaacagctgaaagattgattaatgaactattgttaattcttcctattttaatgaatgacattgaactgaattttttgtctgttaaatgaacttgatagctaataaaaagacaactagccaaa

SEQ ID NO: 415528 - DNA, 818 bp, Homo sapiens
  misc_feature (20)..(20): n is a, c, g, or t
ggaacaaatggagaagatgntaagtagatagaagagggcgctgctgatgccagttaatcccaggaagatattctttgatactggaaatgacaaaaatggaaaggaagaagtcataaagagaaaaattccttatattctgaaacggcagctgtatgagaataaacccagaagaccctacatactcaaaagagattcttactattactgagagaataaatcatttatttacatgtgattgtgattcatcatcccttaattaaatatcaaattatatttgtgtgaaaatgtgacaaacacacttatctgtctcttctacaattgtggtttattgaatgtgatttttctgcactaatataaattagactaagtgttttcaaataaatctaaatcttcagcatgatgtgttgtgtataattggagtagatattaattaagtcacctgtataatgttttgtaattttgcaaaacatatcttgagttgtttaaacagtcaaaatgtttgatattttataccagcttatgagctcaaagtactacagcaaagcctagcctgcatatcattcacccaaaacaaagtaatagcgcctcttttattattttgactgaatgttttatggaattgaaagaaacatacgttcttttcaagacttcctcatgaatctctcaattataggaaaagttattgtgataaaataggaacagctgaaagattgattaatgaactattgttaattcttcctattttaatgaatgacattgaactgaattttttgtctgttaaatgaacttgatagctaataaaaagacaactagccaaa

SEQ ID NO: 415529 - DNA, 834 bp, Homo sapiens
  misc_feature (55)..(55): n is a, c, g, or t
  misc_feature (65)..(65): n is a, c, g, or t
  misc_feature (69)..(69): n is a, c, g, or t
tataggttatattgtggctagattacagtatgaaaaggaaggacgggggtttagntgaaacacangagnttaatcccaggaagatattctttgatactggaaatgacaaaaatggaaaggaagaagtcataaagagaaaaattccttatattctgaaacggcagctgtatgagaataaacccagaagaccctacatactcaaaagagattcttactattactgagagaataaatcatttatttacatgtgattgtgattcatcatcccttaattaaatatcaaattatatttgtgtgaaaatgtgacaaacacacttatctgtctcttctacaattgtggtttattgaatgtgatttttctgcactaatataaattagactaagtgttttcaaataaatctaaatcttcagcatgatgtgttgtgtataattggagtagatattaattaagtcacctgtataatgttttgtaattttgcaaaacatatcttgagttgtttaaacagtcaaaatgtttgatattttataccagcttatgagctcaaagtactacagcaaagcctagcctgcatatcattcacccaaaacaaagtaatagcgcctcttttattattttgactgaatgttttatggaattgaaagaaacatacgttcttttcaagacttcctcatgaatctctcaattataggaaaagttattgtgataaaataggaacagctgaaagattgattaatgaactattgttaattcttcctattttaatgaatgacattgaactgaattttttgtctgttaaatgaacttgatagctaataaaaagacaactagccaaa

SEQ ID NO: 415530 - DNA, 819 bp, Homo sapiens
cggcgaggacgttactcatgcacagcgctctgacacacgaccggcgacgccttattaatcccaggaagatattctttgatactggaaatgacaaaaatggaaaggaagaagtcataaagagaaaaattccttatattctgaaacggcagctgtatgagaataaacccagaagaccctacatactcaaaagagattcttactattactgagagaataaatcatttatttacatgtgattgtgattcatcatcccttaattaaatatcaaattatatttgtgtgaaaatgtgacaaacacacttatctgtctcttctacaattgtggtttattgaatgtgatttttctgcactaatataaattagactaagtgttttcaaataaatctaaatcttcagcatgatgtgttgtgtataattggagtagatattaattaagtcacctgtataatgttttgtaattttgcaaaacatatcttgagttgtttaaacagtcaaaatgtttgatattttataccagcttatgagctcaaagtactacagcaaagcctagcctgcatatcattcacccaaaacaaagtaatagcgcctcttttattattttgactgaatgttttatggaattgaaagaaacatacgttcttttcaagacttcctcatgaatctctcaattataggaaaagttattgtgataaaataggaacagctgaaagattgattaatgaactattgttaattcttcctattttaatgaatgacattgaactgaattttttgtctgttaaatgaacttgatagctaataaaaagacaactagccaaa

SEQ ID NO: 415531 - DNA, 405 bp, Homo sapiens
tattgatgggggtggttgggggcgtggggggtgagggagggggggcttagtgaaaactcagttaatcccaggaagatattctttgatactggaaatgacaaaaatggaaaggaagaagtcataaagagaaaaattccttatattctgaaacggcagctgtatgagaataaacccagaagaccctacatactcaaaagagattcttactattactgagagaataaatcatttatttacatgtgattgtgattcatcatcccttaattaaatatcaaattatatttgtgtgaaaatgtgacaaacacacttatctgtctcttctacaattgtggtttattgaatgtgatttttctgcactaatataaattagactaagtgttttcaaataaatctaaatcttcagca

SEQ ID NO: 415532 - DNA, 395 bp, Homo sapiens
tattaatattacaccacactcacaaactcaaaacgttctagttgataacagttaatcccaggaagatattctttgatactggaaatgacaaaaatggaaaggaagaagtcataaagagaaaaattccttatattctgaaacggcagctgtatgagaataaacccagaagaccctacatactcaaaagagattcttactattactgagagaataaatcatttatttacatgtgattgtgattcatcatcccttaattaaatatcaaattatatttgtgtgaaaatgtgacaaacacacttatctgtctcttctacaattgtggtttattgaatgtgatttttctgcactaatataaattagactaagtgttttcaaataaatctaaatcttcagca

SEQ ID NO: 415533 - DNA, 416 bp, Homo sapiens
  misc_feature (30)..(30): n is a, c, g, or t
  misc_feature (68)..(69): n is a, c, g, or t
tatataaaggtaatgtaaagggacgaagtntaaaagtaaaacaccagcccccctgtatgatccccagnnagattaatcccaggaagatattctttgatactggaaatgacaaaaatggaaaggaagaagtcataaagagaaaaattccttatattctgaaacggcagctgtatgagaataaacccagaagaccctacatactcaaaagagattcttactattactgagagaataaatcatttatttacatgtgattgtgattcatcatcccttaattaaatatcaaattatatttgtgtgaaaatgtgacaaacacacttatctgtctcttctacaattgtggtttattgaatgtgatttttctgcactaatataaattagactaagtgttttcaaataaatctaaatcttcagca

SEQ ID NO: 415534 - DNA, 405 bp, Homo sapiens
tggaaggtgtaggtggcgtgaggcagtgcggggatagacgatggggccccggtccctctgattaatcccaggaagatattctttgatactggaaatgacaaaaatggaaaggaagaagtcataaagagaaaaattccttatattctgaaacggcagctgtatgagaataaacccagaagaccctacatactcaaaagagattcttactattactgagagaataaatcatttatttacatgtgattgtgattcatcatcccttaattaaatatcaaattatatttgtgtgaaaatgtgacaaacacacttatctgtctcttctacaattgtggtttattgaatgtgatttttctgcactaatataaattagactaagtgttttcaaataaatctaaatcttcagca

SEQ ID NO: 415535 - DNA, 399 bp, Homo sapiens
ttagaatggccaaccacgtgtacactgcgcctcatcacaaagcttattgataacattaatcccaggaagatattctttgatactggaaatgacaaaaatggaaaggaagaagtcataaagagaaaaattccttatattctgaaacggcagctgtatgagaataaacccagaagaccctacatactcaaaagagattcttactattactgagagaataaatcatttatttacatgtgattgtgattcatcatcccttaattaaatatcaaattatatttgtgtgaaaatgtgacaaacacacttatctgtctcttctacaattgtggtttattgaatgtgatttttctgcactaatataaattagactaagtgttttcaaataaatctaaatcttcagca

SEQ ID NO: 415536 - DNA, 702 bp, Homo sapiens
agcggatagttcactcactttcaaagccagctgaaggaaagaggaagtgctagagagagcccccttcagtgtgcttctgacttttacggacttggcttgttagaaggctgaaagatgatggcaggaatgaaaatccagcttgtatgcatgctactcctggctttcagctcctggagtctgtgctcagattcagaagaggaaatgaaagcattagaagcagatttcttgaccaatatgcatacatcaaagattagtaaagcacatgttccctcttggaagatgactctgctaaatgtttgcagtcttgtaaataatttgaacagcccagctgaggaaacaggagaagttcatgaagaggagcttgttgcaagaaggaaacttcctactgctttagatggctttagcttggaagcaatgttgacaatataccagctccacaaaatctgtcacagcagggcttttcaacactgggagttaatcccaggaagatattctttgatactggaaatgacaaaaatggaaaggaagaagtcataaagagaaaaattccttatattctgaaacggcagctgtatgagaataaacccagaagaccctacatactcaaaagagattcttactattactgagagaataaatcatttatttacatgtgattgtgattcatcatcccttaattaaatatcaaattatatttgtgtg

SEQ ID NO: 415537 - DNA, 655 bp, Homo sapiens
agcggatagttcactcactttcaaagccagctgaaggaaagaggaagtgctagagagagcccccttcagtgtgcttctgacttttacggacttggcttgttagaaggctgaaagatgatggcaggaatgaaaatccagcttgtatgcatgctactcctggctttcagctcctggagtctgtgctcagattcagaagaggaaatgaaagcattagaagcagatttcttgaccaatatgcatacatcaaagattagtaaagcacatgttccctcttggaagatgactctgctaaatgtttgcagtcttgtaaataatttgaacagcccagctgaggaaacaggagaagttcatgaagaggagcttgttgcaagaaggaaacttcctactgctttagatggctttagcttggaagcaatgttgacaatataccagctccacaaaatctgtcacagcagggcttttcaacactgggagttaatcccaggaagatattctttgatactggaaatgacaaaaatggaaaggaagaagtcataaagagaaaaattccttatattctgaaacggcagctgtatgagaataaacccagaagaccctacatactcaaaagagattcttactattactgagagaataaatcatttatttacatgtg

SEQ ID NO: 415538 - DNA, 236 bp, Homo sapiens
  misc_feature (42)..(42): n is a, c, g, or t
tgagatcaatatacatctgaacagagtattattttataagtntgcccctctcaagttaatcccaggaagatattctttgatactggaaatgacaaaaatggaaaggaagaagtcataaagagaaaaattccttatattctgaaacggcagctgtatgagaataaacccagaagaccctacatactcaaaagagattcttactattactgagagaataaatcatttatttacatgtg

SEQ ID NO: 415539 - DNA, 243 bp, Homo sapiens
ggatagtgacgaggaagttgcatttaagaagacagaagagggggctgcttatggcacgtaggttaatcccaggaagatattctttgatactggaaatgacaaaaatggaaaggaagaagtcataaagagaaaaattccttatattctgaaacggcagctgtatgagaataaacccagaagaccctacatactcaaaagagattcttactattactgagagaataaatcatttatttacatgtg

SEQ ID NO: 415540 - DNA, 312 bp, Homo sapiens
  misc_feature (31)..(31): n is a, c, g, or t
  misc_feature (44)..(44): n is a, c, g, or t
  misc_feature (58)..(58): n is a, c, g, or t
  misc_feature (74)..(74): n is a, c, g, or t
agtcatgataccaggtaaacaggagtatagntcaagagggaatntcgcaagaggcggntgcgctagtgtgaatnccagcggagattaatcccaggaagatattctttgatactggaaatgacaaaaatggaaaggaagaagtcataaagagaaaaattccttatattctgaaacggcagctgtatgagaataaacccagaagaccctacatactcaaaagagattcttactattactgagagaataaatcatttatttacatgtgattgtgattcatcatcccttaattaaatatcaaattatatttgtgtg

SEQ ID NO: 415541 - DNA, 289 bp, Homo sapiens
  misc_feature (28)..(28): n is a, c, g, or t
  misc_feature (42)..(44): n is a, c, g, or t
  misc_feature (46)..(46): n is a, c, g, or t
ttaatgttattcacgtaccgctcaaggnagtacataagaggnnncncgtcgttggataacattaatcccaggaagatattctttgatactggaaatgacaaaaatggaaaggaagaagtcataaagagaaaaattccttatattctgaaacggcagctgtatgagaataaacccagaagaccctacatactcaaaagagattcttactattactgagagaataaatcatttatttacatgtgattgtgattcatcatcccttaattaaatatcaaattatatttgtgtg

SEQ ID NO: 415542 - DNA, 283 bp, Homo sapiens
  misc_feature (42)..(42): n is a, c, g, or t
tgagatcaatatacatctgaacagagtattattttataagtntgcccctctcaagttaatcccaggaagatattctttgatactggaaatgacaaaaatggaaaggaagaagtcataaagagaaaaattccttatattctgaaacggcagctgtatgagaataaacccagaagaccctacatactcaaaagagattcttactattactgagagaataaatcatttatttacatgtgattgtgattcatcatcccttaattaaatatcaaattatatttgtgtg

SEQ ID NO: 415543 - DNA, 964 bp, Homo sapiens
  misc_feature (42)..(42): n is a, c, g, or t
tgagatcaatatacatctgaacagagtattattttataagtntgcccctctcaagttaatcccaggaagatattctttgatactggaaatgacaaaaatggaaaggaagaagtcataaagagaaaaattccttatattctgaaacggcagctgtatgagaataaacccagaagaccctacatactcaaaagagattcttactattactgagagaataaatcatttatttacatgtgattgtgattcatcatcccttaattaaatatcaaattatatttgtgtgaaaatgtgacaaacacacttatctgtctcttctacaattgtggtttattgaatgtgatttttctgcactaatataaattagactaagtgttttcaaataaatctaaatcttcagcatgatgtgttgtgtataattggagtagatattaattaagtcacctgtataatgttttgtaattttgcaaaacatatcttgagttgtttaaacagtcaaaatgtttgatattttataccagcttatgagctcaaagtactacagcaaagcctagcctgcatatcattcacccaaaacaaagtaatagcgcctcttttattattttgactgaatgttttatggaattgaaagaaacatacgttcttttcaagacttcctcatgaatctctcaattataggaaaagttattgtgataaaataggaacagctgaaagattgattaatgaactattgttaattcttcctattttaatgaatgacattgaactgaattttttgtctgttaaatgaacttgatagctaataaaaagacaactagccaaaaaaaaaaatggctcttggctcacggtggcctttgcgcgcttccttaggaggtaatttagacctgctcctgctctcggctgggcgtcggtggggaggggttcactcccaaggcggatcggtatcccaaccgggaaaccagaacat

SEQ ID NO: 415544 - DNA, 911 bp, Homo sapiens
  misc_feature (42)..(42): n is a, c, g, or t
tgagatcaatatacatctgaacagagtattattttataagtntgcccctctcaagttaatcccaggaagatattctttgatactggaaatgacaaaaatggaaaggaagaagtcataaagagaaaaattccttatattctgaaacggcagctgtatgagaataaacccagaagaccctacatactcaaaagagattcttactattactgagagaataaatcatttatttacatgtgattgtgattcatcatcccttaattaaatatcaaattatatttgtgtgaaaatgtgacaaacacacttatctgtctcttctacaattgtggtttattgaatgtgatttttctgcactaatataaattagactaagtgttttcaaataaatctaaatcttcagcatgatgtgttgtgtataattggagtagatattaattaagtcacctgtataatgttttgtaattttgcaaaacatatcttgagttgtttaaacagtcaaaatgtttgatattttataccagcttatgagctcaaagtactacagcaaagcctagcctgcatatcattcacccaaaacaaagtaatagcgcctcttttattattttgactgaatgttttatggaattgaaagaaacatacgttcttttcaagacttcctcatgaatctctcaattataggaaaagttattgtgataaaataggaacagctgaaagattgattaatgaactattgttaattcttcctattttaatgaatgacattgaactgaattttttgtctgttaaatgaacttgatagctaataaaaagacaactagccaaaaaaaaaacaaagaggcctctttggccccacagggggagctttgcgggccttctctttatgagggtgaatcacaaacctccttcctgactcc

SEQ ID NO: 415545 - DNA, 1014 bp, Homo sapiens
agcggatagttcactcactttcaaagccagctgaaggaaagaggaagtgctagagagagcccccttcagtgtgcttctgacttttacggacttggcttgttagaaggctgaaagatgatggcaggaatgaaaatccagcttgtatgcatgctactcctggctttcagctcctggagtctgtgctcagattcagaagaggaaatgaaagcattagaagcagatttcttgaccaatatgcatacatcaaagttaatcccaggaagatattctttgatactggaaatgacaaaaatggaaaggaagaagtcataaagagaaaaattccttatattctgaaacggcagctgtatgagaataaacccagaagaccctacatactcaaaagagattcttactattactgagagaataaatcatttatttacatgtgattgtgattcatcatcccttaattaaatatcaaattatatttgtgtgaaaatgtgacaaacacacttatctgtctcttctacaattgtggtttattgaatgtgatttttctgcactaatataaattagactaagtgttttcaaataaatctaaatcttcagcatgatgtgttgtgtataattggagtagatattaattaagtcacctgtataatgttttgtaattttgcaaaacatatcttgagttgtttaaacagtcaaaatgtttgatattttataccagcttatgagctcaaagtactacagcaaagcctagcctgcatatcattcacccaaaacaaagtaatagcgcctcttttattattttgactgaatgttttatggaattgaaagaaacatacgttcttttcaagacttcctcatgaatctctcaattataggaaaagttattgtgataaaataggaacagctgaaagattgattaatgaactattgttaattcttcctattttaatgaatgacattgaactgaattttttgtctgttaaatgaacttgatagctaataaaaagacaactagccaaa

SEQ ID NO: 415546 - DNA, 837 bp, Homo sapiens
  misc_feature (30)..(30): n is a, c, g, or t
  misc_feature (68)..(69): n is a, c, g, or t
tatataaaggtaatgtaaagggacgaagtntaaaagtaaaacaccagcccccctgtatgatccccagnnagattaatcccaggaagatattctttgatactggaaatgacaaaaatggaaaggaagaagtcataaagagaaaaattccttatattctgaaacggcagctgtatgagaataaacccagaagaccctacatactcaaaagagattcttactattactgagagaataaatcatttatttacatgtgattgtgattcatcatcccttaattaaatatcaaattatatttgtgtgaaaatgtgacaaacacacttatctgtctcttctacaattgtggtttattgaatgtgatttttctgcactaatataaattagactaagtgttttcaaataaatctaaatcttcagcatgatgtgttgtgtataattggagtagatattaattaagtcacctgtataatgttttgtaattttgcaaaacatatcttgagttgtttaaacagtcaaaatgtttgatattttataccagcttatgagctcaaagtactacagcaaagcctagcctgcatatcattcacccaaaacaaagtaatagcgcctcttttattattttgactgaatgttttatggaattgaaagaaacatacgttcttttcaagacttcctcatgaatctctcaattataggaaaagttattgtgataaaataggaacagctgaaagattgattaatgaactattgttaattcttcctattttaatgaatgacattgaactgaattttttgtctgttaaatgaacttgatagctaataaaaagacaactagccaaa

SEQ ID NO: 415547 - DNA, 858 bp, Homo sapiens
  misc_feature (826)..(827): n is a, c, g, or t
  misc_feature (841)..(841): n is a, c, g, or t
agcggatagttcactcactttcaaagccagctgaaggaaagaggaagtgctagagagagcccccttcagtgtgcttctgacttttacggacttggcttgttagaaggctgaaagatgatggcaggaatgaaaatccagcttgtatgcatgctactcctggctttcagctcctggagtctgtgctcagattcagaagaggaaatgaaagcattagaagcagatttcttgaccaatatgcatacatcaaagattagtaaagcacatgttccctcttggaagatgactctgctaaatgtttgcagtcttgtaaataatttgaacagcccagctgaggaaacaggagaagttcatgaagaggagcttgttgcaagaaggaaacttcctactgctttagatggctttagcttggaagcaatgttgacaatataccagctccacaaaatctgtcacagcagggcttttcaacactgggagttaatcccaggaagatattctttgatactggaaatgacaaaaatggaaaggaagaagtcataaagagaaaaattccttatattctgaaacggcagctgtatgagaataaacccagaagaccctacatactcaaaagagattcttactattactgagagaataaatcatttatttacatgtgattgtgattcatcatcccttaattaaatatcaaattatatttgtgtgaaaatgtgacaaacacacttatctgtctcttctacaattgtggtttattgaatgtgatttttctgcactaatataaattagactaagtgttttcaaataaatctaaatcttcagcagaaaaaannaaaaaatggcctgnttggcctgagcgggggc

SEQ ID NO: 415548 - DNA, 1453 bp, Homo sapiens
  misc_feature (1453)..(1453): n is a, c, g, or t
agcggatagttcactcactttcaaagccagctgaaggaaagaggaagtgctagagagagcccccttcagtgtgcttctgacttttacggacttggcttgttagaaggctgaaagatgatggcaggaatgaaaatccagcttgtatgcatgctactcctggctttcagctcctggagtctgtgctcagattcagaagaggaaatgaaagcattagaagcagatttcttgaccaatatgcatacatcaaagattagtaaagcacatgttccctcttggaagatgactctgctaaatgtttgcagtcttgtaaataatttgaacagcccagctgaggaaacaggagaagttcatgaagaggagcttgttgcaagaaggaaacttcctactgctttagatggctttagcttggaagcaatgttgacaatataccagctccacaaaatctgtcacagcagggcttttcaacactgggagttaatcccaggaagatattctttgatactggaaatgacaaaaatggaaaggaagaagtcataaagagaaaaattccttatattctgaaacggcagctgtatgagaataaacccagaagaccctacatactcaaaagagattcttactattactgagagaataaatcatttatttacatgtgattgtgattcatcatcccttaattaaatatcaaattatatttgtgtgaaaatgtgacaaacacacttatctgtctcttctacaattgtggtttattgaatgtgatttttctgcactaatataaattagactaagtgttttcaaataaatctaaatcttcagcaaaaaaaaaaaaaaaaaaaaaaaaaaaaaaaaaaaaaaaaaaaaaaaaaaaaacaaaacaagacaaaaaacaaagaagagaaagacaaaccaaaacaacacaagtcaagcaagaaaacaagaaagagaggggggaccgacaaaataaaatacacaagacaggaagcgacacaaataagcagacgcaccccaaagtgataaaagaagaagcgccaccaaacgatggattaacaacaaaacgacgcgcggcgcgaacaaaaaaggtcaccggggagacaacacgcccgagctgctgcgtggaggacgaaccccacaagggtgggggagaaaagaagagaccaaacccaccaacaagaagatggcgcgcagccaaaaacaaaaaagcgagtagtggtgaagaacacacacgatcacagcgagggcagaagagacgcacacgaaactaaacaaaaaaacacaacggggccggacaaaaacagcagtcgagccagataagcagcaaacagcgcaaagcacagcagcacacgagcgcaaaccggcggccaaacacgacacaaagcacgaagcacacacagatgaagaagccaagcacacacacgacaaaaaaggccacacaacagacaccgaaacaccatcn

SEQ ID NO: 415549 - DNA, 540 bp, Homo sapiens
atttttcatctgtgatatatatatcatttatatatttctgccatcattttaatttccttgctttcttactttgctctgtgtgtacacacataagtgcatgtatatgtgaatataactattgcattttattaaacagaagttatgagatattggcagtatacaactttgtgaactgatgttactaaataaataacactatatttattagactggagtagcaattagaccctaaatgtgatggtttagcacactaggaattcatttcttgctcatgtaacacaagttttaattgcaggggtttttttaatatatttcagattagtaaagcacatgttccctcttggaagatgactctgctaaatgtttgcagtcttgtaaataatttgaacagcccagctgaggaaacaggagaagttcatgaagaggagcttgttgcaagaaggaaacttcctactgctttagatggctttagcttggaagcaatgttgacaatataccagctccacaaaatctgtcacagcagggcttttcaacactggg

SEQ ID NO: 415550 - DNA, 301 bp, Homo sapiens
gccaccacgcctggttaattttttgtatttttagtagaggcggggtttcaccgtgttagccaggatggtctcgatctcctgaccttgtgatctgcctgcctcagcctcccaaagtgctgggattacaggcatgagccactgcgcccggctgacacagagctgaagttctatccttcatgtcgcattgtatctggagacagcgtctgcataggtcactagcagtgaagcgaagtttgatcacttggtggaggcagtgactgctggatctttccactgtaaaggcacacgtttcccttcgcca

SEQ ID NO: 415551 - DNA, 291 bp, Homo sapiens
tgtaccatctatgtgcaattatactctaaattccactacactacattaaagtaaatggacattccagaatatagatgtgattatagtcttaaactaattattattaaccaatgattgctgaaaatcagtgatgcatttgttatagagtataactcatcgtttacagtatgttttagttggcagtatcatacctagatggtgaataacatattcccagtaaatttatatagcagtgaagaattacatgccttctggtggacattttataagtgcattttatatcacaataaa

SEQ ID NO: 415552 - DNA, 1008 bp, Homo sapiens
  misc_feature (787)..(787): n is a, c, g, or t
cgggtatcaaaagaaggatcggctccgcccccgggctccccgggggagttgatagaagggtccttcccaccctttgccgtccccactcctgtgcctacgacccaggagcgtgtcagccaaagcatggagaatcaagagaaggcgagtatcgcgggccacatgttcgacgtagtcgtgatcggaggtggcatttcaggactatctgctgccaaactcttgactgaatatggcgttagtgttttggttttagaagctcgggacagggttggaggaagaacatatactataaggaatgagcatgttgattacgtagatgttggtggagcttatgtgggaccaacccaaaacagaatcttacgcttgtctaaggagctgggcatagagacttacaaagtgaatgtcagtgagcgtctcgttcaatatgtcaaggggaaaacatatccatttcggggcgcctttccaccagtatggaatcccattgcatatttggattacaataatctgtggaggacaatagataacatggggaaggagattccaactgatgcaccctgggaggctcaacatgctgacaaatgggacaaaatgaccatgaaagagctcattgacaaaatctgctggacaaagactgctaggcggtttgcttatctttttgtgaatatcaatgtgacctctgagcctcacgaagtgtctgccctgtggttcttgtggtatgtgaagcagtgcgggggcaccactcggatattctctgtcaccaatggtggccaggaacggaagttgtaggtgnaccggtcagtggagcgaaagggattaatgggacctccctcgggagaaccaaggggaaagcttgaaccattccgggtcccccacggtggaccaaggccaggggacacccttcatcatagaagaggcggaaccaggaacattatgagatggcacaaacggcaatgaagggaaccctccgaactgggatggcaaatgccttcgaccagaagatcccggagagaa

SEQ ID NO: 415553 - DNA, 1826 bp, Homo sapiens
cactttttttagagccttgtttaaaggaacgttaactcgagagtactactgatgatgacgcttctcttgtttttaaagtatttacacatcattgttaagtatttttggaatggaacattttaaagttttctccatagaaagcaacatagtggcacttgttgagtaaatgatcataaaaatgacttgcttttaatagcagatgagttgatagtttaactgttgacactttcttaatgtttttgatgttggatgcatttacaatggaagaatttttttgaaagatttggccctctcaccaatacacacattcagacttgagctgcacgcatttagatgaacaaataggaaattcacggtattttttgttttagccatccaaaattcataggattctaccaaaaatattagcccctgactctagttattctgagatgagggaatcaactttatcttgaaagttaactagctaaaatgtctttatttaaatagcaaaaatatagtttacctgacaagtattaaaagtctcactttcaaattgtgttaactctcagaccactgatgaatcttttggtaaatcacaggcagattttaaaagctaaatgaagccttagtgccttgaaagttaagatacttgtgcaaaatggatttagcaagattcaggattggcaccagtgagttggctagatacacatcacctgtgactgggaattcaaagtttagaaagcctaacgaatagtagctactaacttcatatggttcaatgtaaatcagttacttagtcattgactgtgacagatgacagctactttcactatattttcatgatgtggtatttttctctattttttctttttccaagtatgaaatggaaaaaaatgtagttaagaaaattaagtgtgagactttaaaatttagttttgttgtaaactagagattctagtgaacagtgttagttttatactgtagtacagggcacacactttaacctttagaaatatgtttaccatcagggatttatttttactatagaaatactaaatgtactgtgaagcttaaagacaggagaataaatgttggaggggtaatacacaaaaacaaaggcatatttgatgaagtaccctgtgttatgtgaacacaatttccccttctgttaagactataaactatatgagtatgtgtactgcatgtttacataaaacagtttaattttgaaggattattttaaaaactatgtttatatataatacctaacaagctgtaaatattgtatattattgatttttaattttatataagcaattttttatttcccaattcatgtacaaatctcattatgtatatagcataatttcctggagaacacaaattttgcagtgaattttaagtaattttaattgcagtaagcatcagtttagcctagagatgttgatctttattttaaattatttttcaccattctcattttcttcaaagggcagcaataaacatatgcaagttatttttaattatagaaagtaggtctacaaagataagatctaggttccaattcattgctttaaggaaaagatgcacaattactatcattcagtgtctaatcacaggaccatttctgaggtccacatgtggctctcctctttgtaatatacagggtgaactctttactgatacacacaagacaactgttaaaaagtgaatccagcacttaaatgtcattacacagaatttattggattaaaaatttgtaatatacagtattttaataaagtttctgtattcaatttcatgcacttatatataaataaacctgtctttgaaagctttaaaag

SEQ ID NO: 415554 - DNA, 1766 bp, Homo sapiens
cactttttttagagccttgtttaaaggaacgttaactcgagagtactactgatgatgacgcttctcttgtttttaaagtatttacacatcattgttaagtatttttggaatggaacattttaaagttttctccatagaaagcaacatagtggcacttgttgagtaaatgatcataaaaatgacttgcttttaatagcagatgagttgatagtttaactgttgacactttcttaatgtttttgatgttggatgcatttacaatggaagaatttttttgaaagatttggccctctcaccaatacacacattcagacttgagctgcacgcatttagatgaacaaataggaaattcacggtattttttgttttagccatccaaaattcataggattctaccaaaaatattagcccctgactctagttattctgagatgagggaatcaactttatcttgaaagttaactagctaaaatgtctttatttaaatagcaaaaatatagtttacctgacaagtattaaaagtctcactttcaaattgtgttaactctcagaccactgatgaatcttttggtaaatcacaggcagattttaaaagctaaatgaagccttagtgccttgaaagttaagatacttgtgcaaaatggatttagcaagattcaggattggcaccagtgagttggctagatacacatcacctgtgactgggaattcaaagtttagaaagcctaacgaatagtagctactaacttcatatggttcaatgtaaatcagttacttagtcattgactgtgacagatgacagctactttcactatattttcatgatgtggtatttttctctattttttctttttccaagtatgaaatggaaaaaaatgtagttaagaaaattaagtgtgagactttaaaatttagttttgttgtaaactagagattctagtgaacagtgttagttttatactgtagtacagggcacacactttaacctttagaaatatgtttaccatcagggatttatttttactatagaaatactaaatgtactgtgaagcttaaagacaggagaataaatgttggaggggtaatacacaaaaacaaaggcatatttgatgaagtaccctgtgttatgtgaacacaatttccccttctgttaagactataaactatatgagtatgtgtactgcatgtttacataaaacagtttaattttgaaggatatttttaattttatataagcaattttttatttcccaattcatgtacaaatctcattatgtatatagcataatttcctggagaacacaaattttgcagtgaattttaagtaattttaattgcagtaagcatcagtttagcctagagatgttgatctttattttaaattatttttcaccattctcattttcttcaaagggcagcaataaacatatgcaagttatttttaattatagaaagtaggtctacaaagataagatctaggttccaattcattgctttaaggaaaagatgcacaattactatcattcagtgtctaatcacaggaccatttctgaggtccacatgtggctctcctctttgtaatatacagggtgaactctttactgatacacacaagacaactgttaaaaagtgaatccagcacttaaatgtcattacacagaatttattggattaaaaatttgtaatatacagtattttaataaagtttctgtattcaatttcatgcacttatatataaataaacctgtctttgaaagctttaaaag

SEQ ID NO: 415555 - DNA, 6249 bp, Homo sapiens
  misc_feature (3404)..(3404): n is a, c, g, or t
  misc_feature (4001)..(4001): n is a, c, g, or t
  misc_feature (4434)..(4434): n is a, c, g, or t
  misc_feature (4437)..(4437): n is a, c, g, or t
  misc_feature (4485)..(4485): n is a, c, g, or t
cggacgcgtggggcaatttattgtctaaaatagcatcatggaatgatataaaaatgcagctttccaatcacactaagggtctctctatttcttctcttgaccaccaatcaggaacctttgctggaagcttgtttctgattggtgaaagtaagccataacagtggaatgccaaggagtaaatacaaaagtgtagcaacaactgagtttgctgtctcactaccctcagcctaggccaacctggactccttcaccccaaatgaggtgaccgctacattttatatgaagacactgatttaccattcaactgtgatccatcttataacatggcaatccaatacagacaggaagataaaactcaacaacagctaaaataaagtgtattcccaggtaaaatagacaagtgctttaatttgaaatggattcgtccgatgagtgtcagttacaagggcagagaaggtaccagtgcagaagagctctgactgtgggcagtgtcaccaggtcccactaagtggcaacacttgtgctgggcgacttgacccatcttgatgtataaacccatagccagacaggacgtgcaaacaggtctcatggtgaatgcgatgctgtggaaaatgacatggagaatggctgtctctcagctagggaggagggtcttggtgtcctaggaaagaatgttcacgtcctggagttggtggttggtgttctatctaggcgatgagagaaggatgcttttcctaatgagcacctggtgggaatagagtctctctttgcacttcgctggaggaagaaatttctaccacttattttttcttcttgcttatagaatacacattgcagaaaaaggatgaagttgaccagtgaaaagttgcccaagaaccccttttatgcctctgtatctcagtatgctgctaaaaaccaaaaatttttccagtggaaaaaggaaaagactggtacaaatcctgatatttaagcttcccttggaaaacactttaacagttcattttgcatgctagagcaaacgagacaagaaataatgtgttttattgatttcaaggaagtggttaatcattagtccttttgagttttcccgcaagaatctgtgaaattgctcatttatctggtagcaaatcgtcagtgaggtctcacagatagttaggtcttgattttactctcaggacttaaggacatgcttctagaaaacagaaagcagatgtcacgtttgttaaagagaacaatgccaggcttgacttgcaattattatttaaataccttatcttccctaaagtcttaaaaatgttatattagggatgggttgctcatttggttagaggaactctcattaaggctcaaattaagaatttaactcacctctccagagagctttgcccattgaagacaaaccaatgcatagacttatacccagccctgcactgttagggctctacttggccatgagcagggttagtgtgaaaccaatcaacaagtattgtttgttgttgttgttgttgttttgagatggagtttcgctcttgttgcccaggcttgagtgcagtgatgcaatcttggctcaccgcagcctccgcctcctggggtcaggctgttctcctgcctgggtctcccgagtggctgggattataggcgtgcaccaccacgccctgctaattttgcatttttggtggagacggggtttctccatgttggtcaggctggtcttgaactcccggactcgggtgatccacccgcctcggcctcccagagtgctgagatttacaggcgtgagccaccgcgcccggccagtattgctttattacacaaggcacagtgttagggcctgtgaccatgacgttttttcaggtaatatttcttccttgagctaaggaggccagttgtaggaatgagcactagaaagcaagaatgtcaacagtgttagatggattttatatgattcattacttcaagagagaaaattcatattgtgtggttgatggaattccttacctttttaaaatcagattacacccatgctaatttggtggataaggcattgcagctcttgaaggaaagaatactgaaaggagacactctggcatatttcctacgaggtcaactatattttgaagagggatggtatgaagaagcattagaacagtttgaagaaatcaaggagaaagaccatcaagcaacttaccagctaggagtgatgtactatgatgggctggggaccactctagacgctgagaaaggggtggactatatgaagaaaattcttgattctccatgtcccaaagcaagacacttaaaatttgcagctgcttacaacctcggaagagcttattatgaaggaaaaggtgttaaacgatcaaatgaggaagctgaaagactgtggcttatcgcagcagacaatggaaatcccaaagctagtgtgaaggctcaaagtatgctcgggctgtattactcaaccaaggagcccaaggagttagaaaaggcattttactggcattccgaagcatgtggcaatgggaatctggagtcccagggtgcacttgggctcatgtacttgtatggacaaggcatccggcaggatacggaagctgccctgcagtgcttaagagaagcagcagaacgcggaaacgtctatgctcaagggaatctcgtggagtattactataagatgaaattttttacaaagtgtgttgcattttccaaaaggatcgctgactatgatgaggttcacgacatccccatgatcgcccaggtcacagactgtctcccggagttcatcggcagaggcatggcaatggcatccttctaccacgcaaggtgtcttcagcttggcttgggcatcaccagggatgaaacaaccgctaaacactattattctaaagcttgtcgtctgaatcccgcattggcagatgaacttcactccttacttattcgtcaaagaatttagaccacaatgtatttcaacaaagatcatcaatgctaacacctcacaatgtgtgtatttttacagtagctatgtttggttattttgcacatcacaaattacactatcctgggtattttacaggtgacatgttacttcgttcttgaattcgtacgctgttaagttttgcaacttgaaacctagacacaaggtcaaattgctggaagagtcctcagaggtccacctcttaccctacagactggccgagaccatatcaagtattaaaaccattctatacagcaagtatcgtttatcctttcttaaacaccgagtctccaaaaatacttagtttagctttagtttagtaagttcagaagtagaaacaaacttatttaaaaccatcatttgaaagtttaattctttaaatttgtctcttagttttgtgaattttgaataataatgtttaaattttgtttcngtcatttaaaatttaaattttcagtcatttaaaattttaaaaatttaaaatttcacaaaactaagggtaaaagacatttaaagaattaaacttaaataagtgtgtgcagcatttctacttctgaagttattaaagctaaaactgcactaagccttttgagacatcctttattcttaaaaagctcataaataattggcttattacatataaacttcaaaaaagtgggttataagacattgctttagaatcttgcccctccaaatcttccctcaaagatcttaatgagtaaaacaactgctacatacatatgcagaatgtgtaataaaacaaaaagcaattgctatatgaaaatattcgtaagaaaagtaaagcaaattgtttctttgtgcttcagctcattttccatatttttaaaaccctgtggtaaaagcctcaatgaaatcatttacaagaactacaattaaatattgttaaaattagcaaaaggctttccgtatatagatgacatctatgaaggcaaaaggtgacagtaaaaacagtaagatccatatgcataagattgtacaaggctattcatttgtgaaacaaatatacatntcgaagacaggtctcagagataccttaactattcctttttttataaacatattaaaggatgtggctttattttataaatcacaaccatcccaacagtggatttaaacaagatttctttttagtaatgggaaaatgcaattaatatggaggtgatagtcactaagaactgttgaatggcagaaaagtatttgctctcgttttatgttctggcttgtctgtattgcctgaacttcattttgtctttgtgtaagggaagaaatttcaacagactcgggtttgagatatcctcaaatggtcatgtatttctgtctcaaatctcttaataccacccatgtaacattccttcaaccacttgaagatccaaattcccaactagtattctcttctccacacttaatccagttcctaaagattattattattattattattnttntttttttttttttgagacggagtctcctgacctaatcttagcccggcncagtggctcacgtctgtaatcccagcactttgggaggctgaggcgggcagatcatgaggtcaggagtttgagaccaggctggccaacgtggtgaaaccccgtctctactaaaaatacaaaaattagccgggcgtgatggcggacgcctgtagtcccagctactcgggaggctgagacagaagaactgcttgaaaccaggaggcagaggttgcagtgagctgagatcgcgcaaattgcactccagcctcggtgacaagagcgagactccatctcaaaaaaaaataaaaagaatcttaaaataggaacataataaaagatcggccctaagtaaagagcactttttaaactgccattaaagatgggtttcagaaatcataaactttgacgtgtgccatacatggtaacatgctatgcttatatgtcttctataaatccaatgcagaatttaaaatttcagtttactctagttaccataaagctaatgctctggcacaagcgagtccctgcaaactaccactgctgaggacagtagtaaaccccttgacctgagactgcggtgagtctgtaactcgagtgcattgagacttccagatcattactcttacacacacacacacacacacatacacacacacacactccttctctaagattccttgtagctgatatctcatggaaaaatgacattttatcataaataaatatagagacaaaataatagtgatctttctcattcgcaatgtaaacttaacagctacagtttaaatgatagcatagaattatgcctaaaatagacatttcccataattgtattgtgataagttcttcaggcttgacaacttcacattgcctctcttccttgaatgtattttatctggtcttttctatatagtcttttgaaggataatttttatcaatagccaactttgggtatttttttaagtgtcaaatatcatcatggtttgaaaaaaggataaaaaagctataactaaaaaaatcttaaggataacatttggtttactaatttttaatcatttatctttcagaacttgtttcttatcaagaagttagcaggtatgatatgtatatcatacgtatataaactggcataggttacatcctagggcatgaggggagtatctttcagggattcaaatggaatttttacctgttacttgtttaattgttttgttttcaatattcttggggattagacaggggaaggtattttattactgcataatagatggtgaaacccaggaaaattaagtacttgtgcatggccccactatcaataacacaaagtctgtactctggatctcccctaatgtccctgtggtctaaacggcttgataatacaaccgagcccctgaagtagctgccctcctctttccgctcccccatctcggccctgcccatactccaagggtcagctcccatctctcctccctaatgcctcacttcaagcactaatttggctctttctgctcactaaaaatcatatattttacagatttattttgtttctggagaaggcagcaaacttttacttccctgcagaagtagttaagtacatagtgttttctctaaaaaggcatttgataaatatttgaacagcctgtagagtttcaacctctttgagatataagtatcttaaatatcatagagcactgtgattcatttttatattttattgctttgaatgctcaaactatgggaaatctttggtaaaaataaagacaataaaatcttcacaataacttt

SEQ ID NO: 415556 - DNA, 5187 bp, Homo sapiens
  misc_feature (2342)..(2342): n is a, c, g, or t
  misc_feature (2939)..(2939): n is a, c, g, or t
  misc_feature (3372)..(3372): n is a, c, g, or t
  misc_feature (3375)..(3375): n is a, c, g, or t
  misc_feature (3423)..(3423): n is a, c, g, or t
cggacgcgtggggcaatttattgtctaaaatagcatcatggaatgatataaaaatgcagctttccaatcacactaagggtctctctatttcttctcttgaccaccaatcaggaacctttgctggaagcttgtttctgattggtgaaagtaagccataacagtggaatgccaaggagtaaatacaaaagtgtagcaacaactgagtttgctgtctcactaccctcagcctaggccaacctggactccttcaccccaaatgaggtgaccgctacattttatatgaagacactgatttaccattcaactgtgatccatcttataacatggcaatccaatacagacaggaagataaaactcaacaacagctaaaataaagtgtattcccaggtaaaatagacaagtgctttaatttgaaatggattcgtccgatgagtgtcagttacaagggcagagaaggtaccagtgcagaagagctctgactgtgggcagtgtcaccaggtcccactaagtggcaacacttgtgctgggcgacttgacccatcttgatgtataaacccatagccagacaggacgtgcaaacaggtctcatggtgaatgcgatgctgtggaaaatgacatggagaatggctgtctctcagctagggaggagggtcttggtgtcctaggaaagaatgttcacgtcctggagttggtggttggtgttctatctaggcgatgagagaaggatgcttttcctaatgagcacctggtgggaatagagtctctctttgcacttcgctggaggaagaaatttctaccacttattttttcttcttgcttatagaatacacattgcagaaaaaggatgaagttgaccagtgaaaagttgcccaagaaccccttttatgcctctgtatctcagtatgctgctaaaaaccaaaaatttttccagtggaaaaaggaaaagactgattacacccatgctaatttggtggataaggcattgcagctcttgaaggaaagaatactgaaaggagacactctggcatatttcctacgaggtcaactatattttgaagagggatggtatgaagaagcattagaacagtttgaagaaatcaaggagaaagaccatcaagcaacttaccagctaggagtgatgtactatgatgggctggggaccactctagacgctgagaaaggggtggactatatgaagaaaattcttgattctccatgtcccaaagcaagacacttaaaatttgcagctgcttacaacctcggaagagcttattatgaaggaaaaggtgttaaacgatcaaatgaggaagctgaaagactgtggcttatcgcagcagacaatggaaatcccaaagctagtgtgaaggctcaaagtatgctcgggctgtattactcaaccaaggagcccaaggagttagaaaaggcattttactggcattccgaagcatgtggcaatgggaatctggagtcccagggtgcacttgggctcatgtacttgtatggacaaggcatccggcaggatacggaagctgccctgcagtgcttaagagaagcagcagaacgcggaaacgtctatgctcaagggaatctcgtggagtattactataagatgaaattttttacaaagtgtgttgcattttccaaaaggatcgctgactatgatgaggttcacgacatccccatgatcgcccaggtcacagactgtctcccggagttcatcggcagaggcatggcaatggcatccttctaccacgcaaggtgtcttcagcttggcttgggcatcaccagggatgaaacaaccgctaaacactattattctaaagcttgtcgtctgaatcccgcattggcagatgaacttcactccttacttattcgtcaaagaatttagaccacaatgtatttcaacaaagatcatcaatgctaacacctcacaatgtgtgtatttttacagtagctatgtttggttattttgcacatcacaaattacactatcctgggtattttacaggtgacatgttacttcgttcttgaattcgtacgctgttaagttttgcaacttgaaacctagacacaaggtcaaattgctggaagagtcctcagaggtccacctcttaccctacagactggccgagaccatatcaagtattaaaaccattctatacagcaagtatcgtttatcctttcttaaacaccgagtctccaaaaatacttagtttagctttagtttagtaagttcagaagtagaaacaaacttatttaaaaccatcatttgaaagtttaattctttaaatttgtctcttagttttgtgaattttgaataataatgtttaaattttgtttcngtcatttaaaatttaaattttcagtcatttaaaattttaaaaatttaaaatttcacaaaactaagggtaaaagacatttaaagaattaaacttaaataagtgtgtgcagcatttctacttctgaagttattaaagctaaaactgcactaagccttttgagacatcctttattcttaaaaagctcataaataattggcttattacatataaacttcaaaaaagtgggttataagacattgctttagaatcttgcccctccaaatcttccctcaaagatcttaatgagtaaaacaactgctacatacatatgcagaatgtgtaataaaacaaaaagcaattgctatatgaaaatattcgtaagaaaagtaaagcaaattgtttctttgtgcttcagctcattttccatatttttaaaaccctgtggtaaaagcctcaatgaaatcatttacaagaactacaattaaatattgttaaaattagcaaaaggctttccgtatatagatgacatctatgaaggcaaaaggtgacagtaaaaacagtaagatccatatgcataagattgtacaaggctattcatttgtgaaacaaatatacatntcgaagacaggtctcagagataccttaactattcctttttttataaacatattaaaggatgtggctttattttataaatcacaaccatcccaacagtggatttaaacaagatttctttttagtaatgggaaaatgcaattaatatggaggtgatagtcactaagaactgttgaatggcagaaaagtatttgctctcgttttatgttctggcttgtctgtattgcctgaacttcattttgtctttgtgtaagggaagaaatttcaacagactcgggtttgagatatcctcaaatggtcatgtatttctgtctcaaatctcttaataccacccatgtaacattccttcaaccacttgaagatccaaattcccaactagtattctcttctccacacttaatccagttcctaaagattattattattattattattnttntttttttttttttgagacggagtctcctgacctaatcttagcccggcncagtggctcacgtctgtaatcccagcactttgggaggctgaggcgggcagatcatgaggtcaggagtttgagaccaggctggccaacgtggtgaaaccccgtctctactaaaaatacaaaaattagccgggcgtgatggcggacgcctgtagtcccagctactcgggaggctgagacagaagaactgcttgaaaccaggaggcagaggttgcagtgagctgagatcgcgcaaattgcactccagcctcggtgacaagagcgagactccatctcaaaaaaaaataaaaagaatcttaaaataggaacataataaaagatcggccctaagtaaagagcactttttaaactgccattaaagatgggtttcagaaatcataaactttgacgtgtgccatacatggtaacatgctatgcttatatgtcttctataaatccaatgcagaatttaaaatttcagtttactctagttaccataaagctaatgctctggcacaagcgagtccctgcaaactaccactgctgaggacagtagtaaaccccttgacctgagactgcggtgagtctgtaactcgagtgcattgagacttccagatcattactcttacacacacacacacacacacatacacacacacacactccttctctaagattccttgtagctgatatctcatggaaaaatgacattttatcataaataaatatagagacaaaataatagtgatctttctcattcgcaatgtaaacttaacagctacagtttaaatgatagcatagaattatgcctaaaatagacatttcccataattgtattgtgataagttcttcaggcttgacaacttcacattgcctctcttccttgaatgtattttatctggtcttttctatatagtcttttgaaggataatttttatcaatagccaactttgggtatttttttaagtgtcaaatatcatcatggtttgaaaaaaggataaaaaagctataactaaaaaaatcttaaggataacatttggtttactaatttttaatcatttatctttcagaacttgtttcttatcaagaagttagcaggtatgatatgtatatcatacgtatataaactggcataggttacatcctagggcatgaggggagtatctttcagggattcaaatggaatttttacctgttacttgtttaattgttttgttttcaatattcttggggattagacaggggaaggtattttattactgcataatagatggtgaaacccaggaaaattaagtacttgtgcatggccccactatcaataacacaaagtctgtactctggatctcccctaatgtccctgtggtctaaacggcttgataatacaaccgagcccctgaagtagctgccctcctctttccgctcccccatctcggccctgcccatactccaagggtcagctcccatctctcctccctaatgcctcacttcaagcactaatttggctctttctgctcactaaaaatcatatattttacagatttattttgtttctggagaaggcagcaaacttttacttccctgcagaagtagttaagtacatagtgttttctctaaaaaggcatttgataaatatttgaacagcctgtagagtttcaacctctttgagatataagtatcttaaatatcatagagcactgtgattcatttttatattttattgctttgaatgctcaaactatgggaaatctttggtaaaaataaagacaataaaatcttcacaataacttt

SEQ ID NO: 415557 - DNA, 3591 bp, Homo sapiens
cggacgcgtggggcaatttattgtctaaaatagcatcatggaatgatataaaaatgcagctttccaatcacactaagggtctctctatttcttctcttgaccaccaatcaggaacctttgctggaagcttgtttctgattggtgaaagtaagccataacagtggaatgccaaggagtaaatacaaaagtgtagcaacaactgagtttgctgtctcactaccctcagcctaggccaacctggactccttcaccccaaatgaggtgaccgctacattttatatgaagacactgatttaccattcaactgtgatccatcttataacatggcaatccaatacagacaggaagataaaactcaacaacagctaaaataaagtgtattcccaggtaaaatagacaagtgctttaatttgaaatggattcgtccgatgagtgtcagttacaagggcagagaaggtaccagtgcagaagagctctgactgtgggcagtgtcaccaggtcccactaagtggcaacacttgtgctgggcgacttgacccatcttgatgtataaacccatagccagacaggacgtgcaaacaggtctcatggtgaatgcgatgctgtggaaaatgacatggagaatggctgtctctcagctagggaggagggtcttggtgtcctaggaaagaatgttcacgtcctggagttggtggttggtgttctatctaggcgatgagagaaggatgcttttcctaatgagcacctggtgggaatagagtctctctttgcacttcgctggaggaagaaatttctaccacttattttttcttcttgcttatagaatacacattgcagaaaaaggatgaagttgaccagtgaaaagttgcccaagaaccccttttatgcctctgtatctcagtatgctgctaaaaaccaaaaatttttccagtggaaaaaggaaaagactggtacaaatcctgatatttaagcttcccttggaaaacactttaacagttcattttgcatgctagagcaaacgagacaagaaataatgtgttttattgatttcaaggaagtggttaatcattagtccttttgagttttcccgcaagaatctgtgaaattgctcatttatctggtagcaaatcgtcagtgaggtctcacagatagttaggtcttgattttactctcaggacttaaggacatgcttctagaaaacagaaagcagatgtcacgtttgttaaagagaacaatgccaggcttgacttgcaattattatttaaataccttatcttccctaaagtcttaaaaatgttatattagggatgggttgctcatttggttagaggaactctcattaaggctcaaattaagaatttaactcacctctccagagagctttgcccattgaagacaaaccaatgcatagacttatacccagccctgcactgttagggctctacttggccatgagcagggttagtgtgaaaccaatcaacaagtattgtttgttgttgttgttgttgttttgagatggagtttcgctcttgttgcccaggcttgagtgcagtgatgcaatcttggctcaccgcagcctccgcctcctggggtcaggctgttctcctgcctgggtctcccgagtggctgggattataggcgtgcaccaccacgccctgctaattttgcatttttggtggagacggggtttctccatgttggtcaggctggtcttgaactcccggactcgggtgatccacccgcctcggcctcccagagtgctgagatttacaggcgtgagccaccgcgcccggccagtattgctttattacacaaggcacagtgttagggcctgtgaccatgacgttttttcaggtaatatttcttccttgagctaaggaggccagttgtaggaatgagcactagaaagcaagaatgtcaacagtgttagatggattttatatgattcattacttcaagagagaaaattcatattgtgtggttgatggaattccttacctttttaaaatcagattacacccatgctaatttggtggataaggcattgcagctcttgaaggaaagaatactgaaaggagacactctggcatatttcctacgaggtcaactatattttgaagagggatggtatgaagaagcattagaacagtttgaagaaatcaaggagaaagaccatcaagcaacttaccagctaggagtgatgtactatgatgggctggggaccactctagacgctgagaaaggggtggactatatgaagaaaattcttgattctccatgtcccaaagcaagacacttaaaatttgcagctgcttacaacctcggaagagcttattatgaaggaaaaggtgttaaacgatcaaatgaggaagctgaaaggtaatcctacctgagaacaagattaggtttgaaggaaatgctgaaaccgagaataacatgcctcactttctcttgtagactgtggcttatcgcagcagacaatggaaatcccaaagctagtgtgaaggctcaaagtatgctcgggctgtattactcaaccaaggagcccaaggagttagaaaaggcattttactggcattccgaagcatgtggcaatgggaatctggagtcccagggtgcacttgggctcatgtacttgtatggacaaggcatccggcaggatacggaagctgccctgcagtgcttaagagaagcagcagaacgcggaaacgtctatgctcaagggaatctcgtggagtattactataagatgaaattttttacaaagtgtgttgcattttccaaaaggtgaatgtctttgtctgttctgtgctgctgtaacagaatatcacacactaggtaatttatgagaaacagaaatttatttctcacagttccagaggccaggagagggctgcaacctccagaggggaggaccatcatgtcctcacgtgacagcagaaagctacaggaaacctcttttataaaaagggctttagtcctattcatgagggaggtgctctcatggcctcgtcgcctcttaagagccccacctcttgatacgatcacactagcaacactgggatttccaagggaacttactagtcaaaccatagcagtaatgtttgaataaactggatgaaagtattgataagaatgcctactacatgttctatgccaaatccttcacagagctttctgcagtattagaaatgatagctattgagcacttgaaatgtgtctaatgcaacttagcactaaacttttaaattttacttaatgtaaatattcatatggctggtggttaccatactggatagcacaattctatgccattagccttcaggatttcagtgctactagctgaagcaagttttttaagcagcaattgccttatctgtaagaagagaatacctttatagcaggattataatcatgtacttaacacagcttggcatgtcacacatttattacgtcttcatttcttcctgcactcctcggtcatgcagttctataactgcaccactgaaatacagcttcataacaactgtaacatgagaatatggttaaaagactgacactatatctaataaaatataaaagacgtctttt

SEQ ID NO: 415558 - DNA, 2834 bp, Homo sapiens
cggacgcgtggggcaatttattgtctaaaatagcatcatggaatgatataaaaatgcagctttccaatcacactaagggtctctctatttcttctcttgaccaccaatcaggaacctttgctggaagcttgtttctgattggtgaaagtaagccataacagtggaatgccaaggagtaaatacaaaagtgtagcaacaactgagtttgctgtctcactaccctcagcctaggccaacctggactccttcaccccaaatgaggtgaccgctacattttatatgaagacactgatttaccattcaactgtgatccatcttataacatggcaatccaatacagacaggaagataaaactcaacaacagctaaaataaagtgtattcccaggtaaaatagacaagtgctttaatttgaaatggattcgtccgatgagtgtcagttacaagggcagagaaggtaccagtgcagaagagctctgactgtgggcagtgtcaccaggtcccactaagtggcaacacttgtgctgggcgacttgacccatcttgatgtataaacccatagccagacaggacgtgcaaacaggtctcatggtgaatgcgatgctgtggaaaatgacatggagaatggctgtctctcagctagggaggagggtcttggtgtcctaggaaagaatgttcacgtcctggagttggtggttggtgttctatctaggcgatgagagaaggatgcttttcctaatgagcacctggtgggaatagagtctctctttgcacttcgctggaggaagaaatttctaccacttattttttcttcttgcttatagaatacacattgcagaaaaaggatgaagttgaccagtgaaaagttgcccaagaaccccttttatgcctctgtatctcagtatgctgctaaaaaccaaaaatttttccagtggaaaaaggaaaagactggtacaaatcctgatatttaagcttcccttggaaaacactttaacagttcattttgcatgctagagcaaacgagacaagaaataatgtgttttattgatttcaaggaagtggttaatcattagtccttttgagttttcccgcaagaatctgtgaaattgctcatttatctggtagcaaatcgtcagtgaggtctcacagatagttaggtcttgattttactctcaggacttaaggacatgcttctagaaaacagaaagcagatgtcacgtttgttaaagagaacaatgccaggcttgacttgcaattattatttaaataccttatcttccctaaagtcttaaaaatgttatattagggatgggttgctcatttggttagaggaactctcattaaggctcaaattaagaatttaactcacctctccagagagctttgcccattgaagacaaaccaatgcatagacttatacccagccctgcactgttagggctctacttggccatgagcagggttagtgtgaaaccaatcaacaagtattgtttgttgttgttgttgttgttttgagatggagtttcgctcttgttgcccaggcttgagtgcagtgatgcaatcttggctcaccgcagcctccgcctcctggggtcaggctgttctcctgcctgggtctcccgagtggctgggattataggcgtgcaccaccacgccctgctaattttgcatttttggtggagacggggtttctccatgttggtcaggctggtcttgaactcccggactcgggtgatccacccgcctcggcctcccagagtgctgagatttacaggcgtgagccaccgcgcccggccagtattgctttattacacaaggcacagtgttagggcctgtgaccatgacgttttttcaggtaatatttcttccttgagctaaggaggccagttgtaggaatgagcactagaaagcaagaatgtcaacagtgttagatggattttatatgattcattacttcaagagagaaaattcatattgtgtggttgatggaattccttacctttttaaaatcagattacacccatgctaatttggtggataaggcattgcagctcttgaaggaaagaatactgaaaggagacactctggcatatttcctacgaggtcaactatattttgaagagggatggtatgaagaagcattagaacagtttgaagaaatcaaggagaaagaccatcaagcaacttaccagctaggagtgatgtactatgatgggctggggaccactctagacgctgagaaaggggtggactatatgaagaaaattcttgattctccatgtcccaaagcaagacacttaaaatttgcagctgcttacaacctcggaagagcttattatgaaggaaaaggtgttaaacgatcaaatgaggaagctgaaaggtaatcctacctgagaacaagattaggtttgaaggaaatgctgaaaccgagaataacatgcctcactttctcttgtagactgtggcttatcgcagcagacaatggaaatcccaaagctagtgtgaaggctcaaagtatgctcgggctgtattactcaaccaaggagcccaaggagttagaaaaggtaacgttccctcttttttaatgctacggtattatgatgatagagttagcatactgctacgcaaccacttggcatccaactgcacaggacactctaatttttctcaaattcacgcgaggaccatagagaacaagacagggaatgatctgctgtggatcaggggagcccagaaatgggcagggtctagagaagtgagacacaacttcagctgcagtcctggagccacaaggagtactgtagaaattattgagacctgggttctactccgcgt

SEQ ID NO: 415559 - DNA, 4402 bp, Homo sapiens
  misc_feature (1557)..(1557): n is a, c, g, or t
  misc_feature (2154)..(2154): n is a, c, g, or t
  misc_feature (2587)..(2587): n is a, c, g, or t
  misc_feature (2590)..(2590): n is a, c, g, or t
  misc_feature (2638)..(2638): n is a, c, g, or t
tgccagagaagaaagcaagcaaggccgcttcctgcggctaagtggacaggcgactgcttgcagggatccgggggtgcgttgaccgaggcccctgtctccagcaaatgcttcagaccatccacctgcaggaagagaacagatccagcacccttcccacctttgtccagtcccgcgcccctccgggctggaaacctccccgcccttcacaaccagctctgaccaggcagcgcccagtggtccgtccccgcattaacgagaagacgaatctagaagcttgagcctgcaggacaaaagctcgggctctgtgagcccgaatctcacctcggggttgcaatccagcaacagcatttcccgcctaaggcagatgacaagagtccttggaagtgcagagaggtgagacactcgccgcaccccgacaggatggtatgaagaagcattagaacagtttgaagaaatcaaggagaaagaccatcaagcaacttaccagctaggagtgatgtactatgatgggctggggaccactctagacgctactgtggcttatcgcagcagacaatggaaatcccaaagctagtgtgaaggctcaaagtatgctcgggctgtattactcaaccaaggagcccaaggagttagaaaaggcattttactggcattccgaagcatgtggcaatgggaatctggagtcccagggtgcacttgggctcatgtacttgtatggacaaggcatccggcaggatacggaagctgccctgcagtgcttaagagaagcagcagaacgcggaaacgtctatgctcaagggaatctcgtggagtattactataagatgaaattttttacaaagtgtgttgcattttccaaaaggatcgctgactatgatgaggttcacgacatccccatgatcgcccaggtcacagactgtctcccggagttcatcggcagaggcatggcaatggcatccttctaccacgcaaggtgtcttcagcttggcttgggcatcaccagggatgaaacaaccgctaaacactattattctaaagcttgtcgtctgaatcccgcattggcagatgaacttcactccttacttattcgtcaaagaatttagaccacaatgtatttcaacaaagatcatcaatgctaacacctcacaatgtgtgtatttttacagtagctatgtttggttattttgcacatcacaaattacactatcctgggtattttacaggtgacatgttacttcgttcttgaattcgtacgctgttaagttttgcaacttgaaacctagacacaaggtcaaattgctggaagagtcctcagaggtccacctcttaccctacagactggccgagaccatatcaagtattaaaaccattctatacagcaagtatcgtttatcctttcttaaacaccgagtctccaaaaatacttagtttagctttagtttagtaagttcagaagtagaaacaaacttatttaaaaccatcatttgaaagtttaattctttaaatttgtctcttagttttgtgaattttgaataataatgtttaaattttgtttcngtcatttaaaatttaaattttcagtcatttaaaattttaaaaatttaaaatttcacaaaactaagggtaaaagacatttaaagaattaaacttaaataagtgtgtgcagcatttctacttctgaagttattaaagctaaaactgcactaagccttttgagacatcctttattcttaaaaagctcataaataattggcttattacatataaacttcaaaaaagtgggttataagacattgctttagaatcttgcccctccaaatcttccctcaaagatcttaatgagtaaaacaactgctacatacatatgcagaatgtgtaataaaacaaaaagcaattgctatatgaaaatattcgtaagaaaagtaaagcaaattgtttctttgtgcttcagctcattttccatatttttaaaaccctgtggtaaaagcctcaatgaaatcatttacaagaactacaattaaatattgttaaaattagcaaaaggctttccgtatatagatgacatctatgaaggcaaaaggtgacagtaaaaacagtaagatccatatgcataagattgtacaaggctattcatttgtgaaacaaatatacatntcgaagacaggtctcagagataccttaactattcctttttttataaacatattaaaggatgtggctttattttataaatcacaaccatcccaacagtggatttaaacaagatttctttttagtaatgggaaaatgcaattaatatggaggtgatagtcactaagaactgttgaatggcagaaaagtatttgctctcgttttatgttctggcttgtctgtattgcctgaacttcattttgtctttgtgtaagggaagaaatttcaacagactcgggtttgagatatcctcaaatggtcatgtatttctgtctcaaatctcttaataccacccatgtaacattccttcaaccacttgaagatccaaattcccaactagtattctcttctccacacttaatccagttcctaaagattattattattattattattnttntttttttttttttgagacggagtctcctgacctaatcttagcccggcncagtggctcacgtctgtaatcccagcactttgggaggctgaggcgggcagatcatgaggtcaggagtttgagaccaggctggccaacgtggtgaaaccccgtctctactaaaaatacaaaaattagccgggcgtgatggcggacgcctgtagtcccagctactcgggaggctgagacagaagaactgcttgaaaccaggaggcagaggttgcagtgagctgagatcgcgcaaattgcactccagcctcggtgacaagagcgagactccatctcaaaaaaaaataaaaagaatcttaaaataggaacataataaaagatcggccctaagtaaagagcactttttaaactgccattaaagatgggtttcagaaatcataaactttgacgtgtgccatacatggtaacatgctatgcttatatgtcttctataaatccaatgcagaatttaaaatttcagtttactctagttaccataaagctaatgctctggcacaagcgagtccctgcaaactaccactgctgaggacagtagtaaaccccttgacctgagactgcggtgagtctgtaactcgagtgcattgagacttccagatcattactcttacacacacacacacacacacatacacacacacacactccttctctaagattccttgtagctgatatctcatggaaaaatgacattttatcataaataaatatagagacaaaataatagtgatctttctcattcgcaatgtaaacttaacagctacagtttaaatgatagcatagaattatgcctaaaatagacatttcccataattgtattgtgataagttcttcaggcttgacaacttcacattgcctctcttccttgaatgtattttatctggtcttttctatatagtcttttgaaggataatttttatcaatagccaactttgggtatttttttaagtgtcaaatatcatcatggtttgaaaaaaggataaaaaagctataactaaaaaaatcttaaggataacatttggtttactaatttttaatcatttatctttcagaacttgtttcttatcaagaagttagcaggtatgatatgtatatcatacgtatataaactggcataggttacatcctagggcatgaggggagtatctttcagggattcaaatggaatttttacctgttacttgtttaattgttttgttttcaatattcttggggattagacaggggaaggtattttattactgcataatagatggtgaaacccaggaaaattaagtacttgtgcatggccccactatcaataacacaaagtctgtactctggatctcccctaatgtccctgtggtctaaacggcttgataatacaaccgagcccctgaagtagctgccctcctctttccgctcccccatctcggccctgcccatactccaagggtcagctcccatctctcctccctaatgcctcacttcaagcactaatttggctctttctgctcactaaaaatcatatattttacagatttattttgtttctggagaaggcagcaaacttttacttccctgcagaagtagttaagtacatagtgttttctctaaaaaggcatttgataaatatttgaacagcctgtagagtttcaacctctttgagatataagtatcttaaatatcatagagcactgtgattcatttttatattttattgctttgaatgctcaaactatgggaaatctttggtaaaaataaagacaataaaatcttcacaataacttt

SEQ ID NO: 415560 - DNA, 4545 bp, Homo sapiens
  misc_feature (1700)..(1700): n is a, c, g, or t
  misc_feature (2297)..(2297): n is a, c, g, or t
  misc_feature (2730)..(2730): n is a, c, g, or t
  misc_feature (2733)..(2733): n is a, c, g, or t
  misc_feature (2781)..(2781): n is a, c, g, or t
tgccagagaagaaagcaagcaaggccgcttcctgcggctaagtggacaggcgactgcttgcagggatccgggggtgcgttgaccgaggcccctgtctccagcaaatgcttcagaccatccacctgcaggaagagaacagatccagcacccttcccacctttgtccagtcccgcgcccctccgggctggaaacctccccgcccttcacaaccagctctgaccaggcagcgcccagtggtccgtccccgcattaacgagaagacgaatctagaagcttgagcctgcaggacaaaagctcgggctctgtgagcccgaatctcacctcggggttgcaatccagcaacagcatttcccgcctaaggcagatgacaagagtccttggaagtgcagagaggtgagacactcgccgcaccccgacaggatggtatgaagaagcattagaacagtttgaagaaatcaaggagaaagaccatcaagcaacttaccagctaggagtgatgtactatgatgggctggggaccactctagacgctgagaaaggggtggactatatgaagaaaattcttgattctccatgtcccaaagcaagacacttaaaatttgcagctgcttacaacctcggaagagcttattatgaaggaaaaggtgttaaacgatcaaatgaggaagctgaaagactgtggcttatcgcagcagacaatggaaatcccaaagctagtgtgaaggctcaaagtatgctcgggctgtattactcaaccaaggagcccaaggagttagaaaaggcattttactggcattccgaagcatgtggcaatgggaatctggagtcccagggtgcacttgggctcatgtacttgtatggacaaggcatccggcaggatacggaagctgccctgcagtgcttaagagaagcagcagaacgcggaaacgtctatgctcaagggaatctcgtggagtattactataagatgaaattttttacaaagtgtgttgcattttccaaaaggatcgctgactatgatgaggttcacgacatccccatgatcgcccaggtcacagactgtctcccggagttcatcggcagaggcatggcaatggcatccttctaccacgcaaggtgtcttcagcttggcttgggcatcaccagggatgaaacaaccgctaaacactattattctaaagcttgtcgtctgaatcccgcattggcagatgaacttcactccttacttattcgtcaaagaatttagaccacaatgtatttcaacaaagatcatcaatgctaacacctcacaatgtgtgtatttttacagtagctatgtttggttattttgcacatcacaaattacactatcctgggtattttacaggtgacatgttacttcgttcttgaattcgtacgctgttaagttttgcaacttgaaacctagacacaaggtcaaattgctggaagagtcctcagaggtccacctcttaccctacagactggccgagaccatatcaagtattaaaaccattctatacagcaagtatcgtttatcctttcttaaacaccgagtctccaaaaatacttagtttagctttagtttagtaagttcagaagtagaaacaaacttatttaaaaccatcatttgaaagtttaattctttaaatttgtctcttagttttgtgaattttgaataataatgtttaaattttgtttcngtcatttaaaatttaaattttcagtcatttaaaattttaaaaatttaaaatttcacaaaactaagggtaaaagacatttaaagaattaaacttaaataagtgtgtgcagcatttctacttctgaagttattaaagctaaaactgcactaagccttttgagacatcctttattcttaaaaagctcataaataattggcttattacatataaacttcaaaaaagtgggttataagacattgctttagaatcttgcccctccaaatcttccctcaaagatcttaatgagtaaaacaactgctacatacatatgcagaatgtgtaataaaacaaaaagcaattgctatatgaaaatattcgtaagaaaagtaaagcaaattgtttctttgtgcttcagctcattttccatatttttaaaaccctgtggtaaaagcctcaatgaaatcatttacaagaactacaattaaatattgttaaaattagcaaaaggctttccgtatatagatgacatctatgaaggcaaaaggtgacagtaaaaacagtaagatccatatgcataagattgtacaaggctattcatttgtgaaacaaatatacatntcgaagacaggtctcagagataccttaactattcctttttttataaacatattaaaggatgtggctttattttataaatcacaaccatcccaacagtggatttaaacaagatttctttttagtaatgggaaaatgcaattaatatggaggtgatagtcactaagaactgttgaatggcagaaaagtatttgctctcgttttatgttctggcttgtctgtattgcctgaacttcattttgtctttgtgtaagggaagaaatttcaacagactcgggtttgagatatcctcaaatggtcatgtatttctgtctcaaatctcttaataccacccatgtaacattccttcaaccacttgaagatccaaattcccaactagtattctcttctccacacttaatccagttcctaaagattattattattattattattnttntttttttttttttgagacggagtctcctgacctaatcttagcccggcncagtggctcacgtctgtaatcccagcactttgggaggctgaggcgggcagatcatgaggtcaggagtttgagaccaggctggccaacgtggtgaaaccccgtctctactaaaaatacaaaaattagccgggcgtgatggcggacgcctgtagtcccagctactcgggaggctgagacagaagaactgcttgaaaccaggaggcagaggttgcagtgagctgagatcgcgcaaattgcactccagcctcggtgacaagagcgagactccatctcaaaaaaaaataaaaagaatcttaaaataggaacataataaaagatcggccctaagtaaagagcactttttaaactgccattaaagatgggtttcagaaatcataaactttgacgtgtgccatacatggtaacatgctatgcttatatgtcttctataaatccaatgcagaatttaaaatttcagtttactctagttaccataaagctaatgctctggcacaagcgagtccctgcaaactaccactgctgaggacagtagtaaaccccttgacctgagactgcggtgagtctgtaactcgagtgcattgagacttccagatcattactcttacacacacacacacacacacatacacacacacacactccttctctaagattccttgtagctgatatctcatggaaaaatgacattttatcataaataaatatagagacaaaataatagtgatctttctcattcgcaatgtaaacttaacagctacagtttaaatgatagcatagaattatgcctaaaatagacatttcccataattgtattgtgataagttcttcaggcttgacaacttcacattgcctctcttccttgaatgtattttatctggtcttttctatatagtcttttgaaggataatttttatcaatagccaactttgggtatttttttaagtgtcaaatatcatcatggtttgaaaaaaggataaaaaagctataactaaaaaaatcttaaggataacatttggtttactaatttttaatcatttatctttcagaacttgtttcttatcaagaagttagcaggtatgatatgtatatcatacgtatataaactggcataggttacatcctagggcatgaggggagtatctttcagggattcaaatggaatttttacctgttacttgtttaattgttttgttttcaatattcttggggattagacaggggaaggtattttattactgcataatagatggtgaaacccaggaaaattaagtacttgtgcatggccccactatcaataacacaaagtctgtactctggatctcccctaatgtccctgtggtctaaacggcttgataatacaaccgagcccctgaagtagctgccctcctctttccgctcccccatctcggccctgcccatactccaagggtcagctcccatctctcctccctaatgcctcacttcaagcactaatttggctctttctgctcactaaaaatcatatattttacagatttattttgtttctggagaaggcagcaaacttttacttccctgcagaagtagttaagtacatagtgttttctctaaaaaggcatttgataaatatttgaacagcctgtagagtttcaacctctttgagatataagtatcttaaatatcatagagcactgtgattcatttttatattttattgctttgaatgctcaaactatgggaaatctttggtaaaaataaagacaataaaatcttcacaataacttt

SEQ ID NO: 415561 - DNA, 483 bp, Homo sapiens
cgggagctcgaactctcccttagcatcagtggtttcccctcctctgctgtgcctcacgcctttcagacactgagttcctatttggcatcttcctgatccttactctgaagatccccaaatcctgaaacctaggacagctggtcttcctctgccataagctgcctggactgtgatctcacctgcactgtggacagacagcggaggaactcgcctccacactgtgttaggcatgtgtgctagtgtgaaatgcgtccaaaggcctaccgctctttcctagagatgattaatagtgctatctaggaaacacagagttcttttctgtctagtattcccttataatttcatctagtggatcacaaatacaatgatgaaactgtgcttttcttaggcattttactggcattccgaagcatgtggcaatgggaatctggagtcccagggtgcacttgggctcatgtacttgtatggacaaggcatccggca

SEQ ID NO: 415562 - DNA, 2209 bp, Homo sapiens
gtcttgaggaccatctctcccggcagcataccgtgtggcttcacactgctctgcctctctgaacctcggtttcttcatctataaaatgggaataagagtaagccacctcaatggactgtgggaggcttaagtaaattgaagtgccatgcaagtagctagcatgcagttgcagctcaatgaatattatgatggccgcagatacgatggctacagctggggcacccatttcgggtcacaaggtagggttcaatgttgaagatggcagagccaattgcatccctgatgatcgtggagtgccgggcctgcctgagatgctcacctctcttcctttaccagagagagaaagacagaatgaccgagaacatgaaggagtgcttggcccagaccaatgcagccgtgggggatatggtgacggtggtgaatccgagaccaggagtatggccagccctgctctaggagaccggactcctcggccatggaagttgagcccaagaaactgaaagggaagcgcgacctcatcgtgcccaaaagcttccagcaagtggacttctggttctgtgagtcctgccaggagtacttcgtggatgaatgcccaaaccatggccccccggtgtttgtgtctgacacaccggtgcccgtgggcatcccagaccgggcggcgctcaccatcccacagggcatggaggtggtcaaggacactagtggagagagtgacgtgcgatgtgtaaacgaggtcatccccaagggccacatcttcggcccctatgaggggcagatctccacccaggacaaatcagctggcttcttctcctggctgattgtggacaagaacaaccgctataagtccatagatggctcagacgagaccaaagccaactggatgaggtacgtggtcatctcccgggaggagagggagcagaacctgctggcgttccagcacagtgagcgcatctacttccgggcgtgcagggacatccggcctggggagtggctgcgggtctggtacagcgaggactacatgaagcgcctgcacagcatgtcccaggaaaccattcaccgcaacctggccagaggagagaagaggttgcagagggagaagtctgagcaggttctggataacccagaagacctgaggggtcccattcatctctctgtgctgagacagggcaaaagtccctacaagcgtggcttcgatgagggggatgtacacccccaagctaagaagaagaaaattgacctgattttcaaggatgttctggaggcctcactggaatctgcgaaggtggaagcccaccagttggccctgagcacctcactggtcatcaggaaagtccccaaataccaggatgacgcctacagtcagtgtgcaacaacaatgacccatggtgtgcagaatataggccagacccagggggagggggactggaaggtcccccagggggtctccaaggagccaggccaattggaggatgaagaagaggagccttcatcattcaaggccgacagtcctgccgaggcctcccttgcatctgaccctcatgaacttcccaccacctctttttgccctaactgtattcgcctaaagaagaaggttcgggagctccaggcagaattagacatgcttaagtctgggaaacttcctgagccccccgtattgccaccacaggtactggagctcccagagttctcggaccctgcaggtaagttggtttggatgagattattgtcggagggcagagtacgcagtgggctgtgtggagggtagcctaaagctctctgtggaaaccaccttccgggagacctgaggagtgtaacgtggaggcggctacctccgtgggtgggagcccaggtcctcagtgtctctggcagacccatcggcagctctgccaggtgctccatgtgttgcccttgtatcctccttgtcaataaaggaagttccgctgcagaaggggtgtgtgctgtgttcttgacccgttgcctttctctggtactggtgtcttaccccaaagcccaatttctaaacccagtctttctctgtccccagtctcaagcagggtgtcccactggagagatctcttggcttccctaacttagtccaggaacacagccttgttcttctcttcctgaatctctgtcctgccacacatggtcccagttccctagcctggagttctagaaggatggagagtgaggggatccaggccattca

SEQ ID NO: 415563 - DNA, 2229 bp, Homo sapiens
gtcttgaggaccatctctcccggcagcataccgtgtggcttcacactgctctgcctctctgaacctcggtttcttcatctataaaatgggaataagagtaagccacctcaatggactgtgggaggcttaagtaaattgaagtgccatgcaagtagctagcatgcagttgcagctcaatgaatattatgatggccgcagatacgatggctacagctggggcacccatttcgggtcacaaggtagggttcaatgttgaagatggcagagccaattgcatccctgatgatcgtggagtgccgggcctgcctgagatgctcacctctcttcctttaccagagagagaaagacagaatgaccgagaacatgaaggagtgcttggcccagaccaatgcagccgtgggggatatggtgacggtggtgaagacggaggtctgctcaccactccgagaccaggagtatggccagccctgctctaggagaccggactcctcggccatggaagttgagcccaagaaactgaaagggaagcgcgacctcatcgtgcccaaaagcttccagcaagtggacttctggttctgtgagtcctgccaggagtacttcgtggatgaatgcccaaaccatggccccccggtgtttgtgtctgacacaccggtgcccgtgggcatcccagaccgggcggcgctcaccatcccacagggcatggaggtggtcaaggacactagtggagagagtgacgtgcgatgtgtaaacgaggtcatccccaagggccacatcttcggcccctatgaggggcagatctccacccaggacaaatcagctggcttcttctcctggctgattgtggacaagaacaaccgctataagtccatagatggctcagacgagaccaaagccaactggatgaggtacgtggtcatctcccgggaggagagggagcagaacctgctggcgttccagcacagtgagcgcatctacttccgggcgtgcagggacatccggcctggggagtggctgcgggtctggtacagcgaggactacatgaagcgcctgcacagcatgtcccaggaaaccattcaccgcaacctggccagaggagagaagaggttgcagagggagaagtctgagcaggttctggataacccagaagacctgaggggtcccattcatctctctgtgctgagacagggcaaaagtccctacaagcgtggcttcgatgagggggatgtacacccccaagctaagaagaagaaaattgacctgattttcaaggatgttctggaggcctcactggaatctgcgaaggtggaagcccaccagttggccctgagcacctcactggtcatcaggaaagtccccaaataccaggatgacgcctacagtcagtgtgcaacaacaatgacccatggtgtgcagaatataggccagacccagggggagggggactggaaggtcccccagggggtctccaaggagccaggccaattggaggatgaagaagaggagccttcatcattcaaggccgacagtcctgccgaggcctcccttgcatctgaccctcatgaacttcccaccacctctttttgccctaactgtattcgcctaaagaagaaggttcgggagctccaggcagaattagacatgcttaagtctgggaaacttcctgagccccccgtattgccaccacaggtactggagctcccagagttctcggaccctgcaggtaagttggtttggatgagattattgtcggagggcagagtacgcagtgggctgtgtggagggtagcctaaagctctctgtggaaaccaccttccgggagacctgaggagtgtaacgtggaggcggctacctccgtgggtgggagcccaggtcctcagtgtctctggcagacccatcggcagctctgccaggtgctccatgtgttgcccttgtatcctccttgtcaataaaggaagttccgctgcagaaggggtgtgtgctgtgttcttgacccgttgcctttctctggtactggtgtcttaccccaaagcccaatttctaaacccagtctttctctgtccccagtctcaagcagggtgtcccactggagagatctcttggcttccctaacttagtccaggaacacagccttgttcttctcttcctgaatctctgtcctgccacacatggtcccagttccctagcctggagttctagaaggatggagagtgaggggatccaggccattca

SEQ ID NO: 415564 - DNA, 1176 bp, Homo sapiens
gtcttgaggaccatctctcccggcagcataccgtgtggcttcacactgctctgcctctctgaacctcggtttcttcatctataaaatgggaataagagtaagccacctcaatggactgtgggaggcttaagtaaattgaagtgccatgcaagtagctagcatgcagttgcagctcaatgaatattatgatggccgcagatacgatggctacagctggggcacccatttcgggtcacaaggtagggttcaatgttgaagatggcagagccaattgcatccctgatgatcgtggagtgccgggcctgcctgagatgctcacctctcttcctttaccagagagagaaagacagaatgaccgagaacatgaaggagtgcttggcccagaccaatgcagccgtgggggatatggtgacggtggtgaagacggaggtctgctcaccactccgagaccaggagtatggccagccctgctctaggagaccggactcctcggccatggaagttgagcccaagaaactgaaagggaagcgcgacctcatcgtgcccaaaagcttccagcaagtggacttctggttctgtgagtcctgccaggagtacttcgtggatgaatgcccaaaccatggccccccggtgtttgtgtctgacacaccggtgcccgtgggcatcccagaccgggcggcgctcaccatcccacagggcatggaggtggtcaaggacactagtggagagagtgacgtgcgatgtgtaaacgaggtcatccccaagggccacatcttcggcccctatgaggggcagatctccacccaggacaaatcagctggcttcttctcctggctgattgtggacaagaacaaccgctataagtccatagatggctcagacgagaccaaagccaactggatgaggaatgtggcacacctggctgagcgtaagaggaagcccaagttctccaaggaggagctggacattcttgtcacagaggtgacccaccatgaagcagtgctctttgggagggagaccatgcggctgtcccatgctgacagggacaagatttgggaaggcatagcccggaaaatcacctccgtcagccaggtgccccgctccgtcaaggacattaagcacagatgggatgacctgaaacggaggaccaaggacaagctggccttcatgcagcag

SEQ ID NO: 415565 - DNA, 569 bp, Homo sapiens
cagagtttcaccatgttggccaggttggtctcaaactcctgacttcgtgatccacccaccttggcctcccaaagcactgggattacaggcatgagccaccattcccagccaataaaactttatttacaagaacagctggtgggccagatttggcccaagggtcatagtttattatcccttgagctaggctgctgcctgaggttgattcaacatcccagctccagtcaacaacaaaaattctaagtctcccgcctaatgctgctgtggtgtgtcatgccaaaaaagtgggctactcaggttagaccaatgacttcagaaccacagggctcagaacaggaaggagcttctttctgcagagctgattcctggaaagccaccagcactccaccttctgcccagaaatgtgattcagtcaatagctgatgaggaaaagcaacctgcaaacattaggaagaaggagaaaaataattcagaggtgatgataccacctccaatgaacagggaagcaagttcatcagtaacaaaagtcagtgaggcaaaaaaaaaagaaacaaaaaaaaaaaaaaagg

SEQ ID NO: 415566 - DNA, 1290 bp, Homo sapiens
gttttatttcttgtttttattttcaacttttcaaatagaattaccaattttgaagtcctcattttcatattaaggatcatttgcattctcttaatataatcagaaagctgattcagtgtttaattagatttaaatgttgatcaagaattaactgtaacttactagcactgaaaatacatgtttggtgtttcgcctgcgttcagctcatggttggaaatttgaagcagtgcttttcaaattaaacttttgctgacatcataggatgctaaaaaacaaggacaatcaactatgttttaaaactgcaacatttgatttgaacttaaaatgaatagagccacattattttaatggatgttttgttttacttgtgaactgattgagtcttaaggatagtttatgaattgatcacttgttgctcagaatcattagtataagtaggtaggaaatagtttgaagtcatttttcatagacttaactgtccaatgttgcaaatgtttcttcatgaaaatattgaaaagagtaaggtttttttttttttaattctgctgcacatattctgatgccatgtgtctgtgcttaattaactaagaccctataaaacgtgtttagtggggactgtttgatatagttgccctctccattcctctatttgcctgatttttttcagtttccctttctgtattttactactaaattagaaagcactggttatgtaataagttactacattgctttggttgagtaaaaacaagagtttatatttttcttgtttcttattttcttaacccttaactcctgctgaggtcataacaacctcagtctaagctctgtgtccatcatactgttaacttaaacaaatgggtggtgggggtgggaagggtaatacagtcctgccattgcctaccagtaggagagtccaaacagaacactcttttgagtagcaattatttaatttgcccagtcaaggcaccgtgtttatatactatttcacattgaatttgattatgccctacagacctggctggtcaaggatttgatatacacatattggcttgggattcgagctttcttttttatttaaataaaaatttatatatatattatatatatacatatatacatagctatatctgtatatatattgggtatgttttaaggattttttcgcatgagcgcagctgttgcgataaattgaccgattgggaggtggtagaagcactgaatgaaggtgaggctttttttttttccagttttcttatacatttgtcttctttttttaaaaaaaaaaaa

SEQ ID NO: 415567 - DNA, 758 bp, Homo sapiens
gttttatttcttgtttttattttcaacttttcaaatagaattaccaattttgaagtcctcattttcatattaaggatcatttgcattctcttaatataatcagaaagctgattcagtgtttaattagatttaaatgttgatcaagaattaactgtaacttactagcactgaaaatacatgtttggtgtttcgcctgcgttcagctcatggttggaaatttgaagcagtgcttttcaaattaaacttttgctgacatcataggatgctaaaaaacaaggacaatcaactatgttttaaaactgcaacatttgatttgaacttaaaatgaatagagccacattattttaatggatgttttgttttacttgtgaactgattgagtcttaaggatagtttatgaattgatcacttgttgctcagaatcattagtataagtaggtaggaaatagtttgaagtcatttttcatagacttaactgtccaatgttgcaaatgtttcttcatgaaaatattgaaaagagtaaggtttttttttttttaattctgctgcacatattctgatgccatgtgtctgtgcttaattaactaagaccctataaaacgtgtttagtggggactgtttgatatagttgccctctccattcctctatttgcctgatttttttcagtttccctttctgtattttactactaaattagaaagcactggttatgtaataagttactacattgctttggttgagtaaaaacaagagttta

SEQ ID NO: 415568 - DNA, 280 bp, Homo sapiens
tgtttcttttctgttcaccaaatgtcttgtttattacagcctatagatcacttagatttagatccctaaaatttgctgtcactctgtaaagtgcacatagtatctgcgtatttatttttacaattttctttacaaaaattctaagaaagcttagactgcaacttttcataatatataaacaaaattccaaaatagcacagatttgactttctcatttaattatgaacagtttgggaaatgtttctcaattctgaatgcatattagaactacctgagaagc

SEQ ID NO: 415569 - DNA, 815 bp, Homo sapiens
ccagtctcactaccgttttagtcctgcagctgggtaaagccactattgtgtggaaactctcccatgtgccctgtctctacctctggacacaccagctccttcttccacctattctattcctcagttaagccaagtgatcagaagtagtattaaatgggtagataattttaacaggatgcctaatgtgaaataaggagttatttttactcttctactatagaaagcctaaggtaattcttaccatctcaaagactgagtattccatttaggtttggagaccacttgtgctgtgctgcctgatatttaccaaacttgaataagtgttcgtcaacttgatagtgaatgtaccccttctcaccttatattttgattaaatcaattaactataggtcatctaccaagaatgtaatccaagcggttgataaaacattattaggcagatagattattgattattaaattttgagcagtgcaaaaacggtatagctgcttggagttcagattcagtccctcaaagagtttatgatcactgaaatacactctgaaggtattctgaagaagttaaaaaattttagaaaacgaaatgttctgtatacaaagacaatacagtcactacgaactgcagaaagtataggaaagcagtaattgatgtagagtttagacagtcttggatcttttttagagcactaaccatggatttagactcaaaatagctgctacataatagagccctttaataatttaaaccccccttgttgaaatacaagttggactcccagtgtcaaactctagactgtagctaatgtattaaaggg

SEQ ID NO: 415570 - DNA, 1078 bp, Homo sapiens
tcgtgttctgcactttttaatataaagagtgatgttgtatttcgtgttctgcgtgctggattggttgtctcctcccagccctgagcgaggggggcgggccctctagcgggggcgcccagggagggcggaaggcggctctgcggcaggaagccccaccccggaagtcggctggccatggcggcgccttggaggcgatggcccacggggctgctagccgtgctgcggcccctgctcacctgccggcccctgcaaggcacgacgctgcaacgggatgtgctgctctttgagcatgatcggggccgcttcttcaccatcctcgggctgttctgcgcgggccagggcgtcttctgggcttccatggctgtggcagccgtgtcccggcccccggttccggtgcagcctctggatgcggaggtcccaaatcgtggccccttcgacctgcgctccgcgctctggcgctacggtctggccgtcggctgcggcgccatcggagccctcgtactcggtgctggtcttctcttctctctccggtctgtgcgctcagtggtgcttcgagctggagggcagcaggtgaccctcaccactcatgccccctttggcttgggggcccatttcacagttcctttgaagcaggtatcttgcatggcccaccggggtgaagtccctgccatgctacctctgaaagtcaaaggccgacgcttctatttcctcttggacaaaactggacacttccctaacacaaaactctttgacaatactgtgggtgcctaccggagcttgtgaagaaatgacctcaagtcactcacctctccaagaggaggataaaaactgaaccttggggagccaggtgtgttggttcacacctgttgtaatcccagcactttgggagggtgaggcaggagcactgctcgagcccaggctgggcaacatagcgagaccttgtctctatttacaaaaaaaaaacaaaaaaaaacgccaatcttagaatggagtaacaaccagggtcacacaaggaggtcaagattcattaacaacaaataaaggagcagtcatccctagggcagctgcctaacagtaa

SEQ ID NO: 415571 - DNA, 449 bp, Homo sapiens
tgtaaatagagacaaggtctcgctatgttgtccagctgccatgctacctctgaaagtcaaaggccgacgcttctatttcctcttggacaaaactggacacttccctaacacaaaactctttgacaatactgtgggtgcctaccggagcttgtgaagaaatgacctcaagtcactcacctctccaagaggaggataaaaactgaaccttggggagccaggtgtgttggttcacacctgttgtaatcccagcactttgggagggtgaggcaggagcactgctcgagcccaggctgggcaacatagcgagaccttgtctctatttacaaaaaaaaaacaaaaaaaaacgccaatcttagaatggagtaacaaccagggtcacacaaggaggtcaagattcattaacaacaaataaaggagcagtcatccctagggcagctgcctaacagtaa

SEQ ID NO: 415572 - DNA, 807 bp, Homo sapiens
aaataggctagtagaggccgggtgttaatcggacgaggtacatcctcgggctgttctgcgcgggccagggcgtcttctgggcttccatggctgtggcagccgtgtcccggcccccggttccggtgcagcctctggatgcggaggtcccaaatcgtggccccttcgacctgcgctccgcgctctggcgctacggtctggccgtcggctgcggcgccatcggagccctcgtactcggtgctggtcttctcttctctctccggtctgtgcgctcagtggtgcttcgagctggagggcagcaggtgaccctcaccactcatgccccctttggcttgggggcccatttcacagttcctttgaagcaggtatcttgcatggcccaccggggtgaagtccctgccatgctacctctgaaagtcaaaggccgacgcttctatttcctcttggacaaaactggacacttccctaacacaaaactctttgacaatactgtgggtgcctaccggagcttgtgaagaaatgacctcaagtcactcacctctccaagaggaggataaaaactgaaccttggggagccaggtgtgttggttcacacctgttgtaatcccagcactttgggagggtgaggcaggagcactgctcgagcccaggctgggcaacatagcgagaccttgtctctatttacaaaaaaaaaacaaaaaaaaacgccaatcttagaatggagtaacaaccagggtcacacaaggaggtcaagattcattaacaacaaataaaggagcagtcatccctagggcagctgcctaacagtaa

SEQ ID NO: 415573 - DNA, 546 bp, Homo sapiens
tgtaaatagagacaaggtctcgctatgttgtccagcaggtgaccctcaccactcatgccccctttggcttgggggcccatttcacagttcctttgaagcaggtatcttgcatggcccaccggggtgaagtccctgccatgctacctctgaaagtcaaaggccgacgcttctatttcctcttggacaaaactggacacttccctaacacaaaactctttgacaatactgtgggtgcctaccggagcttgtgaagaaatgacctcaagtcactcacctctccaagaggaggataaaaactgaaccttggggagccaggtgtgttggttcacacctgttgtaatcccagcactttgggagggtgaggcaggagcactgctcgagcccaggctgggcaacatagcgagaccttgtctctatttacaaaaaaaaaacaaaaaaaaacgccaatcttagaatggagtaacaaccagggtcacacaaggaggtcaagattcattaacaacaaataaaggagcagtcatccctagggcagctgcctaacagtaa

SEQ ID NO: 415574 - DNA, 673 bp, Homo sapiens
  misc_feature (46)..(46): n is a, c, g, or t
catgattccgattttaatggacctcattatagggaattttggcctncaggaccaagaattcggcacgaggtgtaaaataggcacactagtgcctactttataggcattaaatgaacccatgtttattaaccagattacctggctggggtaaacgatgtaaattattggcttctacctttacgtcagcgttttctccatctctcattttgtcatttaacacactgtgctacaatcatgtggcagcttgatcatctccactacactatgctttatttctcgacaaagctcagcacaaatggcttctgatttaacggatggacgcaggttctgcactgacttctgtttcggaaccacagtaaggctgtgcagcaggagccacgaaacccgactccacctagtgctttaagacgctactgacccgtccctttggcgaggggacaacttcgaagtatgacctggccaggaggagccacaaagcgcgattagcctcgctgcatttcaggtacaggccggcgccagccgtgcctcaccaggtccaccggctccgagcagcagcaagcccggtcggaaagcgaaagtggcctcgccatgtccagaccggccagctcccccgcctacctgaccccgccccgcagccgcacctgggtccgagtcatcgccgcggccgccacgg

SEQ ID NO: 415575 - DNA, 920 bp, Homo sapiens
tcgtgttctgcactttttaatataaagagtgatgttgtatttcgtgttctgcgtgctggattggttgtctcctcccagccctgagcgaggggggcgggccctctagcgggggcgcccagggagggcggaaggcggctctgcggcaggaagccccaccccggaagtcggctggccatggcggcgccttggaggcgatggcccacggggctgctagccgtgctgcggcccctgctcacctgccggcccctgcaaggcacgacgctgcaacgggatgtgctgctctttgagcatgatcggggccgcttcttcaccatcctcgggctgttctgcgcgggccagggcgtcttctgggcttccatggctgtggcagccgtgtcccggcccccggttccggtgcagcctctggatgcggaggtcccaaatcgtggccccttcgacctgcgctccgcgctctggcgctacggtctggccgtcggctgcggcgccatcgcttgatcatctccactacactatgctttatttctcgacaaagctcagcacaaatggcttctgatttaacggatggacgcaggttctgcactgacttctgtttcggaaccacagtaaggctgtgcagcaggagccacgaaacccgactccacctagtgctttaagacgctactgacccgtccctttggcgaggggacaacttcgaagtatgacctggccaggaggagccacaaagcgcgattagcctcgctgcatttcaggtacaggccggcgccagccgtgcctcaccaggtccaccggctccgagcagcagcaagcccggtcggaaagcgaaagtggcctcgccatgtccagaccggccagctcccccgcctacctgaccccgccccgcagccgcacctgggtccgagtcatcgccgcggccgccacgg

SEQ ID NO: 415576 - DNA, 472 bp, Homo sapiens
gcggccgcctactactactactactgctcgaattcaagcttctaacgatgtacggggactgccatgctacctctgaaagtcaaaggccgacgcttctatttcctcttggacaaaactggacacttccctaacacaaaactctttgacaatactgtgggtgcctaccggagcttgtgaagaaatgacctcaagtcactcacctctccaagaggaggataaaaactgaaccttggggagccaggtgtgttggttcacacctgttgtaatcccagcactttgggagggtgaggcaggagcactgctcgagcccaggctgggcaacatagcgagaccttgtctctatttacaaaaaaaaaacaaaaaaaaacgccaatcttagaatggagtaacaaccagggtcacacaaggaggtcaagattcattaacaacaaataaaggagcagtcatccctagggcagctgcctaacagtaa

SEQ ID NO: 415577 - DNA, 1035 bp, Homo sapiens
tcgtgttctgcactttttaatataaagagtgatgttgtatttcgtgttctgcgtgctggattggttgtctcctcccagccctgagcgaggggggcgggccctctagcgggggcgcccagggagggcggaaggcggctctgcggcaggaagccccaccccggaagtcggctggccatggcggcgccttggaggcgatggcccacggggctgctagccgtgctgcggcccctgctcacctgccggcccctgcaaggcacgacgctgcaacgggatgtgctgctctttgagcatgatcggggccgcttcttcaccatcctcgggctgttctgcgcgggccagggcgtcttctgggcttccatggctgtggcagccgtgtcccggcccccggttccggtgcagcctctggatgcggaggtcccaaatcgtggccccttcgacctgcgctccgcgctctggcgctacggtctggccgtcggctgcggcgccatcgggtatagcacaataagaaaccgacaaaaacagcagctgatgactcactccaacaacgcacagcaccagaaggcaaggaaatcaaacctcagaggctaaatgttccatgacttctccaagatcatgaagtaagcactgagtaagtagggagggggagcaaggactcaaccccttgctcctaatctttactctataccgcattcaggagccgccagctgtatggggaacaaggcctggatcccaccccaaagacatggattggagacccaccccttggtgaccctagacccgccaatagatcgttgtgaagctgcagtttccctatctgtaaaatgggagcatttagtccaccagcgcgaaaggcacggagggagtttccctattatatgaccgtacacgaaatctagactgtgaccaaagtctcccgctcctcagcctcctctcctccgcatcctcagccactagtcacgctggagaggaggcgtgggaactgacctccgcgggccgggcctcggcaacgcgcatcctcccacccggcctagccca

SEQ ID NO: 415578 - DNA, 362 bp, Homo sapiens
ttccttcgtcgcccacgcgtccgcaaaactctttgacaatactgtgggtgcctaccggagcttgtgaagaaatgacctcaagtcactcacctctccaagaggaggataaaaactgaaccttggggagccaggtgtgttggttcacacctgttgtaatcccagcactttgggagggtgaggcaggagcactgctcgagcccaggctgggcaacatagcgagaccttgtctctatttacaaaaaaaaaacaaaaaaaaacgccaatcttagaatggagtaacaaccagggtcacacaaggaggtcaagattcattaacaacaaataaaggagcagtcatccctagggcagctgcctaacagtaa

SEQ ID NO: 415579 - DNA, 880 bp, Homo sapiens
tgctggagtgcagtggcgccatctcggctcactgcacgctctgccttctgggttcatgccattctcctgcctcagcctcctgagtagctgggactacaggcacccgccaccatgcctggctaattgtttgtatttttagtagagacagggtttcaccgtgttggccaggatggtcttgatctcctgacctcgtgatccgcctgccacggcctcccaaagtgctgggattacaggcgtgagtcaccgcgcccggcggatctctgaggttttctcatggtgtaaaataggcacactagtgcctactttataggcattaaatgaacccatgtttattaaccagattacctggctggggtaaacgatgtaaattattggcttctacctttacgtcagcgttttctccatctctcattttgtcatttaacacactgtgctacaatcatgtggcagcttgatcatctccactacactatgctttatttctcgacaaagctcagcacaaatggcttctgatttaacggatggacgcaggttctgcactgacttctgtttcggaaccacagtaaggctgtgcagcaggagccacgaaacccgactccacctagtgctttaagacgctactgacccgtccctttggcgaggggacaacttcgaagtatgacctggccaggaggagccacaaagcgcgattagcctcgctgcatttcaggtacaggccggcgccagccgtgcctcaccaggtccaccggctccgagcagcagcaagcccggtcggaaagcgaaagtggcctcgccatgtccagaccggccagctcccccgcctacctgaccccgccccgcagccgcacctgggtccgagtcatcgccgcggccgccacgg

SEQ ID NO: 415580 - DNA, 273 bp, Homo sapiens
actcctgacctcaagtgatccgcctgcctcagcctcccaaagtgctgggattacaggcgtgagtcaccgcgcccggcggatctctgaggttttctcatggtgtaaaataggcacactagtgcctactttataggcattaaatgaacccatgtttattaaccagattacctggctggggtaaacgatgtaaattattggcttctacctttacgtcagcgttttctccatctctcattttgtcatttaacacactgtgctacaatcatgtggcag

SEQ ID NO: 415581 - DNA, 467 bp, Homo sapiens
ctttcatcccacaaatttcttattcagagggcactggaaaggtcggtacttagatgcccagtgaaaacccctcaccccaatctctgccctgcctgcaggagccctcgtactcggtgctggtcttctcttctctctccggtctgtgcgctcagtggtgcttcgagctggagggcagcaggtgaccctcaccactcatgccccctttggcttgggggcccatttcacagttcctttgaagcaggtatcttgcatggcccaccggggtgaagtccctgccatgctacctctgaaagtcaaaggccgacgcttctatttcctcttggacaaaactggacacttccctaacacaaaactctttgacaatactgtgggtgcctaccggagcttgtgaagaaatgacctcaagtcactcacctctccaagaggaggataaaaactgaaccttggggagccaggtgtgttggttc

SEQ ID NO: 415582 - DNA, 1559 bp, Homo sapiens
atggggaaggctgcgccaggcgggccggaagcctggcggtggcgtgcaggagccccgccctcctgggctggattcagccgggggcggggccgcgggcggggcctgtggcagcgggaatcccgaccccgcccctttccccacccctccatttctcgccatggcccctgcactgctcctgatccctgctgccctcgcctctttcatcctggcctttggcaccggagtggagttcgtgcgctttacctcccttcggccacttcttggagggatcccggagtctggtggtccggatgcccgccagggatggctggctgccctgcaggaccgcagcatccttgcccccctggcatgggatctggggctcctgcttctatttgttgggcagcacagcctcatggcagctgaaagagtgaaggcatggacatcccggtactttggggtccttcagaggtcactgtatgtggcctgcactgccctggccttgcagctggtgatgcggtactgggagcccatacccaaaggccctgtgttgtgggaggctcgggctgagccatgggccacctgggtgccgctcctctgctttgtgctccatgtcatctcctggctcctcatctttagcatccttctcgtctttgactatgctgagctcatgggcctcaaacaggtatactaccatgtgctggggctgggcgagcctctggccctgaagtctccccgggctctcagactcttctcccacctgcgccacccagtgtgtgtggagctgctgacagtgctgtgggtggtgcctaccctgggcacggaccgtctcctccttgctttcctccttaccctctacctgggcctggctcacgggcttgatcagcaagacctccgctacctccgggcccagctacaaagaaaactccacctgctctctcggccccaggatggggaggcagagtgaggagctcactctggttacaagccctgttcttcctctcccactgaattctaaatccttaacatccaggccctggctgcttcatgccagaggcccaaatccatggactgaaggagatgccccttctactacttgagactttattctctgggtccagctccataccctaaattctgagtttcagccactgaactccaaggtccacttctcaccagcaaggaagagtggggtatggaagtcatctgtcccttcactgtttagagcatgacactctccccctcaacagcctcctgagaaggaaaggatctgccctgaccactcccctggcactgttacttgcctctgcgcctcaggggtccccttctgcaccgctggcttccactccaagaaggtggaccagggtctgcaagttcaacggtcatagctgtccctccaggccccaaccttgcctcaccactcccggccctagtctctgcacctccttaggccctgcctctgggctcagaccccaacctagtcaaggggattctcctgctcttaactcgatgacttggggctccctgctctcccgaggaagatgctctgcaggaaaataaaagtcagcctttttctacaa

SEQ ID NO: 415583 - DNA, 1747 bp, Homo sapiens
  misc_feature (1571)..(1571): n is a, c, g, or t
atggggaaggctgcgccaggcgggccggaagcctggcggtggcgtgcaggagccccgccctcctgggctggattcagccgggggcggggccgcgggcggggcctgtggcagcgggaatcccgaccccgcccctttccccacccctccatttctcgccatggcccctgcactgctcctgatccctgctgccctcgcctctttcatcctggcctttggcaccggagtggagttcgtgcgctttacctcccttcggccacttcttggagggatcccggagtctggtggtccggatgcccgccagggatggctggctgccctgcaggaccgcagcatccttgcccccctggcatgggatctggggctcctgcttctatttgttgggcagcacagcctcatggcagctgaaagagtgaaggcatggacatcccggtactttggggtccttcagaggtcactgtatgtggcctgcactgccctggccttgcagctggtgatgcggtactgggagcccatacccaaaggccctgtgttgtgggaggctcgggctgagccatgggccacctgggtgccgctcctctgctttgtgctccatgtcatctcctggctcctcatctttagcatccttctcgtctttgactatgctgagctcatgggcctcaaacaggtatactaccatgtgctggggctgggcgagcctctggccctgaagtctccccgggctctcagactcttctcccacctgcgccacccagtgtgtgtggagctgctgacagtgctgtgggtggtgcctaccctgggcacggaccgtctcctccttgctttcctccttaccctctacctgggcctggctcacgggcttgatcagcaagacctccgctacctccgggcccagctacaaagaaaactccacctgctctctcggccccaggatggggaggcagagtgaggagctcactctggttacaagccctgttcttcctctcccactgaattctaaatccttaacatccaggccctggctgcttcatgccagaggcccaaatccatggactgaaggagatgccccttctactacttgagactttattctctgggtccagctccataccctaaattctgagtttcagccactgaactccaaggtccacttctcaccagcaaggaagagtggggtatggaagtcatctgtcccttcactgtttagagcatgacactctccccctcaacagcctcctgagaaggaaaggatctgccctgaccactcccctggcactgttacttgcctctgcgcctcaggggtccccttctgcaccgctggcttccactccaagaaggtggaccagggtctgcaagttcaacggtcatagctgtccctccaggccccaaccttgcctcaccactcccggccctagtctctgcacctccttaggccctgcctctgggctcagaccccaacctagtcaaggggattctcctgctcttaactcgatgacttggggctccctgctctcccgaggaagatgctctgcaggaaaataaaagtcagcctttttctacaaaaaaaaaacaanaaaactccgagggacacacacaggcaggggcgggcaacaagcggcacgcacacgggaccaggcgcgcacagcggctccggaaccaaacctctctgccacaaggcggacacacgccgcgccacccaaaagggggacccaataacacaaaaccaggaccggtaggcgccccgacaaac

SEQ ID NO: 415584 - DNA, 1453 bp, Homo sapiens
agtgcaaccagaggtagtaaagaggcagtactatacggttctaaggtagcgcggctgggtgggccactcctgatccctgctgccctcgcctctttcatcctggcctttggcaccggagtggagttcgtgcgctttacctcccttcggccacttcttggagggatcccggagtctggtggtccggatgcccgccagggatggctggctgccctgcaggaccgcagcatccttgcccccctggcatgggatctggggctcctgcttctatttgttgggcagcacagcctcatggcagctgaaagagtgaaggcatggacatcccggtactttggggtccttcagaggtcactgtatgtggcctgcactgccctggccttgcagctggtgatgcggtactgggagcccatacccaaaggccctgtgttgtgggaggctcgggctgagccatgggccacctgggtgccgctcctctgctttgtgctccatgtcatctcctggctcctcatctttagcatccttctcgtctttgactatgctgagctcatgggcctcaaacaggtatactaccatgtgctggggctgggcgagcctctggccctgaagtctccccgggctctcagactcttctcccacctgcgccacccagtgtgtgtggagctgctgacagtgctgtgggtggtgcctaccctgggcacggaccgtctcctccttgctttcctccttaccctctacctgggcctggctcacgggcttgatcagcaagacctccgctacctccgggcccagctacaaagaaaactccacctgctctctcggccccaggatggggaggcagagtgaggagctcactctggttacaagccctgttcttcctctcccactgaattctaaatccttaacatccaggccctggctgcttcatgccagaggcccaaatccatggactgaaggagatgccccttctactacttgagactttattctctgggtccagctccataccctaaattctgagtttcagccactgaactccaaggtccacttctcaccagcaaggaagagtggggtatggaagtcatctgtcccttcactgtttagagcatgacactctccccctcaacagcctcctgagaaggaaaggatctgccctgaccactcccctggcactgttacttgcctctgcgcctcaggggtccccttctgcaccgctggcttccactccaagaaggtggaccagggtctgcaagttcaacggtcatagctgtccctccaggccccaaccttgcctcaccactcccggccctagtctctgcacctccttaggccctgcctctgggctcagaccccaacctagtcaaggggattctcctgctcttaactcgatgacttggggctccctgctctcccgaggaagatgctctgcaggaaaataaaagtcagcctttttctacaa

SEQ ID NO: 415585 - DNA, 2225 bp, Homo sapiens
  misc_feature (1575)..(1575): n is a, c, g, or t
  misc_feature (1580)..(1580): n is a, c, g, or t
  misc_feature (1594)..(1594): n is a, c, g, or t
  misc_feature (1601)..(1601): n is a, c, g, or t
  misc_feature (1625)..(1626): n is a, c, g, or t
  misc_feature (1628)..(1628): n is a, c, g, or t
  misc_feature (1630)..(1631): n is a, c, g, or t
atggggaaggctgcgccaggcgggccggaagcctggcggtggcgtgcaggagccccgccctcctgggctggattcagccgggggcggggccgcgggcggggcctgtggcagcgggaatcccgaccccgcccctttccccacccctccatttctcgccatggcccctgcactgctcctgatccctgctgccctcgcctctttcatcctggcctttggcaccggagtggagttcgtgcgctttacctcccttcggccacttcttggagggatcccggagtctggtggtccggatgcccgccagggatggctggctgccctgcaggaccgcagcatccttgcccccctggcatgggatctggggctcctgcttctatttgttgggcagcacagcctcatggcagctgaaagagtgaaggcatggacatcccggtactttggggtccttcagaggtcactgtatgtggcctgcactgccctggccttgcagctggtgatgcggtactgggagcccatacccaaaggccctgtgttgtgggaggctcgggctgagccatgggccacctgggtgccgctcctctgctttgtgctccatgtcatctcctggctcctcatctttagcatccttctcgtctttgactatgctgagctcatgggcctcaaacaggtatactaccatgtgctggggctgggcgagcctctggccctgaagtctccccgggctctcagactcttctcccacctgcgccacccagtgtgtgtggagctgctgacagtgctgtgggtggtgcctaccctgggcacggaccgtctcctccttgctttcctccttaccctctacctgggcctggctcacgggcttgatcagcaagacctccgctacctccgggcccagctacaaagaaaactccacctgctctctcggccccaggatggggaggcagagtgaggagctcactctggttacaagccctgttcttcctctcccactgaattctaaatccttaacatccaggccctggctgcttcatgccagaggcccaaatccatggactgaaggagatgccccttctactacttgagactttattctctgggtccagctccataccctaaattctgagtttcagccactgaactccaaggtccacttctcaccagcaaggaagagtggggtatggaagtcatctgtcccttcactgtttagagcatgacactctccccctcaacagcctcctgagaaggaaaggatctgccctgaccactcccctggcactgttacttgcctctgcgcctcaggggtccccttctgcaccgctggcttccactccaagaaggtggaccagggtctgcaagttcaacggtcatagctgtccctccaggccccaaccttgcctcaccactcccggccctagtctctgcacctccttaggccctgcctctgggctcagaccccaacctagtcaaggggattctcctgctcttaactcgatgacttggggctccctgctctcccgaggaagatgctctgcaggaaaataaaagtcagcctttttctacaaaaaaaaaaaaaaaaanaaaanaaaaaaaaaaaaanaaaaaanaaaaaaaaaaaaaaaaaaaaaaannanannaaaaaaaaacaaaaaaaaaaaaaaaaaaaaaaaaaaaagagggggggcggccgacaaaaaaaaccacccccccggggggccgccccccgataggagcgccacccccggcagccgtgccagcgacgaaaacgaagggggcgcgcccccacaacaggagggcgcagcatatcaacaacaaacagcgacgcggcgcccggcgcgcctgtaacaatacaccccacgctgctcgcccaggacgcgaaaacacgaccgccgccacgacccgacgactccacgggaaggaacacagaacccaccccacacccacggcgcggcggggcgaaccacttcgggcgcgaccaccaccgccaccacccaggcagaggaaatgctaccgccccacgtggggaggaccaaacaacacacacgcactcacgcgagcagacacatcaggcgagtccacccccccacaccacacaaaccgaacgtcggcgcacgacggaaaacatcactcgtcccccccgcagcagaatcaaccgcaggagaaaaataaacacggccggagcacgtaaggcaccaaaacaccccaccacaacaacaggcagacaccacggc

SEQ ID NO: 415586 - DNA, 1966 bp, Homo sapiens
  misc_feature (1575)..(1575): n is a, c, g, or t
  misc_feature (1580)..(1580): n is a, c, g, or t
  misc_feature (1594)..(1594): n is a, c, g, or t
  misc_feature (1601)..(1601): n is a, c, g, or t
  misc_feature (1625)..(1626): n is a, c, g, or t
  misc_feature (1628)..(1628): n is a, c, g, or t
  misc_feature (1630)..(1631): n is a, c, g, or t
atggggaaggctgcgccaggcgggccggaagcctggcggtggcgtgcaggagccccgccctcctgggctggattcagccgggggcggggccgcgggcggggcctgtggcagcgggaatcccgaccccgcccctttccccacccctccatttctcgccatggcccctgcactgctcctgatccctgctgccctcgcctctttcatcctggcctttggcaccggagtggagttcgtgcgctttacctcccttcggccacttcttggagggatcccggagtctggtggtccggatgcccgccagggatggctggctgccctgcaggaccgcagcatccttgcccccctggcatgggatctggggctcctgcttctatttgttgggcagcacagcctcatggcagctgaaagagtgaaggcatggacatcccggtactttggggtccttcagaggtcactgtatgtggcctgcactgccctggccttgcagctggtgatgcggtactgggagcccatacccaaaggccctgtgttgtgggaggctcgggctgagccatgggccacctgggtgccgctcctctgctttgtgctccatgtcatctcctggctcctcatctttagcatccttctcgtctttgactatgctgagctcatgggcctcaaacaggtatactaccatgtgctggggctgggcgagcctctggccctgaagtctccccgggctctcagactcttctcccacctgcgccacccagtgtgtgtggagctgctgacagtgctgtgggtggtgcctaccctgggcacggaccgtctcctccttgctttcctccttaccctctacctgggcctggctcacgggcttgatcagcaagacctccgctacctccgggcccagctacaaagaaaactccacctgctctctcggccccaggatggggaggcagagtgaggagctcactctggttacaagccctgttcttcctctcccactgaattctaaatccttaacatccaggccctggctgcttcatgccagaggcccaaatccatggactgaaggagatgccccttctactacttgagactttattctctgggtccagctccataccctaaattctgagtttcagccactgaactccaaggtccacttctcaccagcaaggaagagtggggtatggaagtcatctgtcccttcactgtttagagcatgacactctccccctcaacagcctcctgagaaggaaaggatctgccctgaccactcccctggcactgttacttgcctctgcgcctcaggggtccccttctgcaccgctggcttccactccaagaaggtggaccagggtctgcaagttcaacggtcatagctgtccctccaggccccaaccttgcctcaccactcccggccctagtctctgcacctccttaggccctgcctctgggctcagaccccaacctagtcaaggggattctcctgctcttaactcgatgacttggggctccctgctctcccgaggaagatgctctgcaggaaaataaaagtcagcctttttctacaaaaaaaaaaaaaaaaanaaaanaaaaaaaaaaaaanaaaaaanaaaaaaaaaaaaaaaaaaaaaaannanannaaaaaaaaaaacccttggggggccgcttggcccaagccaatttaaaactgaaaaaagttaatgaagggggccaaaattgaagctaattgggcaaattcccccaaaagggaggggaataaaaataaatgggccggggttaaaaaacgtgggaacgggaaaaacccgggggtaaccaaattaaatggcttggaaaaaaatccccttttcccaagtggggaaaaaagaaaaaaggcccgaaccaatcgcctttccaaaaagtggccaaccctaaagggaaaaggaaaattgaaagcgtaaaaatttggtaaaaatccgggtaaaattttggtaaaaaa

SEQ ID NO: 415587 - DNA, 1581 bp, Homo sapiens
atggggaaggctgcgccaggcgggccggaagcctggcggtggcgtgcaggagccccgccctcctgggctggattcagccgggggcggggccgcgggcggggcctgtggcagcgggaatcccgaccccgcccctttccccacccctccatttctcgccatggcccctgcactgctcctgatccctgctgccctcgcctctttcatcctggcctttggcaccggagtggagttcgtgcgctttacctcccttcggccacttcttggagggatcccggagtctggtggtccggatgcccgccagggatggctggctgccctgcaggaccgcagcatccttgcccccctggcatgggatctggggctcctgcttctatttgttgggcagcacagcctcatggcagctgaaagagtgaaggcatggacatcccggtactttggggtccttcagaggtcactgtatgtggcctgcactgccctggccttgcaggtatgaggccctggccttgcagctggtgatgcggtactgggagcccatacccaaaggccctgtgttgtgggaggctcgggctgagccatgggccacctgggtgccgctcctctgctttgtgctccatgtcatctcctggctcctcatctttagcatccttctcgtctttgactatgctgagctcatgggcctcaaacaggtatactaccatgtgctggggctgggcgagcctctggccctgaagtctccccgggctctcagactcttctcccacctgcgccacccagtgtgtgtggagctgctgacagtgctgtgggtggtgcctaccctgggcacggaccgtctcctccttgctttcctccttaccctctacctgggcctggctcacgggcttgatcagcaagacctccgctacctccgggcccagctacaaagaaaactccacctgctctctcggccccaggatggggaggcagagtgaggagctcactctggttacaagccctgttcttcctctcccactgaattctaaatccttaacatccaggccctggctgcttcatgccagaggcccaaatccatggactgaaggagatgccccttctactacttgagactttattctctgggtccagctccataccctaaattctgagtttcagccactgaactccaaggtccacttctcaccagcaaggaagagtggggtatggaagtcatctgtcccttcactgtttagagcatgacactctccccctcaacagcctcctgagaaggaaaggatctgccctgaccactcccctggcactgttacttgcctctgcgcctcaggggtccccttctgcaccgctggcttccactccaagaaggtggaccagggtctgcaagttcaacggtcatagctgtccctccaggccccaaccttgcctcaccactcccggccctagtctctgcacctccttaggccctgcctctgggctcagaccccaacctagtcaaggggattctcctgctcttaactcgatgacttggggctccctgctctcccgaggaagatgctctgcaggaaaataaaagtcagcctttttctacaa

SEQ ID NO: 415588 - DNA, 1400 bp, Homo sapiens
tgaaagcggccgagaagctacaggggagggagacctgagttctaaattaggaactcaaggattagagttttggagaggcgggagagtgaggactgagggagccgaaaagggcggtgaccggagtattctaaatgcccgccagggatggctggctgccctgcaggaccgcagcatccttgcccccctggcatgggatctggggctcctgcttctatttgttgggcagcacagcctcatggcagctgaaagagtgaaggcatggacatcccggtactttggggtccttcagaggtcactgtatgtggcctgcactgccctggccttgcagctggtgatgcggtactgggagcccatacccaaaggccctgtgttgtgggaggctcgggctgagccatgggccacctgggtgccgctcctctgctttgtgctccatgtcatctcctggctcctcatctttagcatccttctcgtctttgactatgctgagctcatgggcctcaaacaggtatactaccatgtgctggggctgggcgagcctctggccctgaagtctccccgggctctcagactcttctcccacctgcgccacccagtgtgtgtggagctgctgacagtgctgtgggtggtgcctaccctgggcacggaccgtctcctccttgctttcctccttaccctctacctgggcctggctcacgggcttgatcagcaagacctccgctacctccgggcccagctacaaagaaaactccacctgctctctcggccccaggatggggaggcagagtgaggagctcactctggttacaagccctgttcttcctctcccactgaattctaaatccttaacatccaggccctggctgcttcatgccagaggcccaaatccatggactgaaggagatgccccttctactacttgagactttattctctgggtccagctccataccctaaattctgagtttcagccactgaactccaaggtccacttctcaccagcaaggaagagtggggtatggaagtcatctgtcccttcactgtttagagcatgacactctccccctcaacagcctcctgagaaggaaaggatctgccctgaccactcccctggcactgttacttgcctctgcgcctcaggggtccccttctgcaccgctggcttccactccaagaaggtggaccagggtctgcaagttcaacggtcatagctgtccctccaggccccaaccttgcctcaccactcccggccctagtctctgcacctccttaggccctgcctctgggctcagaccccaacctagtcaaggggattctcctgctcttaactcgatgacttggggctccctgctctcccgaggaagatgctctgcaggaaaataaaagtcagcctttttctacaa

SEQ ID NO: 415589 - DNA, 1256 bp, Homo sapiens
agtgcaaccagaggtagtaaagaggcagtactatacggttctaaggtagcgcggctgggtgggccactcctgatccctgctgccctcgcctctttcatcctggcctttggcaccggagtggagttcgtgcgctttacctcccttcggccacttcttggagggatcccggagtctggtggtccggctggtgatgcggtactgggagcccatacccaaaggccctgtgttgtgggaggctcgggctgagccatgggccacctgggtgccgctcctctgctttgtgctccatgtcatctcctggctcctcatctttagcatccttctcgtctttgactatgctgagctcatgggcctcaaacaggtatactaccatgtgctggggctgggcgagcctctggccctgaagtctccccgggctctcagactcttctcccacctgcgccacccagtgtgtgtggagctgctgacagtgctgtgggtggtgcctaccctgggcacggaccgtctcctccttgctttcctccttaccctctacctgggcctggctcacgggcttgatcagcaagacctccgctacctccgggcccagctacaaagaaaactccacctgctctctcggccccaggatggggaggcagagtgaggagctcactctggttacaagccctgttcttcctctcccactgaattctaaatccttaacatccaggccctggctgcttcatgccagaggcccaaatccatggactgaaggagatgccccttctactacttgagactttattctctgggtccagctccataccctaaattctgagtttcagccactgaactccaaggtccacttctcaccagcaaggaagagtggggtatggaagtcatctgtcccttcactgtttagagcatgacactctccccctcaacagcctcctgagaaggaaaggatctgccctgaccactcccctggcactgttacttgcctctgcgcctcaggggtccccttctgcaccgctggcttccactccaagaaggtggaccagggtctgcaagttcaacggtcatagctgtccctccaggccccaaccttgcctcaccactcccggccctagtctctgcacctccttaggccctgcctctgggctcagaccccaacctagtcaaggggattctcctgctcttaactcgatgacttggggctccctgctctcccgaggaagatgctctgcaggaaaataaaagtcagcctttttctacaa

SEQ ID NO: 415590 - DNA, 1188 bp, Homo sapiens
agtgcaaccagaggtagtaaagaggcagtactatacggttctaaggtagcgcggctgggtgggccactcctgatccctgctgccctcgcctctttcatcctggcctttggcaccggctggtgatgcggtactgggagcccatacccaaaggccctgtgttgtgggaggctcgggctgagccatgggccacctgggtgccgctcctctgctttgtgctccatgtcatctcctggctcctcatctttagcatccttctcgtctttgactatgctgagctcatgggcctcaaacaggtatactaccatgtgctggggctgggcgagcctctggccctgaagtctccccgggctctcagactcttctcccacctgcgccacccagtgtgtgtggagctgctgacagtgctgtgggtggtgcctaccctgggcacggaccgtctcctccttgctttcctccttaccctctacctgggcctggctcacgggcttgatcagcaagacctccgctacctccgggcccagctacaaagaaaactccacctgctctctcggccccaggatggggaggcagagtgaggagctcactctggttacaagccctgttcttcctctcccactgaattctaaatccttaacatccaggccctggctgcttcatgccagaggcccaaatccatggactgaaggagatgccccttctactacttgagactttattctctgggtccagctccataccctaaattctgagtttcagccactgaactccaaggtccacttctcaccagcaaggaagagtggggtatggaagtcatctgtcccttcactgtttagagcatgacactctccccctcaacagcctcctgagaaggaaaggatctgccctgaccactcccctggcactgttacttgcctctgcgcctcaggggtccccttctgcaccgctggcttccactccaagaaggtggaccagggtctgcaagttcaacggtcatagctgtccctccaggccccaaccttgcctcaccactcccggccctagtctctgcacctccttaggccctgcctctgggctcagaccccaacctagtcaaggggattctcctgctcttaactcgatgacttggggctccctgctctcccgaggaagatgctctgcaggaaaataaaagtcagcctttttctacaa

SEQ ID NO: 415591 - DNA, 1382 bp, Homo sapiens
atggggaaggctgcgccaggcgggccggaagcctggcggtggcgtgcaggagccccgccctcctgggctggattcagccgggggcggggccgcgggcggggcctgtggcagcgggaatcccgaccccgcccctttccccacccctccatttctcgccatggcccctgcactgctcctgatccctgctgccctcgcctctttcatcctggcctttggcaccggagtggagttcgtgcgctttacctcccttcggccacttcttggagggatcccggagtctggtggtccggatgcccgccagggatggctggctgccctgcaggaccgcagcatccttgcccccctggcatgggatctggggctcctgcttctatttgttgggcagcacagcctcatggcagctgaaagagtgaaggcatggacatcccggtactttggggtccttcagaggtcactgtatgtggcctgcactgccctggccttgcaggtatactaccatgtgctggggctgggcgagcctctggccctgaagtctccccgggctctcagactcttctcccacctgcgccacccagtgtgtgtggagctgctgacagtgctgtgggtggtgcctaccctgggcacggaccgtctcctccttgctttcctccttaccctctacctgggcctggctcacgggcttgatcagcaagacctccgctacctccgggcccagctacaaagaaaactccacctgctctctcggccccaggatggggaggcagagtgaggagctcactctggttacaagccctgttcttcctctcccactgaattctaaatccttaacatccaggccctggctgcttcatgccagaggcccaaatccatggactgaaggagatgccccttctactacttgagactttattctctgggtccagctccataccctaaattctgagtttcagccactgaactccaaggtccacttctcaccagcaaggaagagtggggtatggaagtcatctgtcccttcactgtttagagcatgacactctccccctcaacagcctcctgagaaggaaaggatctgccctgaccactcccctggcactgttacttgcctctgcgcctcaggggtccccttctgcaccgctggcttccactccaagaaggtggaccagggtctgcaagttcaacggtcatagctgtccctccaggccccaaccttgcctcaccactcccggccctagtctctgcacctccttaggccctgcctctgggctcagaccccaacctagtcaaggggattctcctgctcttaactcgatgacttggggctccctgctctcccgaggaagatgctctgcaggaaaataaaagtcagcctttttctacaa

SEQ ID NO: 415592 - DNA, 1079 bp, Homo sapiens
agtgcaaccagaggtagtaaagaggcagtactatacggttctaaggtagcgcggctgggtgggccactcctgatccctgctgccctcgcctctttcatcctggcctttggcaccggagtggagttcgtgcgctttacctcccttcggccacttcttggagggatcccggagtctggtggtccgggtatactaccatgtgctggggctgggcgagcctctggccctgaagtctccccgggctctcagactcttctcccacctgcgccacccagtgtgtgtggagctgctgacagtgctgtgggtggtgcctaccctgggcacggaccgtctcctccttgctttcctccttaccctctacctgggcctggctcacgggcttgatcagcaagacctccgctacctccgggcccagctacaaagaaaactccacctgctctctcggccccaggatggggaggcagagtgaggagctcactctggttacaagccctgttcttcctctcccactgaattctaaatccttaacatccaggccctggctgcttcatgccagaggcccaaatccatggactgaaggagatgccccttctactacttgagactttattctctgggtccagctccataccctaaattctgagtttcagccactgaactccaaggtccacttctcaccagcaaggaagagtggggtatggaagtcatctgtcccttcactgtttagagcatgacactctccccctcaacagcctcctgagaaggaaaggatctgccctgaccactcccctggcactgttacttgcctctgcgcctcaggggtccccttctgcaccgctggcttccactccaagaaggtggaccagggtctgcaagttcaacggtcatagctgtccctccaggccccaaccttgcctcaccactcccggccctagtctctgcacctccttaggccctgcctctgggctcagaccccaacctagtcaaggggattctcctgctcttaactcgatgacttggggctccctgctctcccgaggaagatgctctgcaggaaaataaaagtcagcctttttctacaa

SEQ ID NO: 415593 - DNA, 1170 bp, Homo sapiens
atggggaaggctgcgccaggcgggccggaagcctggcggtggcgtgcaggagccccgccctcctgggctggattcagccgggggcggggccgcgggcggggcctgtggcagcgggaatcccgaccccgcccctttccccacccctccatttctcgccatggcccctgcactgctcctgatccctgctgccctcgcctctttcatcctggcctttggcaccggagtggagttcgtgcgctttacctcccttcggccacttcttggagggatcccggagtctggtggtccggatgcccgccagggatggctggctgccctgcaggaccgcagcatccttgcccccctggcatgggatctggggctcctgcttctatttgttgggcagcacagcctcatggcagctgaaagagtgaaggcatggacatcccggtactttggggtccttcagaggtcactgtatgtggcctgcactgccctggccttgcagctggtgatgcggtactgggagcccatacccaaaggccctgtgttgtgggaggctcgggctgagccatgggccacctgggtgccgctcctctgctttgtgctccatgtcatctcctggctcctcatctttagcatccttctcgtctttgactatgctgagctcatgggcctcaaacaggtatactaccatgtgctggggctgggcgagcctctggccctgaagtctccccgggctctcagactcttctcccacctgcgccacccagtgtgtgtggagctgctgacagtgctgtgggtggtgcctaccctgggcacggaccgtctcctccttgctttcctccttaccctctacagcctcctgagaaggaaaggatctgccctgaccactcccctggcactgttacttgcctctgcgcctcaggggtccccttctgcaccgctggcttccactccaagaaggtggaccagggtctgcaagttcaacggtcatagctgtccctccaggccccaaccttgcctcaccactcccggccctagtctctgcacctccttaggccctgcctctgggctcagaccccaacctagtcaaggggattctcctgctcttaactcgatgacttggggctccctgctctcccgaggaagatgctctgcaggaaaataaaagtcagcctttttctacaa

SEQ ID NO: 415594 - DNA, 538 bp, Homo sapiens
cagcagaggctgccgctgcgcgtcccctaggcgcggaagaggcggctggtggtccctgacggcaaggtgaagtcgaggcagtaatcgggaacccaggttttataccttacgaataaagctggcacgtttccatttctcctgggcaaatatttagaagaaaagttgctgggtaattgaagcactgagaccacagaggcaagagctggggaaggaaaactgcccatgagatgagatgtgcctctcagcttccaaaatcggggagatgccccccatggaatccagccatcatgctgtgaggaatccaagcagctacatagaaaggccacaactagatattccagctgtagtcagctgaagctccagccaacagccaacatcaaccaccacgcgtgaaaacgagcaagccttcagatgattccgactcccaacctccaagccacctcagctgaagccaagtagagcagagactagctgtcccccaatgctctaatatgcagattcataattaaaaagaatgttattgttctaaaaaaaaaaa

SEQ ID NO: 415595 - DNA, 638 bp, Homo sapiens
cagcagaggctgccgctgcgcgtcccctaggcgcggaagaggcggctggtggtccctgacggcaaggtgaagtcgaggcagtaatcgggaacccaggttttataccttacgaataaagctggcacgtttccatttctcctgggcaaatatttagaagaaaagttgctgggtaattggtggagacaaggtttcgccacattgactgggctggtctcgaactcctgagctcaagcaaccggccctccttgacctcccaaagtgctaggattacaggtgtgaaccaccgtgcccggccctactttctatcgaagtagaataggtagatcacattattattaacagtatatgggaagagggaggtcctcccatgttacattgttctcccttcaccttctgggtcatgttgcaccactgtttcccttctagtcatatcccagggggccttgtcccatttatacagctctattctagtggtcaccagaggaatgggagtaatctgattgaaagataagacagaagattgtactctcttttttttttttttgagacagagtcacccaggctggaatgcagtggcattgtcatggctcaccgcagtctcaaactcctgggcccaagtgatcctcccactcagcctc

SEQ ID NO: 415596 - DNA, 444 bp, Homo sapiens
cagcagaggctgccgctgcgcgtcccctaggcgcggaagaggcggctggtggtccctgacggcaaggtgaagtcgaggcagtaatcgggaacccaggttttataccttacgaataaagctggcacgtttccatttctcctgggcaaatatttagaagaaaagttgctgggtaattggtggagacaaggtttcgccacattgactgggctggtctcgaactcctgagctcaagcaaccggccctccttgacctcccaaagtgctaggattacaggattaaaaatatgcatggagctgtcatcgcctatgaaaacaatgccttcttctggatacctcctgaaggacttgcctgaggctgttttacagttacttttttttttaataagtagaaggagtacagtctaaaataataatacaaatagtacaataaattacataaactagt

SEQ ID NO: 415597 - DNA, 1274 bp, Homo sapiens
tgccagccttggcctcccaaagtgctgggattacaggcgtgagccaccgcacccggccacatgtagtattaaattgtagtgagccaagattgcgccgttgcactccagcctgggagacagagtgagactccgtctaaaaaaaaaaaaaaatactacatgtgtgaattagaaattctaagctgagaaagctacttaaaattggtcaagaaaaagatacacattaagtataagaaagttggcatggctatagtagtatcagataataggcctcaaaacaatgtatatggcaggagataggtaacagtcataaaagagcaggtcattaggaatttgcatatacatttgtcactacagggatacattctgagaaatgtgttattaggtgattgcatcatgcaagcatcatagagcacactaacacaaacagcaatggggtagcctactacatacctaagttatatggtatagcctattgctcctaggctacaaacctgtatagcatattatatagcatatagcatacctgtattgaatgctgtaggcatttataacacagtggtgtttgtgtatctaaacatagcaaaggtacagtaaaaatactgtataaaatattaaaaaatggcacaccggtataagatacttgccatgaatggagcttgtgggactgaatttctgggtgcatcagtgagtgagttgtgagagaatgctaaggactaggacattactgtatactgctgtagactttacaagcagtacacttaggcttcactaaatttatttttttaagttttcttcaataataaattaaccttagcttcctgtaatatttttacattataaacttactattttttatctttctgaattgtagtaactcttcacttaaaacgcaaacacattatatagcaacacaaaaatatttctgtccttattctataggcttttttctatttaaaaatttttttgttttaaaaatgtttgttactttttaaactttcttgttaaaaacaaacacactttagcctgggcctacacagggtctagagtatcaatatgtctgtcttttaccgccatatcttgtccaactggaatgtcgtcttcaggattaaaaatatgcatggagctgtcatcgcctatgaaaacaatgccttcttctggatacctcctgaaggacttgcctgaggctgttttacagttacttttttttttaataagtagaaggagtacagtctaaaataataatacaaatagtacaataaattacataaactagt

SEQ ID NO: 415598 - DNA, 948 bp, Homo sapiens
agcgatctgcctgccttggcctcccaaagtgctgggattacaggcatgagccactgtgcctggataggtcccaatctataatcgaatgaaatcagcttcttttaatcatccgtccaccatcttttggatggtccaatacctcttcaagagctttcattttactgttccgaaaaaaaagggctgaaccgatagtggatgctaaatattaatgggaaaatagagggatccattaggagaatcttgggctgtttggcatcatcactcactggaactggggacaacttcttagatctctgttacataggacatttcaagataagataatgtttacatgatctaaaatatgactgtgtttaagaagtagagacaaacagttcaccaaaaccatggctaaaaatggttaagaacttgtcagtcttcctcaggggtcctctctttgcagaagcactgagaccacagaggcaagagctggggaaggaaaactgcccatgagatgagatgtgcctctcagcttccaaaatcggggagggttgcaaagggatgacaccatccacaccagaactgcatgaatggcatcaggaatgatcagagaccataaattccagtgagaccaataacaccatttctggtcctgcatgctcttccaaactttgccactaaccccttcaagagatgccccccatggaatccagccatcatgctgtgaggaatccaagcagctacatagaaaggccacaactagatattccagctgtagtcagctgaagctccagccaacagccaacatcaaccaccacgcgtgaaaacgagcaagccttcagatgattccgactcccaacctccaagccacctcagctgaagccaagtagagcagagactagctgtcccccaatgctctaatatgcagattcataattaaaaagaatgttattgttctaaaaaaaaaaa

SEQ ID NO: 415599 - DNA, 267 bp, Homo sapiens
gtgagaccaataacaccatttctggtcctgcatgctcttccaaactttgccactaaccccttcaagaggtacagtctatttccctttctcttgaaattgggtaggcctttgggactcccttgataaacagaatacaacagaaatgacactgtgtatctaacaaggctaggttagaaaaggcaacagaacttcatcctaatctctctcaagatgccccccatggaatccagccatcatgctgtgaggaatccaagcagctacatagaa

SEQ ID NO: 415600 - DNA, 363 bp, Homo sapiens
ttctcctttagtttaccctaatgtgtgtgagatttcatgtgtagttcatttttctttttctgaacagcactccattgtgcaaatataccacaatttgtgtagtcatttttctgttgttgaacatttggcatatttacaggttttataccttacgaataaagctggcacgtttccatttctcctgggcaaatatttagaagaaaagttgctgggtaattggtaagtttacatttaactttccaagaagctgataagccttttagaatgattagttgtgatttgtgtgtgtgagattgtgtaactggagtaagtagtttctgagtttgctttgctatgtttgtatggaattataagatgggctca

SEQ ID NO: 415601 - DNA, 356 bp, Homo sapiens
ccccttgaagaatgacaacttaattgcctaatgattggtgggtattgagcaaaataggtgtagtcacttacaaagtatttggcagtcataatttgaagactatgtactaacatgggaaaatgcttatgatatactcaagttaaaaaagaatgttttagaaatatgtgcatggcatgattattataacctaagaatttagaaataccctcaaccaaaaactaaaacctcctggaaactgtaaagaagcacaacaacatgctgttggtggttatgtgagagctatggagttctgtctcttgctctgttttttaaaaatgtgttttccaaattccatagtgtgattataatacctttac

SEQ ID NO: 415602 - DNA, 403 bp, Homo sapiens
tgattagtgcaaactctaaaatgctcatgaagggggagggaaattgaatgtgaacaaataggaaaatgatgaaaaaaacttccagtttttttaaatgtactgccaggaagaagagttgacagctataatcttcttactgataaattttctgttgtaaggctagataatgatttctagaagaaaggtaaaagaaagtagaattgttttgataagaatggggaccagtatagaagataaattaaaatgatcaaataaaggcacaggtgacaggttcgtctagtattttcaaaaatgtaaatgggcttgaactgaaatggggagaggaagatgagctccaagggcataattctggtagtagggctcattttaagctcttcttatgctcaaaaccacctgtacccaa

SEQ ID NO: 415603 - DNA, 637 bp, Homo sapiens
attgcttacatatgatgtacctgaaattatttgtccataaactttactaagtaccaactatgtccaagacattgcactaagtgctaggcaaatcattggacaaaacttctgtcctcaagaagctcatgatctatttgtaaaggagataaatatagtagcagataactattaagtaatgcaatatctaagttgatttatgagtttaaaatctgacatagtgaaattaaaaaaatcagtatttggagaaattaatgatgtccattgataaaaatattgaagctatcttattcttattcatctttcacatatcctttacttactaaaagtgactgactcccacaagttaccagtatatgtaacacagaaatccagtgttctttttcttaaaacaccagtatgttagataataattcttgaataaattctataatgctatttttaaaaaatcaactcaacactgatttcagtgaagttcaggtactccatttgggtgaattttaactggcaacgtgaaaaaaaagaaaatttggaagatgctcaaataggattgatagaggttcattttgtgtcatattttcgctttatatggatgttgatatgttctcagaataaatttataactgcaatagaaaatgga

SEQ ID NO: 415604 - DNA, 202 bp, Homo sapiens
ctttattgtgcaatttatctaataacacaattgtgtctgtaaagaaaatacaaatggagaaaagtttctgcaattattaagcagaatataaacctaaggatatataaagcatatatttatctcaatatttccatcttctctttctcaaatccaaggttttcttactctactttcaaagaacaatatatatgatgttttaaat

SEQ ID NO: 415605 - DNA, 1386 bp, Homo sapiens
ctgaatatgtattagctatgtttactcttttatatctaattcaaattgaagactctacgtaggtgaacttttttttctaacttcagtgtacaagattatttttgggtgggtggggggagcaatagttaccttggtgaaatatttgagatctttttgtggtatttgggggatctgttgtgtgttagagtgtatttcaaccctcctgtattattgtggcagaaaaactgtgctgttaacgtagttggcaacaagatgcctttggaaacttaatagtaggtcaatgtgtttatggaatattctgaactcctaggaaattttgttctatattttaaagcattatttggttttcattagtggaaaacataattagctcaggcttatcaggaactcagatgagtcatattttttcttggatacacctgagacattaaactcaattttttaaaactaacacaccattctttagtgcagtgaaattcaaaagttataaattggcatggagcaagttttttctttgatttctatgaagtttcagttattggattaaactactttagaccttagcccattcggatctacatacaccagttccattactgtgtttgcatggatgtctgtaatatacacacacatatacatttgaaaatgatagaggaacaaagagttatcattggaacataaactataaaaaaagattccagcactcatgcttgaatttcctcagtgggttgtatgtttgtccatacatacatgtataaaataaacaattgcaaacatgtcagtgaaacctcatatgacgcttttatagtgacatgcatgtttaatgtatgagaaaaatatttaccaatgtattgtcctttgagtcctaaaatataaatactatacatgccagaaactattctaatgtgacttttaatgtgactattaaaaatgaggtttcactgtacattcatgctgtgatgcgatttcaccttatagtacatgtatatgggtacagaaaataaaccctcatattcctgctttaagttacagccaagttttcaccaaatcacaactatcatcaccaccaaaattttaaaaaacagtagttgactactaaaaagtaatcagtggacaggtcatttatgggatcagtaagcacagtagtgtgattatatctgggaaaacatctacagttgtacagctgtatcctcctcaaaatccggtgaagaatgctatttttctaggctgagcttttgttataaacttaatattcagaaggcaagggttatgatcctgatgtgtcctttttttttgcatttgttaattctgaatgtatttttaacagaatgatttttttgacttactagtgtaatttgcattttaaaaataaatggaaaaatactt

SEQ ID NO: 415606 - DNA, 1638 bp, Homo sapiens
accggcggctgcggcggggcgggaagccatggagccgcgggcgctcgtcacggcgctcagcctcggcctcagcctgtgctccctggggctgctcgtcacggccatcttcaccgaccactggtacgagaccgacccccggcgccacaaggagagctgcgagcgcagccgcgcgggcgccgaccccccggaccagaagaaccgcctgatgccgctgtcgcacctgccgctgcgggactcgcccccgctggggcgccggctgctcccgggcggcccggggcgcgccgaccccgagtcctggcgctcgctcctggggctcggcgggctggacgccgagtgcggccggcccctcttcgccacctactcgggcctctggaggaagtgctacttcctgggcatcgaccgggacatcgacaccctcatcctgaaaggtattgcgcacgattgcacggccatcaagtaccacttttctcagcccatccgcttgcgaaacattccttttaatttaaccaagaccatacagcaagatgagtggcacctgcttcatttaagaagaatcactgctggcttcctcggcatggccgtagccgtccttctctgcggctgcattgtggccacagtcagtttcttctgggaggagagcttgacccagcacgtggctggactcctgttcctcatgacagggatattttgcaccatttccctctgtacttatgccgccagtatctcgtatgatttgaaccggctcccaaagctaatttatagcctgcctgctgatgtggaacatggttacagctggtccatcttttgcgcctggtgcagtttaggctttattgtggcagctggaggtctctgcatcgcttatccgtttattagccggaccaagattgcacagctaaagtctggcagagactccacggtatgactgtcctcactgggcctgtccacagtgcgagcgactcctgaggggaacagcgcggagttcaggagtccaagcacaaagcggtcttttacattccaacctgttgcctgccagccctttctggattactgatagaaaatcatgcaaaacctcccaactttctaaggacaagactactgtggattcaagtgctttaatgactatttatgcgttgactgtgagaatagggagcagtgccatgggacatttctaggtgtagagaaagaagaaactgcaatggaaaaatttgtatgatttccatttatttcagaaagtttgtatgtaacaattacccgagagtcatttctacttgcaaaaggattcgtaacaaagcgagtataattttcttgtcattgtatcatgcttgttaaattttaatgcagcatcttcagaacttgtcctgatggtgtcttattgtgtcagcaccaaatatttgtgcattatttgtggacgttccttgtcacaggaagattcttcttctgttgccttattgtttttttttttttaagtctcttctctgtctttgtactggaatcgaaatcataagataaacagatcaaacgtgcttaagagctaactcgtgacactatgcagtattgtttgaagacctgttgttcaacctctgtctctttatgttaactggatttctgcattaaatgactgcccccttgttaaaaaaa

SEQ ID NO: 415607 - DNA, 1353 bp, Homo sapiens
gggaaagtgtgagaggaagagttggagaaaagtcgggggaaagtagggacagggttaaggggagagaggaggatgagggcggcgaggagagattaaaaggggaaggggggtcgctggagaggagggcggactgtggatcggaggtattgcgcacgattgcacggccatcaagtaccacttttctcagcccatccgcttgcgaaacattccttttaatttaaccaagaccatacagcaagatgagtggcacctgcttcatttaagaagaatcactgctggcttcctcggcatggccgtagccgtccttctctgcggctgcattgtggccacagtcagtttcttctgggaggagagcttgacccagcacgtggctggactcctgttcctcatgacagggatattttgcaccatttccctctgtacttatgccgccagtatctcgtatgatttgaaccggctcccaaagctaatttatagcctgcctgctgatgtggaacatggttacagctggtccatcttttgcgcctggtgcagtttaggctttattgtggcagctggaggtctctgcatcgcttatccgtttattagccggaccaagattgcacagctaaagtctggcagagactccacggtatgactgtcctcactgggcctgtccacagtgcgagcgactcctgaggggaacagcgcggagttcaggagtccaagcacaaagcggtcttttacattccaacctgttgcctgccagccctttctggattactgatagaaaatcatgcaaaacctcccaactttctaaggacaagactactgtggattcaagtgctttaatgactatttatgcgttgactgtgagaatagggagcagtgccatgggacatttctaggtgtagagaaagaagaaactgcaatggaaaaatttgtatgatttccatttatttcagaaagtttgtatgtaacaattacccgagagtcatttctacttgcaaaaggattcgtaacaaagcgagtataattttcttgtcattgtatcatgcttgttaaattttaatgcagcatcttcagaacttgtcctgatggtgtcttattgtgtcagcaccaaatatttgtgcattatttgtggacgttccttgtcacaggaagattcttcttctgttgccttattgtttttttttttttaagtctcttctctgtctttgtactggaatcgaaatcataagataaacagatcaaacgtgcttaagagctaactcgtgacactatgcagtattgtttgaagacctgttgttcaacctctgtctctttatgttaactggatttctgcattaaatgactgcccccttgttaaaaaaa

SEQ ID NO: 415608 - DNA, 1250 bp, Homo sapiens
caccctctctccagcattaagcagcttctgtgagatgcaggtattgcgcacgattgcacggccatcaagtaccacttttctcagcccatccgcttgcgaaacattccttttaatttaaccaagaccatacagcaagatgagtggcacctgcttcatttaagaagaatcactgctggcttcctcggcatggccgtagccgtccttctctgcggctgcattgtggccacagtcagtttcttctgggaggagagcttgacccagcacgtggctggactcctgttcctcatgacagggatattttgcaccatttccctctgtacttatgccgccagtatctcgtatgatttgaaccggctcccaaagctaatttatagcctgcctgctgatgtggaacatggttacagctggtccatcttttgcgcctggtgcagtttaggctttattgtggcagctggaggtctctgcatcgcttatccgtttattagccggaccaagattgcacagctaaagtctggcagagactccacggtatgactgtcctcactgggcctgtccacagtgcgagcgactcctgaggggaacagcgcggagttcaggagtccaagcacaaagcggtcttttacattccaacctgttgcctgccagccctttctggattactgatagaaaatcatgcaaaacctcccaactttctaaggacaagactactgtggattcaagtgctttaatgactatttatgcgttgactgtgagaatagggagcagtgccatgggacatttctaggtgtagagaaagaagaaactgcaatggaaaaatttgtatgatttccatttatttcagaaagtttgtatgtaacaattacccgagagtcatttctacttgcaaaaggattcgtaacaaagcgagtataattttcttgtcattgtatcatgcttgttaaattttaatgcagcatcttcagaacttgtcctgatggtgtcttattgtgtcagcaccaaatatttgtgcattatttgtggacgttccttgtcacaggaagattcttcttctgttgccttattgtttttttttttttaagtctcttctctgtctttgtactggaatcgaaatcataagataaacagatcaaacgtgcttaagagctaactcgtgacactatgcagtattgtttgaagacctgttgttcaacctctgtctctttatgttaactggatttctgcattaaatgactgcccccttgttaaaaaaa

SEQ ID NO: 415609 - DNA, 1605 bp, Homo sapiens
aaaaaaacaaaaccttaattatagcgcaaagaaaggccaggactgatgcagggattccttggaaatatcagttcctatcacttttaaaacctgattttggatctctctgttctatgtatgtctttagtgagagcacaatacatggcagaacgctgtgccaaatgttataggtaaggaatatagaaatgaatgttttttgttgtgaaggtgttttcatgtgatattttataaacacattttaaaaaatctccatcactttttagtataggaaggatagctttgcctgggaaaaacagtttcaacacacctgctcagagtagcagttctccctcaaaaaagcagtgttcagcctgcactgactgttctgcttgccaaaaggaggaagcatgcaagatacttatttctccatagattgtggagtatagagggatgtgggactacagattattattttttttccccgagacagagtcttgctctgtcgcccaggttggaacacaatggcacgacctcagctcactgcaacctctgtctcccgggttcaagcaattctcctgcttcagcctcctgagtagctgggattacaggcacacaccaccaccgcactcagctaatttttgtatttttagtagaggtggggttttaccatgttggccaggctggtcttaaactcctgaccttgtaatcatcccgcctcggcctcctaaagtgctaggattacaggcatgagccaccgcacccggcccagataatttttaatagcctttgatcatggggtgagtgagggagtaggtatacttggcaaatgcatggttctctgatttctagctctaaagcagccttatctgaatccccaaatcttgtgatgctgagtaccattactgaaccagtctgcacggtaggcatctgctaccaaaatttacctcctacctggtaggtgtcatctgataagaaagaagacaggttattttaattttttgagataatcacagaaaattgcagcccatactctttattaccgaattcaagtttggaaatagaccctttgttttaaatcatgatgggtctttatcccaatcatttatctgggtcatttttccaactttggagttctaggaaagaaccttgaaaacctgatatgattctgcagcatgaggtctacggtgaccatttgggcaaagctccagtggcaatcatttattgtgttttgcatttcctgggatttattgaaataagaattcactgtgattatgtagtcttctggctagtatcaggcagctctgcttttaatttggttaattttattttctctgaagagggagaagaggtacaatttaatcttggcctccacaagcatattaaagctcacgtgttaatcagtgcattcttatgctcctacattaaatgccttgggtaaatggataaatggacatgtgcccagctttaattttttttgcaacagaaagatcagacttccgtatggcatcgttggatttcagaggctttctggtgtatctgtaaatctgaatgttgccttctgccagtctgtataaccaggtgattcatgctgcaaatgaaatcaggaagcagtaaagtgttaaagca

SEQ ID NO: 415610 - DNA, 1756 bp, Homo sapiens
aaaaaaacaaaaccttaattatagcgcaaagaaaggccaggactgatgcagggattccttggaaatatcagttcctatcacttttaaaacctgattttggatctctctgttctatgtatgtctttagtgagagcacaatacatggcagaacgctgtgccaaatgttataggtaaggaatatagaaatgaatgttttttgttgtgaaggtgttttcatgtgatattttataaacacattttaaaaaatctccatcactttttagtataggaaggatagctttgcctgggaaaaacagtttcaacacacctgctcagagtagcagttctccctcaaaaaagcagtgttcagcctgcactgactgttctgcttgccaaaaggaggaagcatgcaagatacttatttctccatagattgtggagtatagagggatgtgggactacagattattattttttttccccgagacagagtcttgctctgtcgcccaggttggaacacaatggcacgacctcagctcactgcaacctctgtctcccgggttcaagcaattctcctgcttcagcctcctgagtagctgggattacaggcacacaccaccaccgcactcagctaatttttgtatttttagtagaggtggggttttaccatgttggccaggctggtcttaaactcctgaccttgtaatcatcccgcctcggcctcctaaagtgctaggattacaggcatgagccaccgcacccggcccagataatttttaatagcctttgatcatggggtgagtgagggagtaggtatacttggcaaatgcatggttctctgatttctagctctaaagcagccttatctgaatccccaaatcttgtgatgctgagtaccattactgaaccagtctgcacggtaggcatctgctaccaaaatttacctcctacctggtaggtgtcatctgataagaaagaagacaggttattttaattttttgagataatcacagaaaattgcagcccatactctttattaccgaattcaagtttggaaatagaccctttgttttaaatcatgatgggtctttatcccaatcatttatctgggtcatttttccaactttggagttctaggaaagaaccttgaaaacctgatatgattctgcagcatgaggtctacggtgaccatttgggcaaagctccagtggcaatcatttattgtgttttgcatttcctgggatttattgaaataagaattcactgtgattatgtagtcttctggctagtatcaggcagctctgcttttaatttggttaattttattttctctgaagagggagaagaggtacaatttaatcttggcctccacaagcatattaaagctcacgtgttaatcagtgcattcttatgctcctacattaaatgccttgggtaaatggataaatggacatgtgcccagctttaattttttttgcaacagaaagatcagacttccgtatggcatcgttggatttcagaggctttctggtgtatctgtaaatctgaatgttgccttctgccagtctgtataaccaggtgattcatgctgcaaatgaaatcaggaagcagtaaagtgttaaagcaagagtattgtccaattcacttgtcttcctgatccttgtactttatttcacgtgtcggtgtttacattacatacttatatttcctgtgaaagaaagagttaaataaattgtagcagtttgattttctttttcttaatgtgacattttctctt

SEQ ID NO: 415611 - DNA, 1748 bp, Homo sapiens
aaaaaaacaaaaccttaattatagcgcaaagaaaggccaggactgatgcagggattccttggaaatatcagttcctatcacttttaaaacctgattttggatctctctgttctatgtatgtctttagtgagagcacaatacatggcagaacgctgtgccaaatgttataggtaaggaatatagaaatgaatgttttttgttgtgaaggtgttttcatgtgatattttataaacacattttaaaaaatctccatcactttttagtataggaaggatagctttgcctgggaaaaacagtttcaacacacctgctcagagtagcagttctccctcaaaaaagcagtgttcagcctgcactgactgttctgcttgccaaaaggaggaagcatgcaagatacttatttctccatagattgtggagtatagagggatgtgggactacagattattattttttttccccgagacagagtcttgctctgtcgcccaggttggaacacaatggcacgacctcagctcactgcaacctctgtctcccgggttcaagcaattctcctgcttcagcctcctgagtagctgggattacaggcacacaccaccaccgcactcagctaatttttgtatttttagtagaggtggggttttaccatgttggccaggctggtcttaaactcctgaccttgtaatcatcccgcctcggcctcctaaagtgctaggattacaggcatgagccaccgcacccggcccagataatttttaatagcctttgatcatggggtgagtgagggagtaggtatacttggcaaatgcatggttctctgatttctagctctaaagcagccttatctgaatccccaaatcttgtgatgctgagtaccattactgaaccagtctgcacggtaggcatctgctaccaaaatttacctcctacctggtaggtgtcatctgataagaaagaagacaggttattttaattttttgagataatcacagaaaattgcagcccatactctttattaccgaattcaagtttggaaatagaccctttgttttaaatcatgatgggtctttatcccaatcatttatctgggtcatttttccaactttggagttctaggaaagaaccttgaaaacctgatatgattctgcagcatgaggtctacggtgaccatttgggcaaagctccagtggcaatcatttattgtgttttgcatttcctgggatttattgaaataagaattcactgtgattatgtagtcttctggctagtatcaggcagctctgcttttaatttggttaattttattttctctgaagagggagaagaggtacaatttaatcttggcctccacaagcatattaaagctcacgtgttaatcagtgcattcttatgctcctacattaaatgccttgggtaaatggataaatggacatgtgcccagctttaattttttttgcaacagaaagatcagacttccgtatggcatcgttggatttcagaggctttctggtgtatctgtaaatctgaatgttgccttctgccagtctgtataaccaggtgattcatgctgcaaatgaaatcaggaagcagtaaagtgttaaagcaagagtattgtccaattcacttgtcttcctgatccttgtactttatttcacgtgtcggtgtttacattacatacttatatttcctgtgaaagaaagagttaaataaattgtagcagtttgaaaaaaaaagtcgacgcggccgcg

SEQ ID NO: 415612 - DNA, 217 bp, Homo sapiens
gagaaaccaaacatgtttatgaaattaacacgttctgaaagattagcacatccaatctatggtaaattttagcaaattcaaaacagagtgaagcctgaactgtcattttccagcatctcatcactaagggaaggttgttttcaactggaaataactaattcctttatgctttattatttaaatttctgtttaagaataatgtgtagttattattttt

SEQ ID NO: 415613 - DNA, 443 bp, Homo sapiens
caaaagacagacaaaagcagaaatcatataatagagaatatgcttgccaaacacatgtacataatgttttctctctctccaaatttgaacaactgcttattgaaatcatacattatttattaacataattgtcaaagagaattttcaagatactcttttctaccttgttcataaatacatcttgaattatgggttgtctaaaagctaaaataaaaaatgaaagggttaattcacactaatctgatgtatggtctttaacaagttaaataatccctcattattcctccaatttaaaaatttatttctctctaacctttttatcttacctccagctagtgaactccagttagatagatgagaagtgttagataatttcttttcacaaataatctgaataaaaaagaatagaaagttattaatttctatatagtctggacattgcc

SEQ ID NO: 415614 - DNA, 2659 bp, Homo sapiens
taaacagcagtaagcctctctacctgggacagactggcctggggaatattgaagagcttggaaagctgggactggagcctggggaaaacttctgtatgggaggacctggcatgatctttagccgagaagttctcaggaggatggtgccacatattggtgaatgccttagagaaatgtacacgactcatgaggatgtggaagtaggaagatgcgttcgccgttttggtgggactcagtgtgtctggtcttacgagatgcaacaactgttccatgaaaattatgaacacaatcggaagggttacatccaagaccttcacaatagcaaaatccatgcagccataacacttcatcccaacaaaaggcctgcataccaatacaggctgcataattacatgctcagccgcaaaatttctgaacttcgctaccgcaccatccagctccacagggaaagtgccctgatgagcaagctcagtaacacagaagtgagcaaagaggaccagcagctgggagtgataccttctttcaaccacttccagcctcgggagagaaatgaagtgatagaatgggagttcctgacagggaagcttctatactcagcagctgagaaccagccccctcgacagagcctcagtagcattttaagaacagcactggatgataccgtcctacaggtgatggagatgatcaatgagaatgccaagagcagaggacggctcattgacttcaaggaaattcagtatggctaccgcagagttaaccccatgcacggggtggagtacattttggatttactccttttatacaaaagacacaagggaaggaaactgactgtgccagtgagacgtcatgcctatcttcagcagttgttcagcaagcctttcttcagagagaccgaagagctagatgtcaacagtcttgtggagagtattaacagtgaaactcagtcattctcctttatatctaattctttaaagatattatcttcttttcaaggtgccaaagaaatgggagggcacaatgaaaagaaagtacacattctcgttcctctcatcggaaggtatgacattttcttgagattcatggagaactttgaaaacatgtgtcttatcccaaagcagaatgtaaagttggtcattatccttttcagtagggattctggccaagactccagcaagcatattgagctgataaaagggtaccagaacaagtaccccaaagcagaaatgaccctgatcccaatgaagggagagttttccagaggtcttggtcttgaaatggcttctgcccagtttgacaatgacactttgctgctattttgtgatgttgacttgatcttcagagaagattttctccaacgatgtagagacaatacaattcagggacaacaggtgtactatcccatcatctttagccagtatgacccaaaggtaacaaacgggggaaatcctcccactgatggttacttcatattctcaaaaaagactggattttggagagactatggatatggcatcacctgtatttacaaaagtgatcttctaggtgcaggtggatttgatacctcaatacaaggctggggactagaagatgtagatctctacaataaagtcattctatctggcttaaggccattcagaagccaagaagtaggagtggtgcatattttccatccagttcattgtgatcctaacttggaccctaagcagtataagatgtgcttaggatccaaggcaagtactttcgcctcaaccatgcaactggctgaactctggcttgaaaaacatttaggtgtcaggtacaatcgaactctctcctgacagtccaggcaacacattttgccttttttaaggggagtttacctcattgttggttgttgttatttttattgtattattgttattttattattattattgttataattttattttgttgtcctggtcttaaactactcttggttgtcttcctaagggtgtttgttgacctcaagcaagaagagtctgcagttcactgatgtttcagatttctactgaagtcaatatgttattacttttatataactttatttgagattgagttaaatcatagcaatcaaatgacttttgaaacgcattcatcacaagagacagcttagaagaatgttctcttggggcttaaagatgcaatatcgacttttatttggtttctcaaattcaatgtgatacaaatatttactggtgaaaggtaccacaaaagtgctttatgcttcctatggggaagggactctgtaacataaacttgagttttgtaatttatacaaggacttaaatatataaacaataattttcttcatctttagaatttttaaagtaaatgaatacctatgattgtatgtttattttttaaaaaaagttttaaaaattgaggagttttgttccacaagcaaccggtactggctaccctggtcttatgacaattatgagctcctcacaactgtctgctataaatgcgaatgaactttattttctcaaggaaatatgatttaattaaatattcatgtacattttagaagctttatgaaacaatgtccttcatttgctggcaagaagataaaatatgacagaacctgtttatttaaaataaaacacaggtatagcagtattctttttcaaaaacactg

SEQ ID NO: 415615 - DNA, 301 bp, Homo sapiens
taaacagcagtaagcctctctacctgggacagactggcctggggaatattgaagagcttggaaagctgggactggagcctggggaaaacttctgtatgggaggacctggcatgatctttagccgagaagttctcaggaggatggtgccacatattggtgaatgccttagagaaatgtacacgactcatgaggatgtggaagtaggaagatgcgttcgccgttttggtgggactcagtgtgtctggtcttacgaggtaagcatggagctgtgatgaaaatgttcacatagtacatatacatg

SEQ ID NO: 415616 - DNA, 2438 bp, Homo sapiens
gcgccagcaggaagtgggagaagaggcgacccaaggcgggctggcgggctggcggcagtcgctacttgcctagtagcctcagccgctgtgggctcctggggagatggaggggccggggctgggctcgcagtgcaggaatcacagccatggcccccaccctccaggatttggtcgatatggcatctgtgcacatgaaaacaaagaacttgccaatgcaagagaagctcttcctcttatagaggactctagtaactgtgacattgtcaaagctactcaatacggaatttttgaacgatgtaaagagttggtagaagcaggatatgatgtcaggcaaccagataaagaaaatgtgtcgcttcttcattgggctgctattaacaacagactggatcttgtaaggttttatatttcaaaaggtgctgttgtagatcagttgggtggagatttaaattcaactcctcttcactgggccatccgacaaggacatttacctatggtcatattattactccagcatggtgcagaccccactcttattgatggagagggattcagcagcatccacctggcagtattgtttcaacacatgcctattatagcatatctcatctcaaagggacagagtgtgaatatgacagatgtaaatgggcagacacctctcatgttatcagctcacaaagtaattgggccagaaccaactggatttcttttaaagtttaatccttctctcaatgtggttgataaaatacaccaaaacactccacttcactgggcagttgcagcaggaaatgttaatgcagttgataagcttttggaagctggttctagcctggatatccagaatgttaagggagaaacacctcttgatatggctctacaaaacaaaaatcagctcattattcatatgctaaaaacagaagccaaaatgagagccaaccaaaagttcagactttggaggtggctgcagaaatgcgagctcttcctgctgctgatgctttctgtgattaccatgtgggctattggatacatattggacttcaattcagattcttggcttttaaaaggatgtcttctagtaacactgttttttctgacatctttgtttccaaggttcttggttgggtataagaaccttgtatacttaccaacagcctttctgctaagttctgttttttggatatttatgacttggttcatcttattttttcctgatttagcaggagcccctttctatttcagtttcattttcagcatagtagcctttctatactttttctataagacttgggcaactgatccaggcttcactaaggcttctgaagaagaaaagaaagtgaatatcatcacccttgcagaaactggctctctggacttcagaacattttgtacatcatgtcttataaggaagccattaaggtcactccactgccatgtatgcaactgctgtgtggctcgatatgatcaacactgcctgtggactggacggtgcataggttttggcaaccatcactattacatattcttcttgtttttcctttccatggtatgtggctggattatatatggatctttcatctatttgtccagtcattgtgccacaacattcaaagaagatggattatggacttacctcaatcagattgtggcctgttccccttgggttttatatatcttgatgctagcaactttccatttctcatggtcaacatttttattattaaatcaactctttcagattgcctttctgggcctgacctcccatgagagaatcagcctgcagaagcagagcaagcatatgaaacagacgttgtccctcaggaagacaccatacaatcttggattcatgcagaacctggcagatttctttcagtgtggctgctttggcttggtgaagccctgtgtggtagattggacatcacagtacaccatggtctttcacccagccagggagaaggttcttcgctcagtatgaagaaaagcaacccaaaactctcaatctgatttgtttttgtttatgtcgatgccctgtagtttgaaagtgaagtaaagatttagaattcacctaagtccaaaggaaaacacgtggtttttaaagccattaggtaaaaaaagttctcaataaaggcattacaattttttaggtttagaaagatggacttttctgataaatcttggcagacatctaaaaaaaaaaccatatttttcacaagaaaatgcaagttactttttttggaaataatactcactgattatggataaaatggaatattttcagatactatattggctgtttcaaaatagtactattctttaaacttgtaatttttgctaagttatttgtctttgttgtatctataaatatgtaaaaaatatttaaatagatgtacctgttttgctttcacacttaataaaaaatttttttttgtaaaaaaaaaaag

SEQ ID NO: 415617 - DNA, 1756 bp, Homo sapiens
caaatgtgaagttgtcagatgacatggcatgttttccgttgctcatgaatgtttagaagttggagaatgttgtctttgttacctaaagccagtgttcctgaaagacccagcccttggtgcttgtaactttcagttttgatgtatactggtgggtttttcttttttaatgtgtgtgtatatttgcatatttatttttctctagcagatcataactgggagatgattgccattcacagagatgaggtgataggtgggagtggtggggtggtataatttttatgcatcctaatttattagctgttggttgaaaatgcaaccttgaagagtcacatcatttcaagcacagaatgatttggtggcaagtattccaaattgcttttctaactacttcagtttggagcgagaactgtgagaatggtgtataaccatgcataatacattttccaataaaatgtggtaataggtcaaacttcatgtctttcagaatatcatcacccttgcagaaactggctctctggacttcagaacattttgtacatcatgtcttgtgagttttttcatataatttttttccgtagtgaaagcaaagtcttggtaacgttgctgatgtaagcatttgtcagatcttcatggtatatttatacacctttgtttttacccatttctaattttacattcctgtctgaacagctttctgtcttgaacatatggcagaatgatgtttataatctcttgaagttgtctctggttacatctctccgtgaattatccattgtgtgttttatttgcttttctctgtcatgaagcatatattagaactaacgtcaaatcagaggctcataatgaccttagaaaccacttagtgaaacctctcattttgcaattgaggaatcaagggaggaagtaaattctcccaaattattggtggtgataaaaatggaacttgggtttccttcccttggttgagtgcttattttgctctgtggtactgcctcatttctgcttagccagtatgaacaggctctggaattcagatcccacttagtgatgtcctaatcaaagtagacatatggaagtaaatactaataaggcattccacagcctctgtgtgaattgatggtctgtttaggatttgtgccaatgcctctgtgacctaaagttaaaattttgcttgtgatttgttaccactttgagacactggtttttgcttaggcctctcttaattgcccacttagataaggaagccattaaggtcactccactgccatgtatgcaactgctgtgtggctcgatatgatcaacactgcctgtggactggacggtgcataggttttggcaaccatcactattacatattcttcttgtttttcctttccatggtatgtggctggattatatatggatctttcatctgtaagtgtaaatttttcttacaacaagcacatacatctacacccatttctacttttccttgtaaacccttgtatatcacattctggctgggtgactataaaccatactcctaataaaaacaaagcaaatgcctctaagactccctcagcattgggaagctgcaagaaatacaagatgaggttagttctcagtactttaggaaaaaaatgtgataaatttgaaaagtagtcaaaaatagaaattcatttaaggcaagtgcagatttgctccccagtgaagaaggaaagtcagctgctgaagtacaaagctggaggtgataactgaataaaacaggaaaaaaaaa

SEQ ID NO: 415618 - DNA, 641 bp, Homo sapiens
caatgaataaatattagttcagttaacatggacaattgactgtgacatatcagaaatgtgtggtttgatttaatggtacttaaaagcaaagcaacagctttatttctgttttactttggtgaagacttttgacaggaaagtggttaaggaggtcttatgttgaaaatcagaagaaacgaaaatattaagtatgttttttttcttttttcttgaggttttggcaaccatcactattacatattcttcttgtttttcctttccatggtatgtggctggattatatatggatctttcatctgtaagtgtaaatttttcttacaacaagcacatacatctacacccatttctacttttccttgtaaacccttgtatatcacattctggctgggtgactataaaccatactcctaataaaaacaaagcaaatgcctctaagactccctcagcattgggaagctgcaagaaatacaagatgaggttagttctcagtactttaggaaaaaaatgtgataaatttgaaaagtagtcaaaaatagaaattcatttaaggcaagtgcagatttgctccccagtgaagaaggaaagtcagctgctgaagtacaaagctggaggtgataactgaataaaacaggaaaaaaaaa

SEQ ID NO: 415619 - DNA, 2274 bp, Homo sapiens
caaatgtgaagttgtcagatgacatggcatgttttccgttgctcatgaatgtttagaagttggagaatgttgtctttgttacctaaagccagtgttcctgaaagacccagcccttggtgcttgtaactttcagttttgatgtatactggtgggtttttcttttttaatgtgtgtgtatatttgcatatttatttttctctagcagatcataactgggagatgattgccattcacagagatgaggtgataggtgggagtggtggggtggtataatttttatgcatcctaatttattagctgttggttgaaaatgcaaccttgaagagtcacatcatttcaagcacagaatgatttggtggcaagtattccaaattgcttttctaactacttcagtttggagcgagaactgtgagaatggtgtataaccatgcataatacattttccaataaaatgtggtaataggtcaaacttcatgtctttcagaatatcatcacccttgcagaaactggctctctggacttcagaacattttgtacatcatgtcttgtgagttttttcatataatttttttccgtagtgaaagcaaagtcttggtaacgttgctgatgtaagcatttgtcagatcttcatggtatatttatacacctttgtttttacccatttctaattttacattcctgtctgaacagctttctgtcttgaacatatggcagaatgatgtttataatctcttgaagttgtctctggttacatctctccgtgaattatccattgtgtgttttatttgcttttctctgtcatgaagcatatattagaactaacgtcaaatcagaggctcataatgaccttagaaaccacttagtgaaacctctcattttgcaattgaggaatcaagggaggaagtaaattctcccaaattattggtggtgataaaaatggaacttgggtttccttcccttggttgagtgcttattttgctctgtggtactgcctcatttctgcttagccagtatgaacaggctctggaattcagatcccacttagtgatgtcctaatcaaagtagacatatggaagtaaatactaataaggcattccacagcctctgtgtgaattgatggtctgtttaggatttgtgccaatgcctctgtgacctaaagttaaaattttgcttgtgatttgttaccactttgagacactggtttttgcttaggcctctcttaattgcccacttagataaggaagccattaaggtcactccactgccatgtatgcaactgctgtgtggctcgatatgatcaacactgcctgtggactggacggtgcataggttttggcaaccatcactattacatattcttcttgtttttcctttccatggtatgtggctggattatatatggatctttcatctatttgtccagtcattgtgccacaacattcaaagaagatggattatggacttacctcaatcagattgtggcctgttccccttgggttttatatatcttgatgctagcaactttccatttctcatggtcaacatttttattattaaatcaactctttcagattgcctttctgggcctgacctcccatgagagaatcagcctgcagaagcagagcaagcatatgaaacagacgttgtccctcaggaagacaccatacaatcttggattcatgcagaacctggcagatttctttcagtgtggctgctttggcttggtgaagccctgtgtggtagattggacatcacagtacaccatggtctttcacccagccagggagaaggttcttcgctcagtatgaagaaaagcaacccaaaactctcaatctgatttgtttttgtttatgtcgatgccctgtagtttgaaagtgaagtaaagatttagaattcacctaagtccaaaggaaaacacgtggtttttaaagccattaggtaaaaaaagttctcaataaaggcattacaattttttaggtttagaaagatggacttttctgataaatcttggcagacatctaaaaaaaaaaccatatttttcacaagaaaatgcaagttactttttttggaaataatactcactgattatggataaaatggaatattttcagatactatattggctgtttcaaaatagtactattctttaaacttgtaatttttgctaagttatttgtctttgttgtatctataaatatgtaaaaaatatttaaatagatgtacctgttttgctttcacacttaataaaaaatttttttttgtaaaaaaaaaaag

SEQ ID NO: 415620 - DNA, 674 bp, Homo sapiens
agctgcctcctctgcagaaggagcctactatggggaatgttaggataacatcagcacccacaccaggaggatacctctggggtgacggggcgaggcagaggttgaggggcattcctgttctttgctgaaagggctgtgggaggggcaaacaggactcctagccctgtggcctcctccaggaatctcctgtaggttatcttcctttaaggtttttctggtcattgtagtaaaacaaactgttgacccttgcgcttagttatgtagggtctgaaacatgcctagtggtagggagacaacagcatctagcatgttgtttcttttccggccttgcttagagttctttagtagggaaaaaaaagttatataattattatgcccccacgaaaaacaaaacgtcaccagtgcaaaggccctatcttgagctgggcctgaaggttgaggtgctttgagaggaggaggatcaggggagtaagggacacaaggtgactgatgttcctgaaggacagggtgcaggtgagtgagaagaggatgagctgaggtcagtttgcagcagtgacgggaatgggaatggcagtgatagaatcaaaggattttatatttagagaagagtttattatgatccacctgtctcactttatggatgagaaaacagtctgcaagagtttaagtagctt

SEQ ID NO: 415621 - DNA, 1152 bp, Homo sapiens
cccaaatcgccctgactgttctctgccttgagtccccaaatccctgccgtggggcgcagcctgtcatgcatgggccaggaggacagccagcacacggggcagatgccgcaggtcatccagctacgttttctgtgcattcatctcaggaatacgggtttccctgcacacttaaatctacgtgtaacccaagtttatagacctgctgggaagtggaaggcagttggttgcctttctcaaaggctgctccatgagcaagatgcctttcatctagaccattccgctggaagcatctgtcagaccagagtagtgcatcagtctaaagtcagctctctcttctctggtttagggtggtagttgtgtgctttggttctgtttagctgagtgggtgaatgaaagtaattaagataccctaaatagggtctttagctaaacggtcacctccctgcctaattgtgacaccaataaatccaagaaaggggaggacagtggcagcaggtcacagtgggaggatcatggcttggagcaaagacaagggctgtgagttccagccctgccaccattagctgcagtgtttgcgcagttggtttcacctcccaggtcttcaggttcttcatagggtcagaactccaggtagatcattcctgggcttccttcagcttgaaaaatctctgcctcaaccatattctaatcacaacattactataaaatgataggcatgacttctatatttacaaaaagccataatgtatttcctcactctctgtaggaagacatttgaattgttacattctttactttgctctaaagcaaggttgtggaaggtttcaggtgccagcaggtttctcagggctagagtctgtaacaaagagatcctggaaaactggagagaggttggggaggagaggaatggacacagcgtggttctggtcccacagaggtcctattgtctgtaagaatttgatgttggctaaaagagacatcaggagtcactggggagggagaaattatgctgtaatggtcagggaaagtggttagactttttcaaaaacaaacaaaatgtaaaattttacatcttcactttaccctatatagccaacttaaactccaagatagatctaacagtaactctttgttaaaaaaaaaaaaaaaaaa

SEQ ID NO: 415622 - DNA, 373 bp, Homo sapiens
tactactaaattcgcggccgcgtcgagcatgacttctatatttacaaaaagccataatgtatttcctcactctctgtaggaagacatttgaattgttacattctttactttgctctaaagcaaggttgtggaaggtttcaggtgccagcaggtttctcagggctagagtctgtaacaaagagatcctggaaaactggagagaggttggggaggagaggaatggacacagcgtggttctggtcccacagaggtcctattgtctgtaagaatttgatgttggctaaaagagacatcaggagtcactggggagggagaaattatgctgtaatggtcagggaaagtctaaccactttccgtcgacgcggccgcgaat

SEQ ID NO: 415623 - DNA, 355 bp, Homo sapiens
ggacgccatgtgctgggggagcacttgcagcacttgcattgagtaataaactcctgtctgcattgcagctgctgggggtaggtggtggagggatattgcccacagtgaatgacctccccaggcaaggtggcaggaagccggagacaggcatcagctcagcatcctccaattagctgccatccctgaccccatcaaggctggaggaagtgctggcgcttaccagcactcaggcccacctgcctggagggctggcagactcagcagttggggtggcggcacctggaggtcttggcctaacagagcctcacttattccagagatctgtaaagggttagtgggtggggggctggcaggc

SEQ ID NO: 415624 - DNA, 353 bp, Homo sapiens
ctaatttaaaaaactatattaatctgcctttaacaagttattttcagttaaaagtaataatctttttggatgtagctggagggaaggaattaatacttcagagaagttagatcatgtttattttaaatagtgagtaataaaattttcattaatgtgtttaaaaataaccttcacatgtaccccataaatttgtacaaatataatacatcaaaaaaataaaaataacaactacccagacaaatttaattcaaaatttttttggccattcccttaggaaaccaactttctgtttagtgaaaaagaccactatagtatggagcctttatcactagaatgcagttgaaaatagaggc

SEQ ID NO: 415625 - DNA, 456 bp, Homo sapiens
cagtttaaagatactatgttttgcaagtctgagaaaggtgacgagtgaacttcattaccatgaattcttagctacacattatattgtctttatttgtaaccttctagatttatgctaatgcagaaatagctctttgatgaaaagtttttgaagagtagacctttttcccctttatatgcaccatgtaccagaggtttgcacatattgagcactgtaaattttacatttaaagtaatataaaaagatgtgaatttttatgacatttatttggaatgccattttgtgttttgactcaatcgttcattagctatagttaaattataaatttgtaacgattacaaagatttcttagtctgggtcatggtggctcacacctgtaatcccatctctttaggaggccaaggcgagaggatcacttgaggtcaggagttcaagaccagcctgggaaacatctat

SEQ ID NO: 415626 - DNA, 443 bp, Homo sapiens
gagcacttaactatgtgtaaggcactgtgtttataagaataaccttaaataatcctcacaaagtttacattatacagaggaagaaaatgagttcttcatttcttcattttcttcttaatttgttaagaacatacagttaggaaggggcagaactggcactgagtcccagatttccaactttaaaactccatgcccttaatagccattttcctactctacctcagggttcctgctcaaggaatgtatagactagtaggcagattatgtgaaagcaagtaaatatttcctgtaatggaagtgtgtacctagtggagcgggcacatggggaaagaatcacctgagttggcctgggtaagtcactgaaggcttcatggaggtgattgtgcctgagctgaaagtagaaaaatgtgtaggtatttatggtaaatcttgggcaagcctgg

SEQ ID NO: 415627 - DNA, 1272 bp, Homo sapiens
attttaagccacttgtttggtgttatggattttaagaatcagttggtgttagaatttttaataacacagagaaagccattgaatatggaactcaaattatctaaggtttacccagaagtcaaaatcacctggccctctgtaaatttctctttgtgttcctaggcccacaaagtctttggtctgaagactcagagcttaaattgcattggtcctgttaatctttgtcaaaaaggaagtttgggcggcagtttcagggtagtgttgagaagataactcctggtcccattttattctttcctcatttgttcagtgctcatggccatctacaaccttccttgattctattctgcctaagcctcttatttccacatctataagtatagtgctacataataattacaacctttaagaaaatggagagttttcattaaagggcccctgcaaatctatgatgctagatgacagattctaccagaaggccagagtattaatagcacccgtgataactgtaataagaatatgtctcgttttcttttaaagacatagatattccattttaatcctgtataactcaaagaaaatttgggtgttaacactttgaaatacctttacctcctttgggggaaatccaaactgaaaggaattaatatccacatcagttcctaaagcaaaatgcctgacacagactaacaaagctctttctcatcctgtggtaggaacttaggagtgataactcacattgagaacttgtgatctgaaagcactaaggaatttctgccattgcaggtaggaaaaaaaaagacaaaaatggtattctcaggtgagcttacctttcaaatttttctgagacttcctaaatgtgacaagaactctgctgtgtggcaaccttatgtatccacaacagaactaaggaccgaaaaaaaaaaaaaaaagatctctatcccaatagattttataaaatccatactctaaaactcctgagttttacatgtaccctaaaacttaaagtatagtaaaaaaaagaaaagaaagaaaaactctttaaccctttgtttaaatcctattaactcttaacgatacacagttcgaattatctaaatgaaataattttcaagcacataacagattagaaacagagaatgagaaaggtatagtagatattatgtaaataagcagaaataatggcaataattaaacacactatctctacctaaaagaacagagatagaaaactcatataaaaatctaaactacagttttatggggatagtt

SEQ ID NO: 415628 - DNA, 884 bp, Homo sapiens
ttctggcttgtagggtttctgccaagagattccttgttaatctgatgggcttccctttgtgggtaaagtgacctttctctctggctgcccttaacattttttccttcatttcaaccttggtgagtctgatgattatgtgtcttggggttgctcttctcaaggaatatgtttgtggcattctctgtatttcctgaatttgaatgttggcctgacttgctagattggggaagttcttctggataatatcctgaagagtgttttccaacttggttccattctccctgtcactttcaggtacaccaattaaatgtagatttggcactgttcatgacttcaggtaaagatggctcatatttgacagcttacagaataacatgagagtgttataaacacacattcccccctccccacctttatccttcctgaattgctttacaagccgtttaagaacaatttaatattcctgtgtgcagcagttcagttttcttgttttgctttctctcatttttctctttaaggctcaattgtctgtttattttcatttgtatttattattgttgttaagtgacaaatggtcattgaaacataataccttacagtaagtaacctcttttttgttcagtacaattctatagtttttgtgagataaggaactgattctgcttactatttctgtcacattggtagaaaatgtatagcccctatttgcaacaacacgtgaatcatattgagaggaggccagtctgaattatattttttatggaaaaatactttgaaataacttaggcacgaattttaagtacatttcttctgcagttgttttagtgaatgtaatgtatttaaattttaaataaaggacatttattaacctgcaaaagtgctga

SEQ ID NO: 415629 - DNA, 387 bp, Homo sapiens
ataatggctcatgtgaatgtttccatgagaatcttatagtaactgtatcacagtttattcattaattctctactgatgaacgtttacttttttgtgagatcttgaccatcaggaacagtattgcattgcacgtccctgtattttaagttcacatatactggtacttttatttcagtgggctggatttccagggatcttaatggataaggaatagatttgaccaggaatgtgttcaattactgttatatgaagaatcttgaagcaaaaaacattaaatatgaggaagttattttctaaagacagggtttcattcctgttgtcccagctggagtgagccaagatggcaccactgcactccagcctgggtgacaaagtgagagaccttcc

SEQ ID NO: 415630 - DNA, 500 bp, Homo sapiens
gtgggctcttcaaagtagaggatgctctatacacaaaggagtttgttctttgaattatcttttatttattgacagctggggtgatgcagggctgtttcctgtgttaagagagtgtcagttacttagctaatcatatttatcacccaggattctttatttgttgatagcactggagtatattggagtttttgtgtgctacgtgtatatttccctagctgcagtgaatgtggtttttatatttatgtgaaactgctaatgtgttgctcgctagatcatgagcaatgggcttctgacagctctgttcattagtcagcttgggggaaaaaataaaagaaaacacattgatatagaaacagagtgtgagccagcaattatcatcagagagcacaattgaagccacattttatttaaatatttatcttgtgaattgattcatacaaaacaagaagctgttttttatttatgaatggcttcaccgccgaaatttgaagagcaggaac

SEQ ID NO: 415631 - DNA, 1135 bp, Homo sapiens
cacaacatgtcacaatttagtgaggagctacatgtatttccaagaattccagcatagattataatttaaataatcgaattggtatttaggtacatgtttatatagccaagtgtatatgctttactacctaacaattattctagcctaggtgaatccctaattgaaacacctggctaacactttagacacataaattaagtgggatacagttttctcatttgtattatctccagcttcaacctcatttatcctttttcctagtataatacattgttttcaaccagaaattaaagtagatatccaacattattttcagtgcttgtacttcatgagaaataatctgattttcaagacacctcttaagtgcatttgcattttattttggtaatggcagagacctcatgtggccagtttgattgattgaagaatgtatcactcttattcaagcaaaggaattcagacttaaatgcctacctctgtgctgaagctgacagacagtattaactcttatcaaggccatcttttagacctgattttcatttatatgaaaacagacctgtccatgtctaataagtaaaaactgatagaatacattaaaaagtcactggtttatcatagaaaagtttgatgggtttagagctcagtgatttaagcttgtaaaactgcattcttgggcaaaatatttatattgtatataaatggttggcagcttattccagttgatctcttcacatctgccttaaaagtgctatgtagagatacattaacagagttataataaaacagtgttttaaaatctagcctataaacaaaaactagtttgaggcacccaagcatttagtgagagattgagaatgatgcttaatggatcaaaaaagcaattaggagtatgttcctgattttattctctaaattatactcaatttcatggtaattacatgaagaagttacctgcaattattcttaacactacatggaattcactgggtaattgtgggtcatttatttcctgaaagtcacgtgaaatccttagctggttgaatgttgcacagtatttgagaattacggtttgaagtgatttctgtgggagggaatcattgcaatgtatattctaaataaagtcatctaactatta

SEQ ID NO: 415632 - DNA, 3579 bp, Homo sapiens
cacaacatgtcacaatttagtgaggagctacatgtatttccaagaattccagcatagattataatttaaataatcgaattggtatttaggtacatgtttatatagccaagtgtatatgctttactacctaacaattattctagcctaggtgaatccctaattgaaacacctggctaacactttagacacataaattaagtgggatacagttttctcatttgtattatctccagcttcaacctcatttatcctttttcctagtataatacattgttttcaaccagaaattaaagtagatatccaacattattttcagtgcttgtacttcatgagaaataatctgattttcaagacacctcttaagtgcatttgcattttattttggtaatggcagagacctcatgtggccagtttgattgattgaagaatgtatcactcttattcaagcaaaggaattcagacttaaatgcctacctctgtgctgaagctgacagacagtattaactcttatcaaggccatcttttagacctgattttcatttatatgaaaacagacctgtccatgtctaataagtaaaaactgatagaatacattaaaaagtcactggtttatcatagaaaagtttgatgggtttagagctcagtgatttaagcttgtaaaactgcattcttgggcaaaatatttatattgtatataaatggttggcagcttattccagttgatctcttcacatctgccttaaaagtgctatgtagagatacattaacagagttataataaaacagtgttttaaaatctagcctataaacaaaaactagtttgaggcacccaagcatttagtgagagattgagaatgatgcttaatggatcaaaaaagcaattaggagtatgttcctgattttattctctaaattatactcaatttcatggtaattacatgaagaagttacctgcaattattcttaacactacatggaattcactgggtaattgtgggtcatttatttcctgaaagtcacgtgaaatccttagctggttgaatgttgcacagtatttgagaattacggtttgaagtgatttctgtgggagggaatcattgcaatgtatattctaaataaagtcatctaactattaaaaaaaaaacacccttcctaacccttcttttcttaaaattccacattcatccacaatctcatccctttgtagaaattcttgcctgaattctcaccaagttttgaattcctaaggtagccccgatctaggatgtgaaggctgcccagaaaaagtttatggctggaggagtatcatacagtgtctacatatgatagtacttacagattaggtctttggatgctttaacacaaaagatttttgttatccttattagtcaaataacgctattcttttgtggttctagaccctggcttctatctccctgtgatttgttttaatgctgaaatgacttggctatccaaagcttctagtctagaggtctgttggttgaaggcagacatttccaagtttgttgaaataatacgaagctgactagcttacgtgaatgatgttgccctcatttgttttgggtgaggactcattactgcagtatattgatctcttcaccaaatgctttttctttttctgaataaatgctgtattagaggttctatttatatatgatttttaaaactttggtttccttctatccaccaaatactgtgaattgtttttccatttatttttcttagctaatgtaactttattcttcacttttttttagccctagacttcctagattttctgtggcattctgtaggacattgtattgcttggaaaaaaaaagatcaaaatcattctggggcaaatgctctattatccttatttatgacaagagaataatgaaattcataagaaattaataacattcagatattgctataaatgtacttgagtcattttcatttggggatagtaataatggctgtggcagctttaatggagaaacctgtgttggcctctttttctggcattaggatctcttgtcatagaactattggtaaagtacaggtttgatagcagagttcctgaattcagcatatcatcagaatttccatttaccttttgtcttttctttttattgtattttttaacctttttgtttctattcctacctcccatgagtaacattgatttctgctgaagttagaatttgtgttaagaattgactttaaatttctgaaatagttgaatattagaagtggcttcagttgccatgaaatgattgcttttctttttctttttttttccttaaataaaaataatgcagccttatatatgtctcttcccctcaagaatgtgaatttaggctgggcatagtgactcacgcctgtaatcccagacctttgggaggctgacacgggaagattgcttgagcccaggaatttcagaccagcctgggcaacacaggaagactccatctctacttaaaatatttttgttttttagccaggtgtggtggtatgtgcctgtagtcccagctacttgggaggctgaggtgggaggatcacttgaacccaggagtttggggtgcagtgagctatgattgcgacactgcactccagcctgggcaacagagcaagaccctgtctcaaaaaaaaaaaaaaaaaaagaatgtgaatttagctccaattccaaatgactaactcttaggccagtcatagccaatgaaatcatctgacggtagcttctgtagcccttaacctaaggagtcattagaggttatagtaaattagtttctctagtggtgcagagagaaatgccatcggggaaattatcactgtctttttggctaaagttttatattgtgaactggatcccacttaacagcttaaaaacacaaaaatgaaagggtagtcctagtttatcttcttaattagaatcattatttggaaataagatttgcaatgtgctgtctatccccaaacactgctgagcttgctggaaaacagaatttaacatgaatgttgtctgaaagctgtaggatcaatggcaaaaaaggggaaatgtttggtagggaattggaccagttctaaggtatcacttttaattataaaataatgtcttcctttttatctgcttttcagacagcctcagtgaactattaaacatttgtgtgcaaagtcctattttgcttatctaaggcattttgacttggaagtattaaacttcaggaacgagctagagaagacaatgagggtatgttagagaaggaaaaataggagctttttgcttatggattttagaggtccacaaatcgaaaggaaaaataaatttcttcatttctaaccctaaaataattttgttaatgagatgctgggaagaagactaccaaaaggcctcaaagctcatgcttctagaatattcagtaattctgaatagtctttgggaagtagcatttcttgggaagtagcatttcccttctcccaaataactgtttgagatcttaaaacagaaaatccagtgttaatgggctctagatcttaaactaggtgagcagcttcttacatacaaccagttccttg

SEQ ID NO: 415633 - DNA, 416 bp, Homo sapiens
tcccattctcatctttcctatcaacccacaaacatgctgaaacatgttgctcctatcttagtgcagtggctcacactagtaatcccagtactttgggaggcagaggtgggaggatagcttgaggccaggagtccaaggctgtagtgattcatgattgcgccactggcaccccagcagcctgggcaacagagcaagacccccctcttttaaaaccacacacacataattaaaattcctcttaactcacttccccctccatttattgcccaatttctctaccctccatttataataaaatttcgtggtggctcactcctttaggcccagcgactccaaaggagggtcgcttgaggccaagagatcaacgctgccatgggctaggatcatgccactgtactccagcctgggccacagag

SEQ ID NO: 415634 - DNA, 297 bp, Homo sapiens
ctcgtgcgcttttggtgacagctaatgtttccaacaaaggccaaatccatcccttcttacctactctaggacattgctctagccattgtcttctttccgacatcaactttcccattctcatctttcctatcaacccacaaacatgctgaaacatgttcctcagtctcccaaagtgctgggattacaggcgtgagccaccgcgcccggcctctcacttcctttcttagccagcttaaattccatggtcaatcattaagagaactcctttgtacttctccccctcacttcttcatatcc

SEQ ID NO: 415635 - DNA, 296 bp, Homo sapiens
aagtcactaaagtaagcaaagaagagatgactgtggtttggaatccacctgaatatgatggtggaaagtctataactggatactttttggagaaaaaggaaaagcattcaacacgatgggtccctgtcaacaagagtgcaatccctgagagacgtatgaaagtacagaatctcctcccagaccatgaatatcagttccgtgtcaaggcagaaaatgaaattggaattggagaaccaagcttgccttcaagaccggtggtggcaaaagaccccataggtaggatgtccttgtttttt

SEQ ID NO: 415636 - DNA, 6163 bp, Homo sapiens
ggaggccggactggactaagggggcaggagcggcgcctggggcgctgcggcggggctctagaccgcgggaagccagtgctagcgctggcgcgtggtgggcccctgaggccgccggagtccggagaggtacgcggaatccgcggcgccaggcctgagcggtgggagggctctgcggggcctggtgttcaggcgtcccaccacgagggtggagcagcgttggatacttgttccttagggaccgaaggctccggtggcacccgggctatttctcagaggacaattagtaacgtgtcgccatgaggagccggagtaactccggggtccggctggacggctacgctcgactggtgcaacagaccatcctgtgccatcagaatccagtgactggcttgcttccagccagctatgatcagaaagatgcttgggtccgagataatgtgtacagcatcttggctgtgtggggtttgggcctggcctatcggaagaatgcagaccgggatgaggataaggcaaaggcctatgaattggagcagagtgtagtgaagctgatgagaggactactgcactgcatgatcagacaggtggataaagtagaatccttcaaatatagtcagagtactaaggatagcctccatgcaaagtacaacaccaaaacctgtgccactgtagtgggtgatgatcaatggggacacctgcagttggatgctacctctgtgtacctgctcttcttagcccaaatgactgcctcaggactccatatcatccacagcctagatgaagtcaatttcatacagaaccttgtgttttacattgaagctgcatataaaactgctgacttcgggatatgggaacgtggagacaagaccaaccaagggatctcagagttgaatgccagttcagttggaatggcaaaggcagccctggaagcattagatgaactggatctgtttggtgtgaaaggtgggcctcaatcagttatccatgtcctggctgatgaagtacagcactgccagtctatcctaaattcactactgccccgtgcttcaacatcaaaagaggttgatgctagtctactctcagtggtttccttccctgcctttgcagtagaggatagccagttggtggagctcacaaaacaggaaatcatcaccaagcttcagggtcgttatggttgctgtcgctttctacgagatggatataaaactcctaaagaggatcccaatcgtctgtactatgaaccagctgagctgaagctatttgaaaacattgagtgtgaatggccattgttctggacatactttattcttgatggggtcttcagtggcaatgcagaacaggttcaagaatataaagaggctcttgaagcagtcctcatcaagggcaaaaatggagtcccacttctgccagagctgtacagtgttcctcctgacagggtcgatgaagaatatcagaatcctcacactgtggaccgagtccccatggggaaattgcctcacatgtggggtcagtctctatacattttaggaagcttgatggcagagggatttttagcccctggagaaattgatcccctgaatcgcaggttttctactgtaccgaagcccgatgttgtggttcaagtctccattctagctgaaacagaagaaatcaagaccattttgaaggacaagggaatttacgtggagaccattgctgaggtataccccatcagagtacaaccagctcgtattctcagccacatttattccagcctaggatgcaacaatagaatgaaactcagtggacgaccctacagacacatgggagtgcttggaacttcaaaactctatgacattcggaaaactatctttactttcactccacagtttatagaccagcaacagttctacctggctctggacaacaagatgatagtggaaatgcttagaacagacctctcctacctctgtagccgctggcggatgacaggccagcccaccatcaccttccccatctcacacagcatgcttgatgaagatggaacaagcttgaattcaagtatcctggcagcactccgaaaaatgcaagatgggtattttggtggggcaagggttcaaacaggtaaattgtcagagtttttgacaacatcttgttgcacacacttgagcttcatggaccctggacctgagggtaagctgtacagtgaagattatgatgacaactatgattacctggaatctggcaactggatgaatgattatgattcaaccagtcatgctcgctgtggtgatgaagttgctcgttatttagatcaccttttggcgcacactgctccccatcctaaactagcccctacctcacagaagggagggctagatcggttccaagctgctgtgcaaacaacctgcgacttaatgtccttggtgaccaaggccaaggaactgcatgtacagaatgttcacatgtatcttcctacgaagttatttcaggcttcccggccttcattcaacttacttgattcacctcatccccgacaggagaaccaggttccctctgttcgtgtagaaatacatcttcctagagaccagtctggggaggtggactttaaagcactggttttacagttgaaggagacctcaagcttacaggaacaagctgatatcctctatatgctgtatactatgaaaggacctgactggaacactgaattgtataatgaacggagtgctacagtgagagagcttcttaccgagctgtatggcaaagtgggagaaattcgtcactggggcctgatccgatacatttctgggatcttaaggaagaaagtggaagcacttgatgaggcctgcacagaccttctctcccaccagaaacatttgacagtaggacttcctccagaacctcgagaaaagactatctctgcacctctgccctatgaggcgctcactcagctgatagatgaagccagtgaaggggatatgagcatttcaatccttacacaggaaataatggtatatctagccatgtatatgcgaacccagcctggcctctttgctgaaatgtttcgacttcgaattggtctgatcatacaagttatggcaacagaactggcccactcccttcgatgctcagctgaggaagccacagagggcctgatgaatctcagtccttcggccatgaagaatctcctgcatcacattctcagcggcaaggagtttggagtggaacgaagcgttcgtcccactgattcaaatgtcagtcctgctatttctatccacgagattggtgctgttggagcaaccaaaacagaacgaactgggatcatgcagttaaaaagtgagataaagcaggtggaatttcgtagactgtcaatctcagctgagagtcagtcacctggaacctctatgactccaagtagtgggtcctttcctagtgcatatgatcagcagtcatctaaagatagtcgtcaaggtcaatggcaacgccgaagaaggctggatggggcactgaatagagttccagttggattttatcagaaagtatggaaagttttgcagaagtgtcacggactttctgttgaagggtttgtccttccttcctctaccactagagagatgactccaggtgagattaaattctctgttcatgtggagtctgtcctgaatcgtgtacctcagccagagtaccgtcagctgctggttgaagccatccttgtcctcaccatgctggcagatattgaaattcatagcatcggaagcatcattgctgtggaaaaaatagtgcatattgccaatgacttgttccttcaagaacagaaaacccttggcgcagatgataccatgttggcaaaggatcccgcatctggcatctgtactcttctgtatgacagtgcacccagtggcaggtttggcaccatgacctacctctccaaggcagccgccacctacgtgcaggagttcctgccccacagcatctgtgccatgcaatgagggctttggttcctggcttctgggagccttttgacagctggtccctgcctcggttgattgtgcatggaactaaaatgttattgcctaatcactccaaccctgcccctttctgtcccatccttcccaagaagagagaactttttcgataaactaactactgtagaagaagtgaacacttacctggaggctcaccttgcagaaccagtgacaatcttatgagtataatgaacactcagccaggcctgtcatgattggctttatttctttcatcattcataaaagtttgcatgtgtttttattctctagatctgttaccaatatagttttctaactcctgtttggggagcaagtgttaataataacttattcctaaagcttggtttttcttttttgtgattttattgtgtatatgagtggtgggtactttgggacattatttcaaatgagtaaactctaaattgttaaatatttatgctgctataaattagaattacctattctacgtgccttttcttaggaaaagagagtactggatcatggttttcttccttacttacaggttgcttcacactgagtgataatttaaaattgtttctatgtagaatcattgtctctactgttgccctctctgtgtctgcacacataatgcctctctcactttggtgaaatatcaaaaaaatgcaagtacagcatgcatatttaagaatttctgaactaacacttgaaatcacattttataaagattgttggtactcagagttgtatttgcagcagaaaatgcagaataacccagaaatggagcccggagcccaattccagagaggaagggaaagaagagacgatgcctggacaatgtcttatacatagggaacagagagggaatcagaggtggcttagttccctgaagacagccttatgcgcttaatccctgcctttgaaaaatgggccaatacacaacacagacaataatttgaagcgtctgtattcagcaaagataaatacagcagtccagtctataggtgctctacttagcattcttttcatgtgctcctggtctctgtctcactcacctactttctactacatccaactcaactccctgacaccctatccccccatctattcttaaactctttcatatatattttcacttcctaattctagtgtacatatccctgtatatcatggtatctgtgggcatatgtctgtttcttataaagacacatattgtgtgtgtatgtgtgtgtgtgtgtgtgtgtgtgtataagcatacatgggaattttctgaatgtaagcagtttgatgtgtctgtatatcaatctgtatctacatttgatggactgagtaagaatgttgcatgtgagagaagggatgtgactgtggactcagattgacacacacagattggtggaagaatagcttcagtcctcttccttcatcccatatgtaggtagccttgcttgacaaagtgtttcttctaactctccttcttctgaattgtgcagagactctgttaacttccctttttggcacttagataacttcctattcaaccccctcctttatcttggatttctaaagtttttccccaatattgggaatggtgaggggtggggatgagagactctctgaacaattcttgcagaaccagtgacaatcttatgaatataatgaataagtaagcttatgagggtgatagaatacagatagtagaaacaaagagaggacagcaaaccttttcagcacttctctcagagcaaatggaaacacacagtaagtagctttctgactacattattttctggtcacttttaaagaaagtttacaacctgttctgaaactatttgtcttttcactggttgtaagtgtaccccaatctcagggagtatatctgtagtgccacaggcaaaagatccactccttcccacactcatttgcctgaacttactcgaagggctgcatttctctgagtttacgaaattgtgtcattatggtccccatacagtggtatttaacttttaaagcaacttttaagaaaactcgacttgttttttgttcattttaagtgtgtggtactaaaaagacatgttagactttttttaaaaaagcacttatgttttgaaaatagaataaataataagaatttccaattaaatcatgtctggtgccaatgtgcaaaacttcaaaaaaaattt

SEQ ID NO: 415637 - DNA, 5818 bp, Homo sapiens
  misc_feature (5706)..(5706): n is a, c, g, or t
ggaggccggactggactaagggggcaggagcggcgcctggggcgctgcggcggggctctagaccgcgggaagccagtgctagcgctggcgcgtggtgggcccctgaggccgccggagtccggagaggtacgcggaatccgcggcgccaggcctgagcggtgggagggctctgcggggcctggtgttcaggcgtcccaccacgagggtggagcagcgttggatacttgttccttagggaccgaaggctccggtggcacccgggctatttctcagaggacaattagtaacgtgtcgccatgaggagccggagtaactccggggtccggctggacggctacgctcgactggtgcaacagaccatcctgtgccatcagaatccagtgactggcttgcttccagccagctatgatcagaaagatgcttgggtccgagataatgtgtacagcatcttggctgtgtggggtttgggcctggcctatcggaagaatgcagaccgggatgaggataaggcaaaggcctatgaattggagcagagtgtagtgaagctgatgagaggactactgcactgcatgatcagacaggtggataaagtagaatccttcaaatatagtcagagtactaaggatagcctccatgcaaagtacaacaccaaaacctgtgccactgtagtgggtgatgatcaatggggacacctgcagttggatgctacctctgtgtacctgctcttcttagcccaaatgactgcctcaggactccatatcatccacagcctagatgaagtcaatttcatacagaaccttgtgttttacattgaagctgcatataaaactgctgacttcgggatatgggaacgtggagacaagaccaaccaagggatctcagagttgaatgccagttcagttggaatggcaaaggcagccctggaagcattagatgaactggatctgtttggtgtgaaaggtgggcctcaatcagttatccatgtcctggctgatgaagtacagcactgccagtctatcctaaattcactactgccccgtgcttcaacatcaaaagaggttgatgctagtctactctcagtggtttccttccctgcctttgcagtagaggatagccagttggtggagctcacaaaacaggaaatcatcaccaagcttcagggtcgttatggttgctgtcgctttctacgagatggatataaaactcctaaagaggatcccaatcgtctgtactatgaaccagctgagctgaagctatttgaaaacattgagtgtgaatggccattgttctggacatactttattcttgatggggtcttcagtggcaatgcagaacaggttcaagaatataaagaggctcttgaagcagtcctcatcaagggcaaaaatggagtcccacttctgccagagctgtacagtgttcctcctgacagggtcgatgaagaatatcagaatcctcacactgtggaccgagtccccatggggaaattgcctcacatgtggggtcagtctctatacattttaggaagcttgatggcagagggatttttagcccctggagaaattgatcccctgaatcgcaggttttctactgtaccgaagcccgatgttgtggttcaagtctccattctagctgaaacagaagaaatcaagaccattttgaaggacaagggaatttacgtggagaccattgctgaggtataccccatcagagtacaaccagctcgtattctcagccacatttattccagcctaggatgcaacaatagaatgaaactcagtggacgaccctacagacacatgggagtgcttggaacttcaaaactctatgacattcggaaaactatctttactttcactccacagtttatagaccagcaacagttctacctggctctggacaacaagatgatagtggaaatgcttagaacagacctctcctacctctgtagccgctggcggatgacaggccagcccaccatcaccttccccatctcacacagcatgcttgatgaagatggaacaagcttgaattcaagtatcctggcagcactccgaaaaatgcaagatgggtattttggtggggcaagggttcaaacaggtaaattgtcagagtttttgacaacatcttgttgcacacacttgagcttcatggaccctggacctgagggtaagctgtacagtgaagattatgatgacaactatgattacctggaatctggcaactggatgaatgattatgattcaaccagtcatgctcgctgtggtgatgaagttgctcgttatttagatcaccttttggcgcacactgctccccatcctaaactagcccctacctcacagaagggagggctagatcggttccaagctgctgtgcaaacaacctgcgacttaatgtccttggtgaccaaggccaaggaactgcatgtacagaatgttcacatgtatcttcctacgaagttatttcaggcttcccggccttcattcaacttacttgattcacctcatccccgacaggagaaccaggttccctctgttcgtgtagaaatacatcttcctagagaccagtctggggaggtggactttaaagcactggttttacagttgaaggagacctcaagcttacaggaacaagctgatatcctctatatgctgtatactatgaaaggacctgactggaacactgaattgtataatgaacggagtgctacagtgagagagcttcttaccgagctgtatggcaaagtgggagaaattcgtcactggggcctgatccgatacatttctgggatcttaaggaagaaagtggaagcacttgatgaggcctgcacagaccttctctcccaccagaaacatttgacagtaggacttcctccagaacctcgagaaaagactatctctgcacctctgccctatgaggcgctcactcagctgatagatgaagccagtgaaggggatatgagcatttcaatccttacacaggaaataatggtatatctagccatgtatatgcgaacccagcctggcctctttgctgaaatgtttcgacttcgaattggtctgatcatacaagttatggcaacagaactggcccactcccttcgatgctcagctgaggaagccacagagggcctgatgaatctcagtccttcggccatgaagaatctcctgcatcacattctcagcggcaaggagtttggagtggaacgaagcgttcgtcccactgattcaaatgtcagtcctgctatttctatccacgagattggtgctgttggagcaaccaaaacagaacgaactgggatcatgcagttaaaaagtgagataaagcaggtggaatttcgtagactgtcaatctcagctgagagtcagtcacctggaacctctatgactccaagtagtgggtcctttcctagtgcatatgatcagcagtcatctaaagatagtcgtcaaggtcaatggcaacgccgaagaaggctggatggggcactgaatagagttccagttggattttatcagaaagtatggaaagttttgcagaagtgtcacggactttctgttgaagggtttgtccttccttcctctaccactagagagatgactccaggtgagattaaattctctgttcatgtggagtctgtcctgaatcgtgtacctcagccagagtaccgtcagctgctggttgaagccatccttgtcctcaccatgctggcagatattgaaattcatagcatcggaagcatcattgctgtggaaaaaatagtgcatattgccaatgacttgttccttcaagaacagaaaacccttggcgcagatgataccatgttggcaaaggatcccgcatctggcatctgtactcttctgtatgacagtgcacccagtggcaggtttggcaccatgacctacctctccaaggcagccgccacctacgtgcaggagttcctgccccacagcatctgtgccatgcaatgagggctttggttcctggcttctgggagccttttgacagctggtccctgcctcggttgattgtgcatggaactaaaatgttattgcctaatcactccaaccctgcccctttctgtcccatccttcccaagaagagagaactttttcgataaactaactactgtagaagaagtgaacacttacctggaggctcaccttgcagaaccagtgacaatcttatgagtataatgaacactcagccaggcctgtcatgattggctttatttctttcatcattcataaaagtttgcatgtgtttttattctctagatctgttaccaatatagttttctaactcctgtttggggagcaagtgttaataataacttattcctaaagcttggtttttcttttttgtgattttattgtgtatatgagtggtgggtactttgggacattatttcaaatgagtaaactctaaattgttaaatatttatgctgctataaattagaattacctattctacgtgccttttcttaggaaaagagagtactggatcatggttttcttccttacttacaggttgcttcacactgagtgataatttaaaattgtttctatgtagaatcattgtctctactgttgccctctctgtgtctgcacacataatgcctctctcactttggtgaaatatcaaaaaaatgcaagtacagcatgcatatttaagaatttctgaactaacacttgaaatcacattttataaagattgttggtactcagagttgtatttgcagcagaaaatgcagaataacccagaaatggagcccggagcccaattccagagaggaagggaaagaagagacgatgcctggacaatgtcttatacatagggaacagagagggaatcagaggtggcttagttccctgaagacagccttatgcgcttaatccctgcctttgaaaaatgggccaatacacaacacagacaataatttgaagcgtctgtattcagcaaagataaatacagcagtccagtctataggtgctctacttagcattcttttcatgtgctcctggtctctgtctcactcacctactttctactacatccaactcaactccctgacaccctatccccccatctattcttaaactctttcatatatattttcacttcctaattctagtgtacatatccctgtatatcatggtatctgtgggcatatgtctgtttcttataaagacacatattgtgtgtgtatgtgtgtgtgtgtgtgtgtgtgtgtataagcatacatgggaattttctgaatgtaagcagtttgatgtgtctgtatatcaatctgtatctacatttgatggactgagtaagaatgttgcatgtgagagaagggatgtgactgtggactcagattgacacacacagattggtggaagaatagcttcagtcctcttccttcatcccatatgtaggtagccttgcttgacaaagtgtttcttctaactctccttcttctgaattgtgcagagactctgttaacttccctttttggcacttagataacttcctattcaaccccctcctttatcttggatttctaaagtttttccccaatattgggaatggtgaggggtggggatgagagactctctgaacaattcttgcagaaccagtgacaatcttatgaatataatgaataagtaagcttatgagggtgatagaatacgattgttcaacaagaggggcgaacctttcagctnttctcgagacatggacccaggagggtttcggcaacttttcgggcttaaaaagtcccccgtctgacttggtccgggggtgccccccggggttttggcgggaaacacccccttg

SEQ ID NO: 415638 - DNA, 6124 bp, Homo sapiens
ggaggccggactggactaagggggcaggagcggcgcctggggcgctgcggcggggctctagaccgcgggaagccagtgctagcgctggcgcgtggtgggcccctgaggccgccggagtccggagaggtacgcggaatccgcggcgccaggcctgagcggtgggagggctctgcggggcctggtgttcaggcgtcccaccacgagggtggagcagcgttggatacttgttccttagggaccgaaggctccggtggcacccgggctatttctcagaggacaattagtaacgtgtcgccatgaggagccggagtaactccggggtccggctggacggctacgctcgactggtgcaacagaccatcctgtgccatcagaatccagtgactggcttgcttccagccagctatgatcagaaagatgcttgggtccgagataatgtgtacagcatcttggctgtgtggggtttgggcctggcctatcggaagaatgcagaccgggatgaggataaggcaaaggcctatgaattggagcagagtgtagtgaagctgatgagaggactactgcactgcatgatcagacaggtggataaagtagaatccttcaaatatagtcagagtactaaggatagcctccatgcaaagtacaacaccaaaacctgtgccactgtagtgggtgatgatcaatggggacacctgcagttggatgctacctctgtgtacctgctcttcttagcccaaatgactgcctcaggactccatatcatccacagcctagatgaagtcaatttcatacagaaccttgtgttttacattgaagctgcatataaaactgctgacttcgggatatgggaacgtggagacaagaccaaccaagggatctcagagttgaatgccagttcagttggaatggcaaaggcagccctggaagcattagatgaactggatctgtttggtgtgaaaggtgggcctcaatcagttatccatgtcctggctgatgaagtacagcactgccagtctatcctaaattcactactgccccgtgcttcaacatcaaaagaggttgatgctagtctactctcagtggtttccttccctgcctttgcagtagaggatagccagttggtggagctcacaaaacaggaaatcatcaccaagcttcagggtcgttatggttgctgtcgctttctacgagatggatataaaactcctaaagaggatcccaatcgtctgtactatgaaccagctgagctgaagctatttgaaaacattgagtgtgaatggccattgttctggacatactttattcttgatggggtcttcagtggcaatgcagaacaggttcaagaatataaagaggctcttgaagcagtcctcatcaagggcaaaaatggagtcccacttctgccagagctgtacagtgttcctcctgacagggtcgatgaagaatatcagaatcctcacactgtggaccgagtccccatggggaaattgcctcacatgtggggtcagtctctatacattttaggaagcttgatggcagagggatttttagcccctggagaaattgatcccctgaatcgcaggttttctactgtaccgaagcccgatgttgtggttcaagtctccattctagctgaaacagaagaaatcaagaccattttgaaggacaagggaatttacgtggagaccattgctgaggtataccccatcagagtacaaccagctcgtattctcagccacatttattccagcctaggatgcaacaatagaatgaaactcagtggacgaccctacagacacatgggagtgcttggaacttcaaaactctatgacattcggaaaactatctttactttcactccacagtttatagaccagcaacagttctacctggctctggacaacaagatgatagtggaaatgcttagaacagacctctcctacctctgtagccgctggcggatgacaggccagcccaccatcaccttccccatctcacacagcatgcttgatgaagatggaacaagcttgaattcaagtatcctggcagcactccgaaaaatgcaagatgggtattttggtggggcaagggttcaaacaggtaaattgtcagagtttttgacaacatcttgttgcacacacttgagcttcatggaccctggacctgagggtaagctgtacagtgaagattatgatgacaactatgattacctggaatctggcaactggatgaatgattatgattcaaccagtcatgctcgctgtggtgatgaagttgctcgttatttagatcaccttttggcgcacactgctccccatcctaaactagcccctacctcacagaagggagggctagatcggttccaagctgctgtgcaaacaacctgcgacttaatgtccttggtgaccaaggccaaggaactgcatgtacagaatgttcacatgtatcttcctacgaagttatttcaggcttcccggccttcattcaacttacttgattcacctcatccccgacaggagaaccaggttccctctgttcgtgtagaaatacatcttcctagagaccagtctggggaggtggactttaaagcactggttttacagttgaaggagacctcaagcttacaggaacaagctgatatcctctatatgctgtatactatgaaaggacctgactggaacactgaattgtataatgaacggagtgctacagtgagagagcttcttaccgagctgtatggcaaagtgggagaaattcgtcactggggcctgatccgatacatttctgggatcttaaggaagaaagtggaagcacttgatgaggcctgcacagaccttctctcccaccagaaacatttgacagtaggacttcctccagaacctcgagaaaagactatctctgcacctctgccctatgaggcgctcactcagctgatagatgaagccagtgaaggggatatgagcatttcaatccttacacaggaaataatggtatatctagccatgtatatgcgaacccagcctggcctctttgctgaaatgtttcgacttcgaattggtctgatcatacaagttatggcaacagaactggcccactcccttcgatgctcagctgaggaagccacagagggcctgatgaatctcagtccttcggccatgaagaatctcctgcatcacattctcagcggcaaggagtttggagtggaacgaagcgttcgtcccactgattcaaatgtcagtcctgctatttctatccacgagattggtgctgttggagcaaccaaaacagaacgaactgggatcatgcagttaaaaagtgagataaagcagtcacctggaacctctatgactccaagtagtgggtcctttcctagtgcatatgatcagcagtcatctaaagatagtcgtcaaggtcaatggcaacgccgaagaaggctggatggggcactgaatagagttccagttggattttatcagaaagtatggaaagttttgcagaagtgtcacggactttctgttgaagggtttgtccttccttcctctaccactagagagatgactccaggtgagattaaattctctgttcatgtggagtctgtcctgaatcgtgtacctcagccagagtaccgtcagctgctggttgaagccatccttgtcctcaccatgctggcagatattgaaattcatagcatcggaagcatcattgctgtggaaaaaatagtgcatattgccaatgacttgttccttcaagaacagaaaacccttggcgcagatgataccatgttggcaaaggatcccgcatctggcatctgtactcttctgtatgacagtgcacccagtggcaggtttggcaccatgacctacctctccaaggcagccgccacctacgtgcaggagttcctgccccacagcatctgtgccatgcaatgagggctttggttcctggcttctgggagccttttgacagctggtccctgcctcggttgattgtgcatggaactaaaatgttattgcctaatcactccaaccctgcccctttctgtcccatccttcccaagaagagagaactttttcgataaactaactactgtagaagaagtgaacacttacctggaggctcaccttgcagaaccagtgacaatcttatgagtataatgaacactcagccaggcctgtcatgattggctttatttctttcatcattcataaaagtttgcatgtgtttttattctctagatctgttaccaatatagttttctaactcctgtttggggagcaagtgttaataataacttattcctaaagcttggtttttcttttttgtgattttattgtgtatatgagtggtgggtactttgggacattatttcaaatgagtaaactctaaattgttaaatatttatgctgctataaattagaattacctattctacgtgccttttcttaggaaaagagagtactggatcatggttttcttccttacttacaggttgcttcacactgagtgataatttaaaattgtttctatgtagaatcattgtctctactgttgccctctctgtgtctgcacacataatgcctctctcactttggtgaaatatcaaaaaaatgcaagtacagcatgcatatttaagaatttctgaactaacacttgaaatcacattttataaagattgttggtactcagagttgtatttgcagcagaaaatgcagaataacccagaaatggagcccggagcccaattccagagaggaagggaaagaagagacgatgcctggacaatgtcttatacatagggaacagagagggaatcagaggtggcttagttccctgaagacagccttatgcgcttaatccctgcctttgaaaaatgggccaatacacaacacagacaataatttgaagcgtctgtattcagcaaagataaatacagcagtccagtctataggtgctctacttagcattcttttcatgtgctcctggtctctgtctcactcacctactttctactacatccaactcaactccctgacaccctatccccccatctattcttaaactctttcatatatattttcacttcctaattctagtgtacatatccctgtatatcatggtatctgtgggcatatgtctgtttcttataaagacacatattgtgtgtgtatgtgtgtgtgtgtgtgtgtgtgtgtataagcatacatgggaattttctgaatgtaagcagtttgatgtgtctgtatatcaatctgtatctacatttgatggactgagtaagaatgttgcatgtgagagaagggatgtgactgtggactcagattgacacacacagattggtggaagaatagcttcagtcctcttccttcatcccatatgtaggtagccttgcttgacaaagtgtttcttctaactctccttcttctgaattgtgcagagactctgttaacttccctttttggcacttagataacttcctattcaaccccctcctttatcttggatttctaaagtttttccccaatattgggaatggtgaggggtggggatgagagactctctgaacaattcttgcagaaccagtgacaatcttatgaatataatgaataagtaagcttatgagggtgatagaatacagatagtagaaacaaagagaggacagcaaaccttttcagcacttctctcagagcaaatggaaacacacagtaagtagctttctgactacattattttctggtcacttttaaagaaagtttacaacctgttctgaaactatttgtcttttcactggttgtaagtgtaccccaatctcagggagtatatctgtagtgccacaggcaaaagatccactccttcccacactcatttgcctgaacttactcgaagggctgcatttctctgagtttacgaaattgtgtcattatggtccccatacagtggtatttaacttttaaagcaacttttaagaaaactcgacttgttttttgttcattttaagtgtgtggtactaaaaagacatgttagactttttttaaaaaagcacttatgttttgaaaatagaataaataataagaatttccaattaaatcatgtctggtgccaatgtgcaaaacttcaaaaaaaattt

SEQ ID NO: 415639 - DNA, 6015 bp, Homo sapiens
ggaggccggactggactaagggggcaggagcggcgcctggggcgctgcggcggggctctagaccgcgggaagccagtgctagcgctggcgcgtggtgggcccctgaggccgccggagtccggagagggaccgaaggctccggtggcacccgggctatttctcagaggacaattagtaacgtgtcgccatgaggagccggagtaactccggggtccggctggacggctacgctcgactggtgcaacagaccatcctgtgccatcagaatccagtgactggcttgcttccagccagctatgatcagaaagatgcttgggtccgagataatgtgtacagcatcttggctgtgtggggtttgggcctggcctatcggaagaatgcagaccgggatgaggataaggcaaaggcctatgaattggagcagagtgtagtgaagctgatgagaggactactgcactgcatgatcagacaggtggataaagtagaatccttcaaatatagtcagagtactaaggatagcctccatgcaaagtacaacaccaaaacctgtgccactgtagtgggtgatgatcaatggggacacctgcagttggatgctacctctgtgtacctgctcttcttagcccaaatgactgcctcaggactccatatcatccacagcctagatgaagtcaatttcatacagaaccttgtgttttacattgaagctgcatataaaactgctgacttcgggatatgggaacgtggagacaagaccaaccaagggatctcagagttgaatgccagttcagttggaatggcaaaggcagccctggaagcattagatgaactggatctgtttggtgtgaaaggtgggcctcaatcagttatccatgtcctggctgatgaagtacagcactgccagtctatcctaaattcactactgccccgtgcttcaacatcaaaagaggttgatgctagtctactctcagtggtttccttccctgcctttgcagtagaggatagccagttggtggagctcacaaaacaggaaatcatcaccaagcttcagggtcgttatggttgctgtcgctttctacgagatggatataaaactcctaaagaggatcccaatcgtctgtactatgaaccagctgagctgaagctatttgaaaacattgagtgtgaatggccattgttctggacatactttattcttgatggggtcttcagtggcaatgcagaacaggttcaagaatataaagaggctcttgaagcagtcctcatcaagggcaaaaatggagtcccacttctgccagagctgtacagtgttcctcctgacagggtcgatgaagaatatcagaatcctcacactgtggaccgagtccccatggggaaattgcctcacatgtggggtcagtctctatacattttaggaagcttgatggcagagggatttttagcccctggagaaattgatcccctgaatcgcaggttttctactgtaccgaagcccgatgttgtggttcaagtctccattctagctgaaacagaagaaatcaagaccattttgaaggacaagggaatttacgtggagaccattgctgaggtataccccatcagagtacaaccagctcgtattctcagccacatttattccagcctaggatgcaacaatagaatgaaactcagtggacgaccctacagacacatgggagtgcttggaacttcaaaactctatgacattcggaaaactatctttactttcactccacagtttatagaccagcaacagttctacctggctctggacaacaagatgatagtggaaatgcttagaacagacctctcctacctctgtagccgctggcggatgacaggccagcccaccatcaccttccccatctcacacagcatgcttgatgaagatggaacaagcttgaattcaagtatcctggcagcactccgaaaaatgcaagatgggtattttggtggggcaagggttcaaacaggtaaattgtcagagtttttgacaacatcttgttgcacacacttgagcttcatggaccctggacctgagggtaagctgtacagtgaagattatgatgacaactatgattacctggaatctggcaactggatgaatgattatgattcaaccagtcatgctcgctgtggtgatgaagttgctcgttatttagatcaccttttggcgcacactgctccccatcctaaactagcccctacctcacagaagggagggctagatcggttccaagctgctgtgcaaacaacctgcgacttaatgtccttggtgaccaaggccaaggaactgcatgtacagaatgttcacatgtatcttcctacgaagttatttcaggcttcccggccttcattcaacttacttgattcacctcatccccgacaggagaaccaggttccctctgttcgtgtagaaatacatcttcctagagaccagtctggggaggtggactttaaagcactggttttacagttgaaggagacctcaagcttacaggaacaagctgatatcctctatatgctgtatactatgaaaggacctgactggaacactgaattgtataatgaacggagtgctacagtgagagagcttcttaccgagctgtatggcaaagtgggagaaattcgtcactggggcctgatccgatacatttctgggatcttaaggaagaaagtggaagcacttgatgaggcctgcacagaccttctctcccaccagaaacatttgacagtaggacttcctccagaacctcgagaaaagactatctctgcacctctgccctatgaggcgctcactcagctgatagatgaagccagtgaaggggatatgagcatttcaatccttacacaggaaataatggtatatctagccatgtatatgcgaacccagcctggcctctttgctgaaatgtttcgacttcgaattggtctgatcatacaagttatggcaacagaactggcccactcccttcgatgctcagctgaggaagccacagagggcctgatgaatctcagtccttcggccatgaagaatctcctgcatcacattctcagcggcaaggagtttggagtggaacgaagcgttcgtcccactgattcaaatgtcagtcctgctatttctatccacgagattggtgctgttggagcaaccaaaacagaacgaactgggatcatgcagttaaaaagtgagataaagcagtcacctggaacctctatgactccaagtagtgggtcctttcctagtgcatatgatcagcagtcatctaaagatagtcgtcaaggtcaatggcaacgccgaagaaggctggatggggcactgaatagagttccagttggattttatcagaaagtatggaaagttttgcagaagtgtcacggactttctgttgaagggtttgtccttccttcctctaccactagagagatgactccaggtgagattaaattctctgttcatgtggagtctgtcctgaatcgtgtacctcagccagagtaccgtcagctgctggttgaagccatccttgtcctcaccatgctggcagatattgaaattcatagcatcggaagcatcattgctgtggaaaaaatagtgcatattgccaatgacttgttccttcaagaacagaaaacccttggcgcagatgataccatgttggcaaaggatcccgcatctggcatctgtactcttctgtatgacagtgcacccagtggcaggtttggcaccatgacctacctctccaaggcagccgccacctacgtgcaggagttcctgccccacagcatctgtgccatgcaatgagggctttggttcctggcttctgggagccttttgacagctggtccctgcctcggttgattgtgcatggaactaaaatgttattgcctaatcactccaaccctgcccctttctgtcccatccttcccaagaagagagaactttttcgataaactaactactgtagaagaagtgaacacttacctggaggctcaccttgcagaaccagtgacaatcttatgagtataatgaacactcagccaggcctgtcatgattggctttatttctttcatcattcataaaagtttgcatgtgtttttattctctagatctgttaccaatatagttttctaactcctgtttggggagcaagtgttaataataacttattcctaaagcttggtttttcttttttgtgattttattgtgtatatgagtggtgggtactttgggacattatttcaaatgagtaaactctaaattgttaaatatttatgctgctataaattagaattacctattctacgtgccttttcttaggaaaagagagtactggatcatggttttcttccttacttacaggttgcttcacactgagtgataatttaaaattgtttctatgtagaatcattgtctctactgttgccctctctgtgtctgcacacataatgcctctctcactttggtgaaatatcaaaaaaatgcaagtacagcatgcatatttaagaatttctgaactaacacttgaaatcacattttataaagattgttggtactcagagttgtatttgcagcagaaaatgcagaataacccagaaatggagcccggagcccaattccagagaggaagggaaagaagagacgatgcctggacaatgtcttatacatagggaacagagagggaatcagaggtggcttagttccctgaagacagccttatgcgcttaatccctgcctttgaaaaatgggccaatacacaacacagacaataatttgaagcgtctgtattcagcaaagataaatacagcagtccagtctataggtgctctacttagcattcttttcatgtgctcctggtctctgtctcactcacctactttctactacatccaactcaactccctgacaccctatccccccatctattcttaaactctttcatatatattttcacttcctaattctagtgtacatatccctgtatatcatggtatctgtgggcatatgtctgtttcttataaagacacatattgtgtgtgtatgtgtgtgtgtgtgtgtgtgtgtgtataagcatacatgggaattttctgaatgtaagcagtttgatgtgtctgtatatcaatctgtatctacatttgatggactgagtaagaatgttgcatgtgagagaagggatgtgactgtggactcagattgacacacacagattggtggaagaatagcttcagtcctcttccttcatcccatatgtaggtagccttgcttgacaaagtgtttcttctaactctccttcttctgaattgtgcagagactctgttaacttccctttttggcacttagataacttcctattcaaccccctcctttatcttggatttctaaagtttttccccaatattgggaatggtgaggggtggggatgagagactctctgaacaattcttgcagaaccagtgacaatcttatgaatataatgaataagtaagcttatgagggtgatagaatacagatagtagaaacaaagagaggacagcaaaccttttcagcacttctctcagagcaaatggaaacacacagtaagtagctttctgactacattattttctggtcacttttaaagaaagtttacaacctgttctgaaactatttgtcttttcactggttgtaagtgtaccccaatctcagggagtatatctgtagtgccacaggcaaaagatccactccttcccacactcatttgcctgaacttactcgaagggctgcatttctctgagtttacgaaattgtgtcattatggtccccatacagtggtatttaacttttaaagcaacttttaagaaaactcgacttgttttttgttcattttaagtgtgtggtactaaaaagacatgttagactttttttaaaaaagcacttatgttttgaaaatagaataaataataagaatttccaattaaatcatgtctggtgccaatgtgcaaaacttcaaaaaaaattt

SEQ ID NO: 415640 - DNA, 5617 bp, Homo sapiens
tgtcttgtttccatttatttctgcagagtgtagtgaagctgatgagaggactactgcactgcatgatcagacaggtggataaagtagaatccttcaaatatagtcagagtactaaggatagcctccatgcaaagtacaacaccaaaacctgtgccactgtagtgggtgatgatcaatggggacacctgcagttggatgctacctctgtgtacctgctcttcttagcccaaatgactgcctcaggactccatatcatccacagcctagatgaagtcaatttcatacagaaccttgtgttttacattgaagctgcatataaaactgctgacttcgggatatgggaacgtggagacaagaccaaccaagggatctcagagttgaatgccagttcagttggaatggcaaaggcagccctggaagcattagatgaactggatctgtttggtgtgaaaggtgggcctcaatcagttatccatgtcctggctgatgaagtacagcactgccagtctatcctaaattcactactgccccgtgcttcaacatcaaaagaggttgatgctagtctactctcagtggtttccttccctgcctttgcagtagaggatagccagttggtggagctcacaaaacaggaaatcatcaccaagcttcagggtcgttatggttgctgtcgctttctacgagatggatataaaactcctaaagaggatcccaatcgtctgtactatgaaccagctgagctgaagctatttgaaaacattgagtgtgaatggccattgttctggacatactttattcttgatggggtcttcagtggcaatgcagaacaggttcaagaatataaagaggctcttgaagcagtcctcatcaagggcaaaaatggagtcccacttctgccagagctgtacagtgttcctcctgacagggtcgatgaagaatatcagaatcctcacactgtggaccgagtccccatggggaaattgcctcacatgtggggtcagtctctatacattttaggaagcttgatggcagagggatttttagcccctggagaaattgatcccctgaatcgcaggttttctactgtaccgaagcccgatgttgtggttcaagtctccattctagctgaaacagaagaaatcaagaccattttgaaggacaagggaatttacgtggagaccattgctgaggtataccccatcagagtacaaccagctcgtattctcagccacatttattccagcctaggatgcaacaatagaatgaaactcagtggacgaccctacagacacatgggagtgcttggaacttcaaaactctatgacattcggaaaactatctttactttcactccacagtttatagaccagcaacagttctacctggctctggacaacaagatgatagtggaaatgcttagaacagacctctcctacctctgtagccgctggcggatgacaggccagcccaccatcaccttccccatctcacacagcatgcttgatgaagatggaacaagcttgaattcaagtatcctggcagcactccgaaaaatgcaagatgggtattttggtggggcaagggttcaaacaggtaaattgtcagagtttttgacaacatcttgttgcacacacttgagcttcatggaccctggacctgagggtaagctgtacagtgaagattatgatgacaactatgattacctggaatctggcaactggatgaatgattatgattcaaccagtcatgctcgctgtggtgatgaagttgctcgttatttagatcaccttttggcgcacactgctccccatcctaaactagcccctacctcacagaagggagggctagatcggttccaagctgctgtgcaaacaacctgcgacttaatgtccttggtgaccaaggccaaggaactgcatgtacagaatgttcacatgtatcttcctacgaagttatttcaggcttcccggccttcattcaacttacttgattcacctcatccccgacaggagaaccaggttccctctgttcgtgtagaaatacatcttcctagagaccagtctggggaggtggactttaaagcactggttttacagttgaaggagacctcaagcttacaggaacaagctgatatcctctatatgctgtatactatgaaaggacctgactggaacactgaattgtataatgaacggagtgctacagtgagagagcttcttaccgagctgtatggcaaagtgggagaaattcgtcactggggcctgatccgatacatttctgggatcttaaggaagaaagtggaagcacttgatgaggcctgcacagaccttctctcccaccagaaacatttgacagtaggacttcctccagaacctcgagaaaagactatctctgcacctctgccctatgaggcgctcactcagctgatagatgaagccagtgaaggggatatgagcatttcaatccttacacaggaaataatggtatatctagccatgtatatgcgaacccagcctggcctctttgctgaaatgtttcgacttcgaattggtctgatcatacaagttatggcaacagaactggcccactcccttcgatgctcagctgaggaagccacagagggcctgatgaatctcagtccttcggccatgaagaatctcctgcatcacattctcagcggcaaggagtttggagtggaacgaagcgttcgtcccactgattcaaatgtcagtcctgctatttctatccacgagattggtgctgttggagcaaccaaaacagaacgaactgggatcatgcagttaaaaagtgagataaagcagtcacctggaacctctatgactccaagtagtgggtcctttcctagtgcatatgatcagcagtcatctaaagatagtcgtcaaggtcaatggcaacgccgaagaaggctggatggggcactgaatagagttccagttggattttatcagaaagtatggaaagttttgcagaagtgtcacggactttctgttgaagggtttgtccttccttcctctaccactagagagatgactccaggtgagattaaattctctgttcatgtggagtctgtcctgaatcgtgtacctcagccagagtaccgtcagctgctggttgaagccatccttgtcctcaccatgctggcagatattgaaattcatagcatcggaagcatcattgctgtggaaaaaatagtgcatattgccaatgacttgttccttcaagaacagaaaacccttggcgcagatgataccatgttggcaaaggatcccgcatctggcatctgtactcttctgtatgacagtgcacccagtggcaggtttggcaccatgacctacctctccaaggcagccgccacctacgtgcaggagttcctgccccacagcatctgtgccatgcaatgagggctttggttcctggcttctgggagccttttgacagctggtccctgcctcggttgattgtgcatggaactaaaatgttattgcctaatcactccaaccctgcccctttctgtcccatccttcccaagaagagagaactttttcgataaactaactactgtagaagaagtgaacacttacctggaggctcaccttgcagaaccagtgacaatcttatgagtataatgaacactcagccaggcctgtcatgattggctttatttctttcatcattcataaaagtttgcatgtgtttttattctctagatctgttaccaatatagttttctaactcctgtttggggagcaagtgttaataataacttattcctaaagcttggtttttcttttttgtgattttattgtgtatatgagtggtgggtactttgggacattatttcaaatgagtaaactctaaattgttaaatatttatgctgctataaattagaattacctattctacgtgccttttcttaggaaaagagagtactggatcatggttttcttccttacttacaggttgcttcacactgagtgataatttaaaattgtttctatgtagaatcattgtctctactgttgccctctctgtgtctgcacacataatgcctctctcactttggtgaaatatcaaaaaaatgcaagtacagcatgcatatttaagaatttctgaactaacacttgaaatcacattttataaagattgttggtactcagagttgtatttgcagcagaaaatgcagaataacccagaaatggagcccggagcccaattccagagaggaagggaaagaagagacgatgcctggacaatgtcttatacatagggaacagagagggaatcagaggtggcttagttccctgaagacagccttatgcgcttaatccctgcctttgaaaaatgggccaatacacaacacagacaataatttgaagcgtctgtattcagcaaagataaatacagcagtccagtctataggtgctctacttagcattcttttcatgtgctcctggtctctgtctcactcacctactttctactacatccaactcaactccctgacaccctatccccccatctattcttaaactctttcatatatattttcacttcctaattctagtgtacatatccctgtatatcatggtatctgtgggcatatgtctgtttcttataaagacacatattgtgtgtgtatgtgtgtgtgtgtgtgtgtgtgtgtataagcatacatgggaattttctgaatgtaagcagtttgatgtgtctgtatatcaatctgtatctacatttgatggactgagtaagaatgttgcatgtgagagaagggatgtgactgtggactcagattgacacacacagattggtggaagaatagcttcagtcctcttccttcatcccatatgtaggtagccttgcttgacaaagtgtttcttctaactctccttcttctgaattgtgcagagactctgttaacttccctttttggcacttagataacttcctattcaaccccctcctttatcttggatttctaaagtttttccccaatattgggaatggtgaggggtggggatgagagactctctgaacaattcttgcagaaccagtgacaatcttatgaatataatgaataagtaagcttatgagggtgatagaatacagatagtagaaacaaagagaggacagcaaaccttttcagcacttctctcagagcaaatggaaacacacagtaagtagctttctgactacattattttctggtcacttttaaagaaagtttacaacctgttctgaaactatttgtcttttcactggttgtaagtgtaccccaatctcagggagtatatctgtagtgccacaggcaaaagatccactccttcccacactcatttgcctgaacttactcgaagggctgcatttctctgagtttacgaaattgtgtcattatggtccccatacagtggtatttaacttttaaagcaacttttaagaaaactcgacttgttttttgttcattttaagtgtgtggtactaaaaagacatgttagactttttttaaaaaagcacttatgttttgaaaatagaataaataataagaatttccaattaaatcatgtctggtgccaatgtgcaaaacttcaaaaaaaattt

SEQ ID NO: 415641 - DNA, 3888 bp, Homo sapiens
tccccccactaaccgtcatgctcgctgtggtgatgaagttgctcgttatttagatcaccttttggcgcacactgctccccatcctaaactagcccctacctcacagaagggagggctagatcggttccaagctgctgtgcaaacaacctgcgacttaatgtccttggtgaccaaggccaaggaactgcatgtacagaatgttcacatgtatcttcctacgaagttatttcaggcttcccggccttcattcaacttacttgattcacctcatccccgacaggagaaccaggttccctctgttcgtgtagaaatacatcttcctagagaccagtctggggaggtggactttaaagcactggttttacagttgaaggagacctcaagcttacaggaacaagctgatatcctctatatgctgtatactatgaaaggacctgactggaacactgaattgtataatgaacggagtgctacagtgagagagcttcttaccgagctgtatggcaaagtgggagaaattcgtcactggggcctgatccgatacatttctgggatcttaaggaagaaagtggaagcacttgatgaggcctgcacagaccttctctcccaccagaaacatttgacagtaggacttcctccagaacctcgagaaaagactatctctgcacctctgccctatgaggcgctcactcagctgatagatgaagccagtgaaggggatatgagcatttcaatccttacacaggaaataatggtatatctagccatgtatatgcgaacccagcctggcctctttgctgaaatgtttcgacttcgaattggtctgatcatacaagttatggcaacagaactggcccactcccttcgatgctcagctgaggaagccacagagggcctgatgaatctcagtccttcggccatgaagaatctcctgcatcacattctcagcggcaaggagtttggagtggaacgaagcgttcgtcccactgattcaaatgtcagtcctgctatttctatccacgagattggtgctgttggagcaaccaaaacagaacgaactgggatcatgcagttaaaaagtgagataaagcagtcacctggaacctctatgactccaagtagtgggtcctttcctagtgcatatgatcagcagtcatctaaagatagtcgtcaaggtcaatggcaacgccgaagaaggctggatggggcactgaatagagttccagttggattttatcagaaagtatggaaagttttgcagaagtgtcacggactttctgttgaagggtttgtccttccttcctctaccactagagagatgactccaggtgagattaaattctctgttcatgtggagtctgtcctgaatcgtgtacctcagccagagtaccgtcagctgctggttgaagccatccttgtcctcaccatgctggcagatattgaaattcatagcatcggaagcatcattgctgtggaaaaaatagtgcatattgccaatgacttgttccttcaagaacagaaaacccttggcgcagatgataccatgttggcaaaggatcccgcatctggcatctgtactcttctgtatgacagtgcacccagtggcaggtttggcaccatgacctacctctccaaggcagccgccacctacgtgcaggagttcctgccccacagcatctgtgccatgcaatgagggctttggttcctggcttctgggagccttttgacagctggtccctgcctcggttgattgtgcatggaactaaaatgttattgcctaatcactccaaccctgcccctttctgtcccatccttcccaagaagagagaactttttcgataaactaactactgtagaagaagtgaacacttacctggaggctcaccttgcagaaccagtgacaatcttatgagtataatgaacactcagccaggcctgtcatgattggctttatttctttcatcattcataaaagtttgcatgtgtttttattctctagatctgttaccaatatagttttctaactcctgtttggggagcaagtgttaataataacttattcctaaagcttggtttttcttttttgtgattttattgtgtatatgagtggtgggtactttgggacattatttcaaatgagtaaactctaaattgttaaatatttatgctgctataaattagaattacctattctacgtgccttttcttaggaaaagagagtactggatcatggttttcttccttacttacaggttgcttcacactgagtgataatttaaaattgtttctatgtagaatcattgtctctactgttgccctctctgtgtctgcacacataatgcctctctcactttggtgaaatatcaaaaaaatgcaagtacagcatgcatatttaagaatttctgaactaacacttgaaatcacattttataaagattgttggtactcagagttgtatttgcagcagaaaatgcagaataacccagaaatggagcccggagcccaattccagagaggaagggaaagaagagacgatgcctggacaatgtcttatacatagggaacagagagggaatcagaggtggcttagttccctgaagacagccttatgcgcttaatccctgcctttgaaaaatgggccaatacacaacacagacaataatttgaagcgtctgtattcagcaaagataaatacagcagtccagtctataggtgctctacttagcattcttttcatgtgctcctggtctctgtctcactcacctactttctactacatccaactcaactccctgacaccctatccccccatctattcttaaactctttcatatatattttcacttcctaattctagtgtacatatccctgtatatcatggtatctgtgggcatatgtctgtttcttataaagacacatattgtgtgtgtatgtgtgtgtgtgtgtgtgtgtgtgtataagcatacatgggaattttctgaatgtaagcagtttgatgtgtctgtatatcaatctgtatctacatttgatggactgagtaagaatgttgcatgtgagagaagggatgtgactgtggactcagattgacacacacagattggtggaagaatagcttcagtcctcttccttcatcccatatgtaggtagccttgcttgacaaagtgtttcttctaactctccttcttctgaattgtgcagagactctgttaacttccctttttggcacttagataacttcctattcaaccccctcctttatcttggatttctaaagtttttccccaatattgggaatggtgaggggtggggatgagagactctctgaacaattcttgcagaaccagtgacaatcttatgaatataatgaataagtaagcttatgagggtgatagaatacagatagtagaaacaaagagaggacagcaaaccttttcagcacttctctcagagcaaatggaaacacacagtaagtagctttctgactacattattttctggtcacttttaaagaaagtttacaacctgttctgaaactatttgtcttttcactggttgtaagtgtaccccaatctcagggagtatatctgtagtgccacaggcaaaagatccactccttcccacactcatttgcctgaacttactcgaagggctgcatttctctgagtttacgaaattgtgtcattatggtccccatacagtggtatttaacttttaaagcaacttttaagaaaactcgacttgttttttgttcattttaagtgtgtggtactaaaaagacatgttagactttttttaaaaaagcacttatgttttgaaaatagaataaataataagaatttccaattaaatcatgtctggtgccaatgtgcaaaacttcaaaaaaaattt

SEQ ID NO: 415642 - DNA, 2113 bp, Homo sapiens
ttttttttttaggaataagttattattaacacttgctccccaaacaggagttagaaaactatattggtaacagatctagagaagaagtgaacacttacctggaggctcaccttgcagaaccagtgacaatcttatgagtataatgaacactcagccaggcctgtcatgattggctttatttctttcatcattcataaaagtttgcatgtgtttttattctctagatctgttaccaatatagttttctaactcctgtttggggagcaagtgttaataataacttattcctaaagcttggtttttcttttttgtgattttattgtgtatatgagtggtgggtactttgggacattatttcaaatgagtaaactctaaattgttaaatatttatgctgctataaattagaattacctattctacgtgccttttcttaggaaaagagagtactggatcatggttttcttccttacttacaggttgcttcacactgagtgataatttaaaattgtttctatgtagaatcattgtctctactgttgccctctctgtgtctgcacacataatgcctctctcactttggtgaaatatcaaaaaaatgcaagtacagcatgcatatttaagaatttctgaactaacacttgaaatcacattttataaagattgttggtactcagagttgtatttgcagcagaaaatgcagaataacccagaaatggagcccggagcccaattccagagaggaagggaaagaagagacgatgcctggacaatgtcttatacatagggaacagagagggaatcagaggtggcttagttccctgaagacagccttatgcgcttaatccctgcctttgaaaaatgggccaatacacaacacagacaataatttgaagcgtctgtattcagcaaagataaatacagcagtccagtctataggtgctctacttagcattcttttcatgtgctcctggtctctgtctcactcacctactttctactacatccaactcaactccctgacaccctatccccccatctattcttaaactctttcatatatattttcacttcctaattctagtgtacatatccctgtatatcatggtatctgtgggcatatgtctgtttcttataaagacacatattgtgtgtgtatgtgtgtgtgtgtgtgtgtgtgtgtataagcatacatgggaattttctgaatgtaagcagtttgatgtgtctgtatatcaatctgtatctacatttgatggactgagtaagaatgttgcatgtgagagaagggatgtgactgtggactcagattgacacacacagattggtggaagaatagcttcagtcctcttccttcatcccatatgtaggtagccttgcttgacaaagtgtttcttctaactctccttcttctgaattgtgcagagactctgttaacttccctttttggcacttagataacttcctattcaaccccctcctttatcttggatttctaaagtttttccccaatattgggaatggtgaggggtggggatgagagactctctgaacaattcttgcagaaccagtgacaatcttatgaatataatgaataagtaagcttatgagggtgatagaatacagatagtagaaacaaagagaggacagcaaaccttttcagcacttctctcagagcaaatggaaacacacagtaagtagctttctgactacattattttctggtcacttttaaagaaagtttacaacctgttctgaaactatttgtcttttcactggttgtaagtgtaccccaatctcagggagtatatctgtagtgccacaggcaaaagatccactccttcccacactcatttgcctgaacttactcgaagggctgcatttctctgagtttacgaaattgtgtcattatggtccccatacagtggtatttaacttttaaagcaacttttaagaaaactcgacttgttttttgttcattttaagtgtgtggtactaaaaagacatgttagactttttttaaaaaagcacttatgttttgaaaatagaataaataataagaatttccaattaaatcatgtctggtgccaatgtgcaaaacttcaaaaaaaattt

SEQ ID NO: 415643 - DNA, 622 bp, Homo sapiens
ggaggccggactggactaagggggcaggagcggcgcctggggcgctgcggcggggctctagaccgcgggaagccagtgctagcgctggcgcgtggtgggcccctgaggccgccggagtccggagagggaccgaaggctccggtggcacccgggctatttctcagaggacaattagtaacgtgtcgccatgaggagccggagtaactccggggtccggctggacggctacgctcgactggtgcaacagaccatcctgtgccatcaggtaactgcaggggtgtctctcgtaatcaccgagcgaggatgtagcttgtcatagcttggacggagaccttggatgaactccgtgcgtgcgtgcgtgtgtgggtgtgtgtgtgtgtgtgtgtgtgtgtgtgtgtgtgtgacggagaccttgcatgaactccgcgtgtgtgtttgtgtgtgtatctgtatctgtctgtagcaggttctcccgcccctgttaattatatattttttctgctggtttttcattgctagttcgctagttcattctaactagaaaggtaaaactttcttttaataatacccattataaatgcacttaataatacctttaattgtgcctttaataatacccaca
